United States Patent Application Publication US 2014/0325702 A1 - sequence listing, part 5

SEQ ID NO: 3308 - DNA, 5002 bp, Heterodera glycines
atccattagcactatgctcggctctgttctgatttctcagaaatgttctggttataagaaatattcagattttggggtagcgactagagaccggaaatttcaaatttgcggatcccgctgcgggattggaatccaaaatttttttgcggactgggatcccgcaaaatcccgcatttccaaaaaatgcggactgggaccccgcaaaatcccgtgtggaatccgtcccgcgccggtctctactagcgaccaaattttttattatgatttcttaaaaaatttataattttggcgttttgtttcgttatttttggtcttatctcaaaattttatttatttgggacttctggactttggtttttttttgttttgtgattttggatatttttgtttctcaaatcgcctcccattttttctttattatgtgcttcacttttaataaatttgtctgtgttttggactttcaattcgtttgtgtttgctgtgcctaattgctggtcttcaagtgtcaatttgtgtgaagcggattaattgaaaaattttactccggggcatcacacagagtaagcaggagacaaatacgctcattgtattccatgcaattttatttatttattttttataaaaattaaaaaaatgtcatcagaagggcgaaaaccacttactctgacgactgttcagataaaagtgtcgtgagtaagtgacaaattatatggatgacaacaggggaaaaaacacaaaatatgtgaaaaaaaaatttgcccttttaaatgcatttttatcttaaaaatctgcgcttaatacagtaaaaattgttatcatgatctgctgttgtttaagtcacctttgtgaagcacaaaaacattcaaaaaacgaccaattaaacgccacagaaaatggggttaagaaatttcttgtttgtaataaattcaccacggtatatggcactaagacctataatagggtgagaccatagttattattgcacaaactgcgaatgtaaggcaggtcaaaaattttccagagtacggaattcaatcctctaaaaaatttgaggaacccggaattacaatctataaaaaaactttccgtagccataattttagttttttttaattattattattttccatcatttaaatttgattttatccatttccaatgcaaaataaaatcttgatttggctttttaaaagagcgtcaaaacgaaaatctcacccaaattttccaaaaaattttgttaaattttcataaaaaccagaaaacaaccaatttttccgaagatttttttcaatgaaaatctgctaaaaatacgttcttttcttaaaaatatgctcaaatcgcaaaatttggccatttttatagacaaatctgttaataaatcgcattaaaaattacaaaaatattcccggcggcgcctattggcaccgccggccccccttgttcccaaaaatttttgtaaaaagctccacaaaaatatcaacttcgatttttcatgctcagaattttacaaaatgcttatttctaagaaaaagttgaaaatacatacaatatatgaatattttaaacatgttttaaaaaatttgtaaaaatgagactttttgacacaaaagaggtttttttgcatgccaaatgaggcttttgaaaattttaatctggctaccctggttgaaactcaagaaaattttttttaaagataaacaaagtttcttagggtgatcgaatatatcaattaagtttggctcaatatttattttatttatttattcgtaaaaataaaaaagtcatcagaagggcgaaaaccacttactttttttcatcgcaaaatttcggttaaatatcaaatttatcaattgacagaactgctagagaccaaccaacccctttcgataaataaatataatgaactttttgagcaatatattttgtaatttttataatttttataattcttagaatattcacggtttttgagtcaatttaaaaaataaagggaaattttttaaatttgagtgtcaacaaaaaatgaccaaattttgcgactttgagctacttttttaaataaaatagaggatttttagggtccggcggtgccgataggcgccgccggtaaaaattttgaaatttttagtgcactttgttaacagatttagtccaaaaatgaaaacattttgcgattttaattgttaaattttattgaatttactttgaaaaaaaaggaatatttttgaaaaattagaagaaaaacaactacttggatgggaactgacccaaaggaaacataatgaaacgagctgagagcactccactcgaccatgcttctgaacaaacacttaaaagcaaaaagtttataaatataattaattttaagtttaccaaaagccaatcattaggggtgcattttcacattgaaaactcaatcctttaggggtgtatttttcccgaaacttcgggtaaaatagccgaagccgaagcacgaagttcgaagctcaaaaaacccgaagttttcgaagccgaagtttcgcctagccctgcctataatgggcaatttgcccatttactcactttgaaaatgcatgcacctgtcaatttgttaatgcatttgtccgaatttctcaatattaattcataaaattgtttgccgaagaatttaatgttgaagagtaacaaaattctcgataaccttttcaagaaaaagaaagtcataaaatttttatataatattaaacacctaaataacggcaagaacaaatttatggttaaatttcctttttaattaaattttgaagcaaaaattaattagtattgaatatggttcttttcaatattttagttgttttttttgctcattttcaagggcatcttgaattcaagggtattttcaaattttcatgtgaggggcccagtttcaaggacgtccttgccattcaaggcatataggagcattgttcaaaaagtattatccttattttaagcctaagctggtttgatgatttttcttaaaaactccccccacgtcctcgccagttttattaattaccctcaacgcgtttttgtcttccttccttccaagatttgttgcttttgttcctcatttgcttaatgctttttcttatctgattgtgctttcccttacgttgaattcaacaaaatctctgcactttttcattaacttttgcttaaatgcaacaatttgtttcctttttatgtgcaagaaatatcgcattttgtgtgttattaatttcctcgttaatatggtaccatccttttttttaaaaattttcatttaaaaatcatgaagaattttccgggcttttcgaggtcactattcacgaatccggtatccatttcggcaaattccaaagcccgaagccaaacttgaacaaaaagtcgaaagtccaaattttcgagtttcgcatttttggttcaaaaccggcctaaacaaacggaaacaaactgaaagccaccaaccctgcaataaaagataacttaaactattagatataaaaatgcgaaatttgaaagtttggattttcgaccttctgtacaaattgggctctgggtttagtaattggtcgaaatgtacgccaggtgattgatcattgatcagcgaccccgaaaccccctgctggaaacatattttcatgatttttaaaatcaaaattatttttccctaaagggataacatcggcagtaattaccatttcctcaattaaatgcttttcaatattcaaatttagaaataatttccttgaataaaatatatatattacatttaaattgctctctcatgcaaattctgaatgttacggatgattgggttgtcggagtgatccgtcgcctcatcgaagtgacccatcggataataacccatgagaaaatgcaacgattttacaccgattttatccattggctctgttttgcactccgttggatgaacgccaaaaactcagtgctcaacaaaaaattaaaattttccacattaatcggcacatttttctgtgtttatgttgtccaacaattgctgcccataattttcccaattcgtccgccgcctgcgcctgtttttaagccgatcacccgcgatgtgatcatttatgccaccttttcatacaaaaacagcaccaggtacatatctctttagacggacaattttcggtaataaactgctggagaattggatctcctgatggaaaattaagttaaaatttttgattcccaattaatttaggggtaaaaaaaaggttgctgctcgctaattttaaaaatcatagcttttgtatatgattttttaccaagtacgtgatttttacaaaaattttgagaaaactaatcggccgtaaaaaaaactcttacacagtgttgtagagctcaacaagaacttttgaatgaactatgctaatgttcggagaagtcaagtttttagtttttttataattttttggaatttaattattcatcccttaggggtcatataagacgggggtcaccggttcgagtccgcttggctgcggtttattttttttatgataggtgatgaaaatcatggacacaaaatccatgatttttcaacacctaagttcagattcttgatcgaactacacatatttccccccccccccccaggttcattgggaagaaaatttttaactttcttttccatcgggaaaccaattctccagtacactacccaatccaattttcggcatctaatttctaaactcttcaaaaagtcgcctctcggtctattaattattttgttcatttgcaaatttggttaattctttttcctccacagtttcggcgtttcctctcacgacacctttgtgctgttaatgatcgccgatcgttccgacaattttccatttatgcgctgcgcacgcgaaaagaccgattcggagcccatccaggcccaggttgagcactacgattacaccggactgtgcaatctgatcatgttcatcgccgtttgcaatttcccatcgccgtccgcggcggacgaacg

SEQ ID NO: 3309 - DNA, 1847 bp, Heterodera glycines
ggcgacgagaaggcgggtcaactcccgcctactgcacgatatggaaagggactgggaccaatcaaagcaagaagaatgagggacgtgctcggagacggtcggggcgaatcccgattcatcaactcattcaaaattgatcagtcctaatgtttgccttttttcataaaatctcttattccaatttttatttgcatttttgttccatttcgtaccattcacattttgcccgttccttagtcccatttttgccccatcacatcccttcacaattcaaattcatttctcatcggctggttcatcttcggccaactttgtctcagcaaatttcctttcacaatttctcactttccacatctgccaatttacattttatttttgtgcgccatttcctttgtgctcatttttcacatcacaattttctgtccgatttgttgtcctattttccatttcattcacgtgccgtctgtcactccgcccatttttcaaaattatctatttaagcggccccgaccaaggggtcgctctcttccttctcttccttccagcccagggggcttctcttcgcttccttcaccctccaaccattcgaatttattcgatttgctggacttttcgatcaattttcaccatttacgcatttttaattcgtcgatcgcttcgttaataaattttgtgtcggaatcggagtctcggattcgttttcgggggacactagaaggagggaaaaagaccctcctcactccatcacgttcgtcaaattatcgtgcggggccaaacgagggcgcccattcctgacctgatcccttcctttcccggcagcttacgtcgtctctcccaaccctcccgatccaattcccttcccgtcgcaattgggggaagttcgggagtgcccgaagcagcggcaaattcgagcagttcggtctcccaccagtcggagcagccgaagagacgggtgtgaactcccgtcgtcgtcaagtccaagcagggcagtgaaggaaggaagagccgagcggtgccaaatcgtccgacgagggacagggccgttcgtcagcgcaactcccaccagccggagaagcgcgtacagatcaaagcggactcccaccagccggagtgtccgttgcagcgagcgggagtcgaaacccgtgttcgtcaagtcaaaggggtccgacaagcccttctccaaatcttgccggtggtgccgttaagcaagcagcaaatcgctgcacacaatccatcaagctccagtcaaatttgtcacccctcccccctcccattctcgtccccctttggcgccgatcggatcggtcggcagcatcagacccatcagagcgaacggcaaaaaagggcgcaattccctttacggcatcgcgagcggagtgaacggaaagagaagggacgagagcggtgaagaggagcgggaaccaatcccgcctcagctgggcgaagccgcatttggccaaaccccgccgcggaagaaaagattggcgacaattatattgtatttacggataatgctagaatcaccattttttcacctatctgagctccctaaggtttgaaacacgcgaaaacaacttttggttgttaagctacttttcgagtcatgcaaaagcctggctgtaaataaagaagttgaactgtcactaaaaaacagttgctttccgaccgatttgtttttgatcacattgatcagagttctctgatcagcagtccgatcacagcagaatgacgaggccagcgatcgcaactgccaatgcgaaataagacgggcctccatctccctgtgggcctcgccagcagaagccgtggtcgaccccctttttgtaggacacgcatttgtagccttc

SEQ ID NO: 3310 - DNA, 2736 bp, Heterodera glycines
  unsure (1)..(2736): unsure at all n locations
ttaatttttttttgtttttatgaattatcctattaaatttcataaaaacgaaaaaaattaatgggtcgaagcaagaaacatttcgcgtgtttcaaaccttagggagctcagataggtgaaaaaatggtaaccctagtcattatccgtaaatacaatataatcaaatattttgggcactttataaaaaagattttttaatattttggcatttttagcaatacacggcgaagcctaacggcaccgcaggcccctttccttattcctgaatttttttttgaacaaagcccactgctaacattgagcgaaaagcaacaaaaaaaaagtcgaactttattggttgacctcattgacaattaattaccttcgaccactctccgatacctggaacattcgaaaaaacttggtcgatccaccaccctttttccatgtatgcgaaagccaaaatatgcgaaaatgcgaaaagcgaaatgcgatttttttttaaattttaccaatagcttttgaggttgtgatgcaaaaaaaaatctgcattttccggttcgatctttttctcagataaaaaaatgacaaattctacccatttggtggttaaaatttcaaaaattaaggtaaaatgaaggtccggcggtgccgataatcgccgccggaaaattttttggaaattgtaataaaatatggtaggaaaagttgcaaaattttcaaaaaatttactgtatttcaaaaaaataaatcgcaaaaaaggcaaaaaaatgcaccaaaaagtttaagataaaagcttcaaaccaagttaaaaactcgttttcgtgcatattaggctatagcaagttagcaaaaaaggtaatattagagttgcacgggaccgggaattttgacaaaaaccgggaccgggacttaccgggaccagaaaagtcgggaccgggacctcgattttcgtccgggactgggaccaaccgggaattttcccaagtgaaattttttgaaaaaaaaatttgaaaatttgagtgcactttgttacgaaaaattgcctatatttaaatgtgtttgtggggagaaattcgaagaatttttccattttaacagaaaataataaactgaagcattcgttttaaaaattaaattttcaaatatattcatttcttaggggtggaaatttcgcatttcgcgccaaaaagcgaaatgcgaaacgccaaaaaatgcgaataatgcgaaaggcgaaatgcgaaaagcgaaacctcggcccatcccttgtaaatacatatgtacgaaaaatttgccaaaattttggattttttttgaggatttccaaaaatttaatttaaaaaatcctcaaaacatgtaagaaaaaaatgaaaaatgttagaaaaaattccaaaataagtaccaaatatgtataaaatcacgaaatgtgtaaaataaaaattccgaatatgtaaaaatatataaataaaagtcccgatttttgttcgcaaacacaaaaaagaaagtgtttttcctaccattcagagcatggagaagtcaggaaaaaatatgtatttaaattaaattgaaatgcttagagtgcttttaaatgacacgaaaatgtggttgtttttttttttgaaattgacagaattatgcacaaaaaaccaagacagttgaagggactcaaaaaatttgaatggaattaaagtgcaatgaattcgttttttcagttttcctcgacgccgcttctccctggccgcgtggtcagcagcagaaatgaattaattaatcaattgattgatgtaatttgtgatcgaaatgattttggcactttggaatttcacattggaaattaggagaaactgggccataaattgggaaaataatacccaaatttggctggaaaagcatgaagaaaagtgcgaaaatgattgaaaaataataattcaaatattcgctttaattaaaaacgataagtaaaaacagtcatttaaattttgcattttttgttttcaaatccaaaaataagcacaaatcttagaaatatgcacacttggccactctgcgataacaccaaaaatagaaaacttcttttcaatttactttcttagaggaaaatgccaattgctctaacataattgaagaaaaatgatggaaaaataaaggaaaaaagaaaattaagcacaaaaaggtaccaaaaaaatggagaaggaaaacaaaatgtttggaagccgatttttaacaatttacgataaagtaaaagcccgaatgtgaaaaaaagaggttgaactgtccctaaaaaacagttgccttccgatcgattggcctgtgatcacattgatcagtgttctctgatcagcagtccgatcacagcagaataaccatgccagcgatcgcaatagccaatgcgaaataggacgggcctccatctccctgtgggcctcgccagcagaagccgtggtcgtccccctttttgtaggccacgcatttgtaaccttctttacacggattgcccttagaacagccttaaaagaggttaaacgtatcatttcgatcatttcaattgtttcttatttctaccgcttaattgattttcgcggatttaaatgttaccctacaaaatggcatcattattttgggaatggcactttttcgccattttttgccaatgatactttttgtactcattgaaataatcaccagcttttgccctatgctaggcctcacccaaaatttgcttactttaaanatagttttgtttcgcattttctaatt

SEQ ID NO: 3311 - DNA, 1754 bp, Heterodera glycines
tcagtttttaaggacctctaattgtatcatctaatataaattcatggaaaagtattgcttttttatttgaatttttatttttatttttaaaaaatataaaaattattttaaaataaatgcgtcaacaatagtttttattaccaaatataattgcaagaatattatggttgcggtaacatttacgcagaacattgccaattgcatttcactttaaaatgatatttttaaataattttgccggaaaaaaaagaatttataatattattatgacgataattttaaataataaatatacaaattggaatttaatttcttaataattagcttagaattttattttaaaaactttaatttgagtaaatgatatgcattgcgattttgcggtgcgcttaaataatgccaaaaataagctaaacaaacaaaagtcgttcattcattccttttcataattaaggaattgaatttctaataatagcaattttatggtttcgcgttcaaatttgtttgttcttaaggtgaatggtgagctttttatttagggccaaaattaatttacttttttggaagtttttttaatttgctataaatcgctataatttataaaaacaaaaattggcgtttaaaatgaataactttgagcaggtgtgcaatttgaaggacaatttgtaaatgaattggattcatattatttttgttcgtttcttaatcttcattgttaagaattacggctgaatcttgtttcatattttgtggctttttaaataaaattaaagcaaaaactgcgtgccatcgcggttactctccgccaatcattcgtttaacaatgccaatttagtagggtcgtagccgggcgagggggatgaccccggttaagccggggaacggggagagcggggatgacgaaacgggcgatcgccgaaaatggcgactcataaaccggaggacgagaatttcgtgtttcgttttcgtgaaaaataaatattgaattttaaaaagaaaaaaaaatttcacaaatgcactttttaaaggggaccgacgatgccgaaaacgggaccagtaaattgggcaccagacaccaagcggaaaactggacaccaccagaattttgtacaacaaaggaaaattggacaccaaattactctttttaaaaaaaataaacccatgaattaggtgaaatataaatttagtaggataaatgattaatgaattaaggcacttagagtcgatcaggcatttagtaggcacgatcattggacaatgtgccaaaagctcacgaaaaatggcaactctatattcatttttatatccaattgtccaatttatttattttaattttccctgcgatttaaatggaaattttaattactttaaccttcaacttttcctaaataccttaattataatgaattcaattaacaaatgttcaaaatgattttttccgctttattttttctgaaggcgccaattgtaccggcggtaggcgtcgcccctgaatataaaagtaagttggcccgatttcttaacaaaattgcatcaaaatttataaatttttagtttgattttcacatttattaagcacaaaagaccggcggacgggatcgatcgggatcccgctcgattttctcgggatcccgcggtgattaaattctggatcccgacttcgggatccgtcccgaacctttttttaaatttatcggaattgatcgagagatctctccctaccattgggcaaatcccacaggacccaaaaacaa

SEQ ID NO: 3312 - DNA, 1513 bp, Heterodera glycines
  unsure (1)..(1513): unsure at all n locations
cgtttcgttttctaaattttttttttggttttcgctatacaatgggcctgacccctcgatttnttannngggttgnttcctccagaagaaannnnnaggnngannnnnacanngannaagcacaaaagcccggcggacgggancgggancccgctggagnnncncggaancccgcggggannaaanncgggancccgacancggggnccgncccgaacccnnnnnaanncancgggangganngaaaagancccncccgaccannnngccaancccacggaancccgaagncaaagccccggganggancgaangggancgggannnggggnnccnacgaacccagnggnncggncncnaanaaccaccanataaaaaaaagcatnnccgagnnaacaacgnaacgcatngngcgnnatnnnnngnaaaaaaanncnnaaaccagnnaannnatnaaaaacttcccctatgtccagttttataataatcaagactttgtcactttattaatttgtctgaattattttgggtatttatttatactcgtgctaattctgatgaacatcatttacataatttatggaaattatcgcgcttaattggtctaaacattcgttttctctcgcttctatttttcccattctattttcaattttttttttctctggcttctcttttcccattcattttaaatttcgttttctcttgcttctctacttcccattctattttcaatgtctttttctgcctcttcgtcttttcttctcatcattgctctgcttgtctcgactatggcttttctcactccgcctctctttttctctgccattgtgatagtttcgctccttctcgctatttcttcgtctgttttcatcttttgccatttccatgtttatgctctctctatccatcccttcccagtctatgtcttctctgccccattctatttcaccttcgctcatttcttttattcccccctgtcgccgttcatttcgccgtctttttctctcttcccgtgctattttcctgtccaatgacaatctctcatggaattggttccactttctctgttctctctctgtgaatgcttctccttctaatgggcgtttgcgttttcgtaatttgcaacgattagcttaaaaatatttttaaaattaaaatttaattttttacaacccaattttcaattgtctaaacattggtctaaaccaatttcttaaatatttaaatattaattgaattttaccatataaatatgatccttttcttgggtccacccccaatgcttcttcgtcatccgtgtcaagaaattttgtgcgctttgggtgttttggtatcgaagttggttttggaagtttaaaatatttttaaaaattaataaatttattttacaaaatacataacttttattaagcttcactttttcccttttcatcatcattttatagtcttcaccagcaaaattaacatttttggcatcttctaattgagtcccttcagctttttttctttt

SEQ ID NO: 3313 - DNA, 907 bp, Heterodera glycines
ccgctctctatcataaaatgaccaaagcatggattaattgttcaaaatgagttagatcacgaattgaaatcaattaatgagacatgctgataatttaaatgattagtgttttggatcactcactcattaaacgcgtgaaatgaatcgattagtgatatcaattcagtgattgattgagacaaattaataagtaactaactaagcgattgattgaaacaaattaataataattgatcaaggtttgactcactcaaacgctttccgttgagcgtgaaaatgatttgtcgcgtttccaagttcatgccgcagccgatcacgtcgccgatgccaaacaaagacggtgacagctcgacaaaaacattgaatgaatcattctcgtcgatggggccataaaaagtgccataattgtgatatccgtatgagttatggtggggtttagcaaatgtgtccaatggcatttgccgggttgaaagcccaatgtaaaaaaggcttaaatgaaaaaataaatattataaatttgaaattttcacttacaattagttcaaacggcaatcgtgctgggtcctttcgtaaaatccgccattttagcgattttttcgacaaaacatggcctaactctgcttaaaagcaaccaaaatttacaacattcttggtatcattcgatatccaagcgttttctctataagcatgcaaaattttaaataaaaatatcaaattcaaaaataagttatggcagaattattgtacttgattgcaaagttgatcaatttttttttaaattttgtaaactaattgagaaaaagcttggctatcgaatgataccaagaatgttgtaaattttggttgttgcatttaagcaatgttatgccatgttttgtcgagaaaatcgctcaaatgccggatttta

SEQ ID NO: 3314 - DNA, 2533 bp, Heterodera glycines
aataaaataattatgacaattttagatctttttatatattaaaaatacgatagaaaaagtctatatattaaaataccgaactaacaagataaagtttaaatgtaaaatatgcataaaatcattatggaataggaagtaaaagtgccaatgcatttaaatcataacgcttctgcactttttcataggccctaaaaatttataaataaaaaagaaaagcgtcatcgatcattttattgattaaattacaaaatttatttatttatttatcgagcaaaccaaaggcacatgagtgctcttatatggtgccaaaaagaaaacaacaaataaagttggtcaaataaaaaatacaaaatgaatatcgtaataaaaaaaatgaataaaaataaatcaatcaaatgttaaaaattcacaggtgataaaaatatagtgtaaatatggcaacatggaaaatgtccaggcggatgccgaacagactgatcggcaccgatcaaaagttccccttgacaatcggccaaattccatccatttgttggctgctcgacaaaaaagagctaaagaagcgcattgtttgaatattttaaatcaaatttagccactgctgacacctcaattcccctaaaaaaattttaaaaattcctgccaaaattttttgatcgaaattttgatgaaaattttgtcttatgtatattagggatggtttcgaatgccggttctttttttgaaccggaattacggagatatttcgggcctccggaaccgcccctgctccgaaatcattgaaaaacaaatgaaattttcaaccaaatgccatgccatgcctcgggaattttgtagctgaagttgagggaagtgccaccgaagttggccacaacagacgcattccatttaagggaaacggttgggtaaagatcagtcgcactgacaaacaagccagaagtgtcttaattgaattggaattttaaattttaaaaaaaacgaatttttaaatttcgagacgcttagagaggcaaagcgccagaaatttttcaaatttgaacgagtgaatattcattggccaaagacaacggctgcatccaacaaaaggcacaacagctcagctgatcgcaaccaagtaacttttttcctttttgatcaatcaataatcaagtgattggacgcaaccagggaaatctttcgtttccaataaatcaataaccaataaagttagggttcgatcgcttgattagtttgctaccctttttgaccaataaacaatcattaataaattattggtccatcgattgtttggacgtaaccgaaattccgatcaatcaataacgaataaagttattgctcggtcgcttgattggacgcaacccatttttgatcaatcaataaacattaatagtaattgccgaagattgaatggagacaacctactgaaattctgatcaatcaataactaataataaatacatattatttgctcggtggcttggttggttgcaaccctttttgatcaatcaataatatttattgatttaaccgattggttagacagacagactcaaacgttttccgttgagcgtgtaaatgatttggcgagttgccaaattgacgccacagccgaccacgtcgcccgtgtaaaatgacgcatttgcaacagcgatccgacgattgccctgatccggcacacttccctcaacattgtggccccaaaaaccagctagtttttttctgaacacatatgcgtacgtttggccataagttggaagccatttacgggttagtggaaaatcgcgggtggacagaccaagcgaaacttggctgtacctgtaaaaatggcaaaaattttgattgggaattaaatggcaatgtcccggggattggggtggcacgctaaaaatgccaaaatagtgacgaataagtgacataattttcagccaaaaattgaacaaaactatttttttttcactagttcagttgccaatgaggtaaatttcccttataaaattcttctagcaaatattttaactttttaaattaaaaattttgtcaaaaaaaaaaattcgggggaaaaatttttgagaaaatttttacatttcataggagtgtattttttttttaaattttcagtcgtttcttaggggtatatttttctgaaattttggagtcgatttttattggtgtattttccgtttttattgcatttttgctgacaaatttttcaaaaaatgtcgaaatagtgtcagaatcaaaaaattttaacgcagaaatgcgttttttgagctcctttcttcaaaacaattgagcaaaaaaaaagaaaagttttttcactaaaaattgcttccctactgatcaagccaaaggtaatagtagtgtactttatgattggccgacatttgcggcgcccagtcaaagcgacacttgcggcgccgacacttgcggcgccgacacttgcggcgccgacacttgcggcgccgacacttgcggcgcccagtcaaaaggacatttgcggcggcgcaaaattcaacgaccccaaaaatattatcaa

SEQ ID NO: 3315 - DNA, 2133 bp, Heterodera glycines
ggagtttcgataaatcccattaggtgagcagcatcaatagcagtcgcttttatagaaaaataaaaccaataattaattttagaccattgtcgccaccagcggaagaataagaagaagcggatcaaagcaatgaaaatgtcgtctgattaagtgtacggaaatgaataattgaataattctatttgagaaatgatcgatctcaatttgttgtgcttattttctctcagaaatgcttttttaattgtttcgttccaattatataaaaatatgcttttttgttgagcaatttattaataattagggtttgtaatcgagaccggataagagggtcggtcgaacggtttcggtttttttgaatttttttatcttttcccaaaaaaaaacaataaaccatttttatcaatagaaaaagcgaaagatcacctctgagtaaaattgtagagctattgaaactctattgaatggtgtactacagggatggagttccgaggcactaaaaattttcggaagtcggaattccgaggctccaaaaattttcggaagtcggaagtcggaattccgatgccccaaaaattttcggaagtcggaagtcggaattccgatgccccaaaaattttcggaagtcggaattccgaccccaaaaatgtcggaagtcggaatttttcaaaaaaaaatataataaatttttaaaaaaatatttaataggctaaatttttaaatttttaaccatgtaaaaggtaatttcaaactgtttttagtttatttctatattttttaaaaagatcaaaatattttaagtaattttacattattttggattttttttttgggaaagttacaccctttttttgcggcgcgcttatccaaagagaatttgagaaactgtggggaaggaagggtccggcggtgccgatatgcgccgccgggaaaaattttgtaatttttaatgtaaattgttaacaaatttgtccaaaaaatggaaaatttagcgattttgagcaaattttcaagaaaattaagtttttttttgagtccggcggtgccgataggtgccgtcggaaaaaaattgaaaatttctatgcaatttattaacataaattgtacaaaaattgctaattttttgaaaaaaaaactcaaaaaaattccgaaaaattccgacttttcatcaaaaatttcggaagtcggaagtcgggattccgaggccccaaaaattttcggaagtcggaagtcggaattccgaccccaaaaatgtcggaagtcggaagtcggaattccgtgccatccctggtggggactacaaacctgcgcgaagtcacagctcataatcatttgccgaattatgacaaaacaatagtcggtttttatcattagggtcgctttaagaaagtacagaaaatggtcagcggatgggacttttaaaggtcataaatagggttgtaaattatatggactaaaaaacgcgaaatatggacattaaatatggactaaaaaagcctgaaatatggactaaaaaggccaaaaatggccaaatatggaccaaaatatggataaaaaatgccaaaatatatgttgtaaacccccaaaaatcccaaaaaaggtgtgcatatttaatatttgcttaaataaacctaaaaagtacaataaacaaccaaaaaatggggtttaaaacttaaaaatgcatattttttattgttgttcgttgtatcaaaaacacctccaagtttgccaaatttcgaaaaaattctcattaaaaaaaaagaaatgttcgcaaaaaaatgacgaaaatatttattgaaaatgccaaaatgacgacgaaaactcaaatttttcgtgttttgtggggtgtaatttttaaaaatttccaaaaagttgatctttaggggtgtatttttcgtttttttttcatttttcttgtgaaaatttccaaaaaatggccaaaatatggactaaaaacccaaaaatggcgaaatatggatttattcccgaaaacccccaaaatatggatttatatggactaaaaaccttcaccaaatcaaaaaattttaacgcagaaatgctatttttaagcccctttcttcatagcatatgcgcagaaaaaatatgttaatccatataatttacaaccctagtcat

SEQ ID NO: 3316 - DNA, 1034 bp, Heterodera glycines
gtactgaaaattctttgcgggacgggatcccgcgggattaatcccgcaaatcccgcatttaaaatttgcgggatcccgcgcgggattgcgggattttggaaaattcgaaaaaatttcaattaaattcaaaaaatttccaaaaatcaaaaaatgctgaaaaatcaatttttaagggctggcgggatgcattaaaaggggctgatgggtcgactaagatttttcgattggatccgacggtaaaaagttgatcggaaatcaaattattaacggttcataaatttgactattttttcttttcaaaaccacttttttgcggtgcaatttttcaaaaaactaggaaattccggtccttatcagggatggcattccgaggccccaaaaattttcggaagtcggaattccgaccccaaaaacgtcggaaatcggaaatttttcaaaaaatatacaatataataaaaaatttctaaatattttaataggctaaattttttaattcttaaccaagtaaaaggtatttcacaaatgtttttagtatacgcttgaaaaaattattcaatattttatcaaattttttttttgtcatttttcattattttagaacatttttgggaaaaggagtgactatttacacgttttttacagcgcgattttttcaaaaactttttgggaacttggaggagggtacgggggtgccgataggcgcagccgggaaaattttattaacagattttgtccaaaaaattacaaaattttgcgattttgagcaaattttgcaagaaaaatagggatttttagggtacggcggtgccgataaacgccgccgggaaatttttaaaaatttcagttcaatttattaacagaaattgtacaaaacttgctagtttttgaaaagaaaaattaaaaaaatttccgacttttcatcaaaaatttcggaagtcggaattccgatgccccaaaaattttcaaaatgtcggaaagtcggaagtctttatgccccaaaacttttgcctatcgacatctgcgagaaattttat

SEQ ID NO: 3317 - DNA, 895 bp, Heterodera glycines
  unsure (1)..(895): unsure at all n locations
aatttatttaaaaatatttggcattgtcttagaaaaattttcaaaaaaatcaataaaatcccgcataatcccgcacaaaaaatcaaatttgcggatcccgctgcgggattggaactcaaaattctttgcgggacgggatcccgcgggattaatcccgcaaatcccgcaatcccgcattttccaaaaaatgcgggattgcggnactgggatcccgcaaanatcccngcgcgggatccccgtttccccgccccgnggcttatttcttcctgccttttttttcatttttggcttggcgccaaaacgtcggcgccaaaacgagctggtcccctgagagagtcattatcaatgtttttaatggaaataaattgttgaaatatttttggggtcgttgaattttgcgccgccgcaaatgtccttttgactgggcgccgcaagtgtcgtcgccgcaagtgtcggcgccgcaagtgtcggcgccgcaagtgtcgtcgccgcaagtgtcggcgccgcaagtgtcggcgccgcaagtgtcgtcgccgcaagtgtcggcgccgcaagtgtcggcgccgcaagtgtcgtcgccgcaagtgtcggcgccgcaagtgtcgtcgccgcaagtgtcggcgccgcaagtgtcgtcgccgcaagtgtcggcgccgcaagtgtcgtcgccgcaagtgtcgcatcaccgtactttatttggtttcatattttgaattttttcgaaaattgaattttcgaatttttgttcgaatccgggtcaggggttcgaaatgggccaaaatagatataagaatcgaattcttcgactcagaaaacccataaaacaactttatttcgaaaaaatttttttaaattttcttttccaaaaaggggggggggggggctacaaagtaca

SEQ ID NO: 3318 - DNA, 3081 bp, Heterodera glycines
tgtccgtggaggctggccgtggcgaagaaggaagaaacgatcagttgaatcatatcttaaagaaaatgttttaatttgtcattttattttatgtattaaagttctacacaatgtttcatctcctaactctgctgacatcattttgagtggtcaatgatgtttgtttttttgagattctgatttttgagaaaaatctctcaaaatggccattttatgtaaaaattctacaaaaactcccaaattttcaattttatgggtgataacattaatttttctgtgtgtgactttttattcctttgaaattttatgcttatcttgtttattaactatgtgattaggtttctgtgcccgcccctaaatttcacctaaaattaacaaaattagaactataaattgccaattttcagtgaaaatcggtttaaaatggttaagaattccagttttccctcggcggcacctatcggcactgcatgacaccttttctttcttaaaaacgctcaaaataacaaaattcgatattaagttgcaccaatttcaaaatttttcccgacggcgcctatcgccaccaccgccccctgttcccagaaagttttcggaaaagcgcgccgcaaaaaactaaccctttttattgattttttaataaggggttttgagggcaaattaaaggtctactaaagtcataaaaatttatttcaagcaaacaaattttcaattatgctagccactgttgcttgcctttgacttttggtcaatggtattgactctcttttcagatagtcaataagaattaatttaaatatttaatttatttaaattaaatttattttattggatttcccaatacttcaattatatttcacactttattagtgaattttgatcgaacaaatatatttattaatgaactattgaacgataaaaaaatggtgattttacaatggtttaaatacggcaattttacataggcgggctgacagaaatttaaatgtaaacaatgctgactaataaaaaggcttaaaatcacaaaggttatgaatttggcgtaaaattattttaaacagatgaatcataaaattttaaattttcgtcgctaaggatgaaattagcgacaaatggtttagaaaaatatttcaaacaaaaaatttctagatttgaattttttaatttccggtgggcgcgaaacaatacggggcggggagggagggcgaggaaacgaatgcatccattttgaaaatggtttggttttgttaagtaaaaaaagttttgaaaaattttcggaggaaatgttacactttaaaattattaaagaaataaaagaatcaaattattaaaaaaaaaactcaacaataattgggctctgaatttacagatttacaccttttaatgacaatttaagttggtcgtgtcttctttaaggtcgttaaacaagaccttttttgtttaaaattgaaaaaattacgtcatagattagggttaccaaacatgaaaaagcattgttacaacactaataaatttaggtaaagatttttattcccacaatcaaaaagtacagagttcaatttagtacaatagaaattgattgttttaaattaaaaaagatgaaagatatacaatacaataattactaatttaatattaaaaggaaaaataaattattaaaaggattaaaaataaattattaaaaaaaattcaggggattttggggcttcggatttgcacactttttgcttccatcatcttcaattcttaattaagctgatcaccaaattcggaagaattcacgagcactaaactcaattaaatatattaattaataaaattttaattaaaatgtttttaccataaaccagtgaatgcttgctctttttctgcatcagatgatcaaatctcggcttctgatactaaagaaaattaaatttttattgagtcagcaaaaacagtttatttaagaaaaagcaaaaattaattgattaattaattaaaattacccataaaatattttaaaaatgtgcttacaaattcataattttcaaaaaagtattaattaatagttttagtcaattgattttattgtttttatttaaattaactattctattataaataaaaaaagacttttatttaattattaaaaattgtttaattaaaaaataaaggaaattaaaaaatatatattaaaacttaattttgtttaggtcataaattatctgttttaaaacttactttcatattttcgcatgattcggtgaagctcggcgtgcattttgcattgttcttaaaaatataaatgttaaaataaaatgaatagttataagtttcatctattttaaataaataaaaattattttaaaaatcatttcgcgcatttttcacaactttagcgctatgcaaacttagggggctttaatccaattgtttagcagaccttaatgccttaaaactttcaaaaaatttccggcgtggcgacgcctagcgatgccaccaaaatgcaattaatttttggtgccacctgcatacaggcgcaaaatttgtcggtgcatttggccatggcatcgccgccctgagggcaccccattgacatgcacggcactccggcttccttcgcaaagcatcttttattggaaatttggggaaaacaaaggcataacaacattttgtctactttgaaaagctaaggcagcaactgtccatttcgtctgaatatacggtactgtactgaatgtagttacggtattatgtaagcgaaaaaacgggcaggtaatgatgctatttaaagcacggtaataaatcaagaccaaattttaattttgcggatcccgacgcggaatagggattcaaaatttgcgggacgaaatcccgctggcttaatcacgcaaatcctgtaatttgcaaaaaaaaatcccagtttttcttggccaaccagaagcaggatgaatgaatttttggaaaatttgggggaatttccaagaatttttcaaaaataaaactggaccaaaaatgttttatgaaaataagaaaaaatttttttagcctacttagcagttaaagctcaacttttcttaaaaaacgattgcttgataa

SEQ ID NO: 3319 - DNA, 1726 bp, Heterodera glycines
  unsure (1)..(1726): unsure at all n locations
ttgataatttaatttgccgtgataatctcgtgcaattcgcaaatccacgtgccgtgatgtggcgccggaaatgccgtggtcgtcgtcgtcgttttcagcttcggtggcaccatttgttgcgtggtcgtgttcgcttggcagctttctgcctgaaaattggagcgatgaaaaaaaaaatcgaagaaaagattttcaaggaaagcagaaataaaaaaaatcattaaatcgttttcaaattgaaaaatttttcttagaaaaataatttttagaaactgtactccttaaaattcttttttaattttttttttattatgtattaaacattattctaacagtattatgccgtttttatggcatttttgccctatttggtattgtactttctaggaatttttgtccaaaaaatcagaaaaatttttttaaatatttttatacatatttttttgctatttttcttacatctaattcccatccctattaattaatacgaaaaaatatatttttttgaaaacatttcaaattatagtaattttaaaagatgtgaatcctttcattttttaaaataaatatagtgattttgtattgatttttaaataataattttaaataatcattttaattttataaaatccaacatttccactttaagatgcacaaaaatgaattagaagctcgatttaaattaaaatgttaatgtatttaaattttatgttttgcattttgcttctttctacctgcgctgcgtcgaatgcttttttgccagcccattggacggaataacaaaacgaattggccaatggtccacactcgctgaattgtgtgcgtcgcttaaaattattattattttttgggcaaactgtacttaaaattccaaatatttttaattaaaaagaataattacgcttaagcaattgcaaaaaatgtcgtcacaatttttttgcgattcgccacacatggaatagcaactgaaaaaagcggactcgctcagttcggccgtcacgattcggccctcacagttcggccccaacgtgtttttccactatagctttttatttgtaatccaaatccaataatcttggtgtcatccgaaagctcttcacatgctctattagccttacaaaaagcgaaaagatttcaagcctggaaaaaatttttattatgaaaaacccaaaatttcgactttttcgcaattttcatgtataacttttttggtaattgtctaatcgcgaagcaatagcttagaaaaagtcttctaaacatgttaagcattcgaatgatgccaaaaatgttggattttgataataaagaaaaaagttatagaaagttatagtgaaaagcatgctggggcccaaagtgccggcccaactgaggtgtgtacctcttaaagcacaaaattatattttttgcgttattttttaaacatgtatcatttaatcaacaaaatttaatcttcttttttttctctttttaaatttatttttaccaaattcatttttccattgttttatttccctacgactaatccccaaattatgcataatttccttttcaatttttgctctttttcttccgtcataattaaagccataaattttttcttttttcatttcatcaaactctctgatcagctccatttttgtgaccatattaatgtcgtccttattttgcgagaagaagctcgggggaacgtgtttgtccccaatttttgcttcaantttaaaaatat

SEQ ID NO: 3320 - DNA, 6165 bp, Heterodera glycines
aaaaaaaaattttttttttttttaaaagaaaatttttgaacccttttctttaaaaaaatgcgaaaaaaagtcaaaaaagtaattcggacgttttggggtcgcggatattcaaatttaatttaaattttttcatacaaaaaaataaataattcactcaactttaggttaatttttggcagacatattggcacctaaagaaatacatggtagttaatttatcgcgaggttttgaccaaaactgacttggtgatcaccttgcatgagattcgttttatgacattcaattagattctgaaatttttagttgtttttttttgttgaaaatttagaattttttttattatttaccacaattgtgttgaaatctggcgcgtccaagttcagttttttcatgcgtactaatgtgacgagttgacggtgggcgatgagcagtccaaatgcaattatctattgaaaaattaaaaaaaaaaaatccggtattttttttttgtagaattacatttggacataattcattgatacctgtgcccattgtttgtacaagaaagtctctgtccgcctgatggagtggcaaaattcgaaagcccaaacattcagcaatttttttcgttttagtaataaatcagttaaaacattgcatgttttatcttccatacagccacatcggacattcgtggtataccttgactcatcacaccaattctctatataccatgccatatttcaatattaaaataacaaataaagacataagttgtggcagaaatagtgcttatattcatacaactttttctaaagttgacctaatttttttaaattgttaggctaatagagaaaaaacttggctatcgaatgataccaaaaatgtaaaatttggttgctttttaagttataccatgttttttgtcgaaaaatcgttaaaatggcggattttacgaaacgacccagcggggagaagacccaaaaaatttagggatcagagatgggaagctcgggaattcggtgaggaacgtccttataaatttgaaaattgccttgaaataaacaaattattaataaagaaaaaataaaataaaacaaatttatattaaaggatggagataataataataataataataataataatttaaatttaatatttttgccaataaacaacttgcttctcatttgcaggcaacccaaactgtttgcgacgagctctttcgccatcaccttaagaaaagccaaaaaatttttgcatagacaagtacaggctcgtaaccagaaaaattttttgggaggagggaacgcgaaaaaattttttgccattaatttttgcaaaatttttagtgtcgaagagaaaaaaaaacaggaatttttagccgtttttttcgcaaagatttaccaattcgtccattttggtgtcatattttcaaaatttgttaaaatggaggtcgggcaatgactacagatagggtaacatcggtaaaattttttggaaattttatgcgattgtttaagaaaatttagtaaaattttcaacaaaaaaaaggtcctccgtttgcccctaattccgcccataccccataccaagtttagaagcgaagaagcttgcaatcttttttctttaaaacgcagcaaggcaaaattaagtttcggagtctcagtctcggggccgagcccccggcctcgagtcccggtgtcaaattatctgtcttggcctctagcctcacggtgttaagtctcgggatcgagcctaggccacgagtctagtggtcggttttcaactcgagaaaactcggattttttttttggtctcggtctcgtgtctcggggtcgaagctcggtctcgagtctcggaattgagttttgtcatgccccggtcttaagtctgatcgaatctcgagtcgagttcttggtcacggtctcggggtaaagtctcgcgttttttcggaaaattttcggcgactcgagcaattagtgctaattgatctcacctcactggcaccggctgcaccgcaagcaaatggctcattggtagcgttcgggtactgaatttgttccaccaaatgcatgatcattccgaggggcattgtgtgcacataaacaacgctgctcattgcggcaacaacattgaccactttttccaacgtttcaacaaccacatggccattgtcccaaatcgattttgctgtctgcaaaaacgaggacagacatgcaccaaattagtgccacctgattaattatatttgcgactaattagtgcaatttatattaattagtgtcattcacaattaattagttccttttggcactaattagcgcaggttactaattagtgatgtttgcagcaaattagtgtcattgtcattcgctacaaagaagtaccattccatttgaaactaattagcgcaggttattaattagtgcaatttgcagctaattagtgcaatttgcagctaattagtgtcatttgctaattaatgccacccaattcatttatttgacctttgcttttcgaactattttaacaaaaatcagttttatttgtttgaaatttcttctttttccaggcggtgtctatcgctacggcgcccccacaaagtgtccaagccacgaaatgtccaaaagagtaaaaacccacgaaatgtccaaaatttttcaaaatttataaaaacaaaatgagtctaatttaggatttttagggtttcggggtcgctgaatacgaatataccctttatattaccccttgcctaaccttaggcccatctgaataataaaaaactcaaattcgagacttggacatttgtgggtcagcgatcgctactactgtaatttcattttgccagaaaaaaaggttgcatataaatgttttcggttttcggcattctgtttttggcttatgtgtctaaatttttttcattttcattggtttgaaaatttgaattccaacttaaataaaaatttagtgccaaaaattttttccattttctgcactttaacggtgttattttggcttttcgtcaatttccactcacatttgcaataaaacttccaatagagtcgaggaattcccatccgcctccgtatccaatgttaaggctaataaccaaaataaacagcaaaattttgtggcacatttttacggggggatttaaaaaagaataattacctaaaaaaggaattatgtaattaactaattaattgaatttcttttacttttattttgcttcgaattatacaatttaaaaaatgaacaaatgagaaaatggaataaatgaaagtgaaaatgaatccatcccactgttttttttgctttattaacatcatttttctgctgattcatcaacgaaagcgcttttcccataaaaatggcataatttattttattttaatttttttttttgtatttgataattattcaccataaatgtaactgtttttgctgttaatcctcatcctcaatcatttcgaacaaattgtcgcatcactcgcggaaacggacattacgggtactcacttttaaaaattaaaaatccaattaaacattaatgaatttgggggcggctaccttcaaaacgtcaaatttattggacacggcaagacgatatttgccaatggcattttcaacggcttcatggatcaattaaaaaacaactaattattttaaaatcagtagtttaagcagtatgtgtcaagagatttatttgtcccgttaattttcttggcgttgtgcttcgcaatggaacaatttcacagttggcgcaaacgcacggaaatattttgtgtaaatccaatcgttcaaaaataaagaaattaactttaaaaaccgggctcgtgaccaaggattatgattattcagatttatctttttgctgaaagttagacggttttctatcaattagtcgtgactgaaataatttaaaaaatattggctaaattcaatttaacataggttaaaatttctcaaaaaatgagttttgagatcactgatcacccaatttgacattggttcttaaatgatacaaaattgcagagatatcgacgacaattttctgcttgctgctcaaattcagcaaaaaatttgacgcaaattatgatcaaaatagagggatttgcacttaaacatatccctctaatcccatttgctggcacattttcataattagcaacgatttgttcccaccgctgaaccattttaagtcgttttaacaaatgtttatggatgcaattatgaaaataatgtaaaatataaaacaaaacaaaaaaatcacttttttgtagaaatcgtttactgtataaaaacaattggtatatttctaaacattttttccatttttacatatattttttataaattttctacccgtcccgaaaatgccttccttatttggcacaatgccatcccgtccatcaattgtccaagttatcatttgccattaatgagcgtcttcttggctaccctcatttgctaatgggggcgagtgaatggctttcttattgattgccctctgttccccgcggggtcattttgccactcatttcattttccgtgccgaggcttgcccatttttagtgctgtggagggcatcaaaaatatttatttattgtttttttaatattatttttacaattttaaagcccatggaattcggatttgaattagattttttagttcaaatttaacgggttttctttttcttttatgtaccaattatgtcttccttataaaattgggattttattttttagtaaaattggctttaaaaattaattatcctttttcaagcctttcaaaaccaaatttaatctgaaaaagcaacaaactttggaccccgcattaaataagattggcaaaaattcaattaaaaaattttggtcgaaaatttataagtttcaaatggaattttgagaaactttttcttttgaaaaataaaaatttaaccattttcgtccctaaaactcaaataaattattaaaaacattcaaaaattttttaaaaatatataaataattaaaatctttaaggatttttttcattttacttattttaagaaattcacaaaatcatttcttacaatctcaaatgtctgatcacacgcaagaagaagaaatgccaaaactgaagaaaaggtaaatgccgaattattagtgaggaataatttcttccatctctgaagatatgaaattttcttttgtaatacagtaagaatctgtcaaataccgtattactctcaatttgttttattaacagaatatcacttctcttaattgaaaatcatgactgaaaccaaaactttttaatgaattttaataagtttaaaaagtttaaaaaatgtatgtttgaaaaagtgacaaattttaagtttttaaatgcgcgaatcgcggaatttttaaatatttttgcttcacttttcgttccaaaaattcttccgccttttaccgtacctttttacagtacacatttgtttgtatttgccacctttttcaggtgctttctctgcaacgatgtgctgttcaatgtgttcactttggttagtaataagttcattcttggcacgcgattagctcttgtcaatggccaatttaatacgattgtggacaaattgttgttgcgtaaaagccgagaatggtcacttggcattttggaattgcgatgtgccgaacagcagcagggggaaggaaaagtgccacaaatttacaaggaattcgtttggaatttgatgaatcatatgccaccgtgtagagaatacgctcaaatcttgaaggaagtgccaattgcgacagtgccggtccatcaaagtgttaccggcttccaaggcctgacaattcggttggaaacacttgcatttttggctaaaatggatttgctaataaaacaatagaccacaaattggaaagtaccgggcccttggacattactgagcttggacaattggccgtgacggaccgaacgttgattaattataataataaaaatagggcaggaaattttttatgaattagaaattaggtataattagagttcacatcatacattaattaacacgggagggggttggtctggccgtttacaaacgaatgacagtgagggaggggtgggcggcagggatggcacggaatttcgatttccgacatttttggggtcggaattccgatttccgacttcagaaaaattttgtg

SEQ ID NO: 3321 - DNA, 1484 bp, Heterodera glycines
tgaagtcaatgggtcgcaaaatggtggtttgttcagcttcgtagatgtatgtcaacggcctgtcgttgatgattttttccacttcgatgagagtcgtcatcaattgttcgtagtcgaccaattttttgcccaacgttttgcgtaagggctccttgaccaaatgaaccattttttcgaagaatcctccggtccatggtgctctttcaatgttgaatctccatttgattcctttgtctgccactgatttttgtactgttggctgattgaagagctgcgcggcattcggtgtctgacaaatttgttgtgccgcttttgagccgagtttgaaagtcttagcgttgtcggagacaatcaatttggggaccttcctcctggcacagaatcgtgatagtgcgttaaggaaggcttctgctgtcaggtcattcaccagttcgatgtgaatgccacgagtgacggcgcaagtgaagatgcatccccatactttcatcttttttccattgctttttgtaagcattggaccgaagtagtcaaggccaatgttgagaaatggtcgacttgtgtgtccatcaacgcgaaattggggaagaggaggcattgtcacctgaccgaatggttttgttttgaacttatggcaggtgtgacaaaagtgtcggctccttccgttttgaaggacatgtctgatggtccgtcgggcctgagagacccaaaagttttgccttatttcggacaaaacattgttggcgccggcatggagtttgtcgtgaatatgccggatgaggagggccgttaattcagctttgcatggcaggaagattgggtccttggcggtttctgcgatgtcccctttttgaattcttcctttgcttctcaaaattcccctttcgtcctcgtacaattgtaaattttgtaccagttgaggatcggctgggtgccgttgttgagcatttttgattaaaatttgctctgcttttagcaattcttcagcagttgttggcggaattgcttccaatttttccttcaaattgccctttttgggctccgcttttctcggctgaaggaagcgaaggactaatgccatagtccttttaagtttgatgaaagacgagaagcgattttcatcgatgagtgccttttgcggtggatgctccatcgttggcagtgtcatttccattattggcagttcgtcgatgactgtgtgtcgttcgacttccggatcaaatattatttgatccattggccattcctcttctttgagagttagccaatttggcccaaattgccatagattgttgtccaacaattccgttgcttttgctcctcgagaggcaatgtctgctgtattggaagtgccggaaacgaatccgaccatgtaccttctgattttgttcagtcggttttccacgtatcggtcctgctttttgcccgatcttgcccattcaaggtcatccctggagtctgcccagataataatttttgtaacttca

SEQ ID NO: 3322 - DNA, 7391 bp, Heterodera glycines
  unsure (1)..(7391): unsure at all n locations
tttacctgaagcatcagcaaaaatgtgaattgctttttccctcggcgatggcactgttgccatccttggcattttgaagcagaccgtgggccaatcctgaattgtgttggcccattcagatgagagttgttcggacaactcgtcgtcccatccgtacttttcgtgccacaattttgaaagcagaattttgccaggcaggatgattggagacagcaggccgagtgggtcgaacacactggccaaatgtgacagaattgtccgttttgttacccgcgttgcttggaagtgcggcagatggaattccaattggtccttaaatggattccatttaatccccagaattttcattctgtgaggattggtcagccagtcttccgggaggtccatgatgcctctgtgatttgcgccaaattcccgcaaattcatgctggctttttgaaaaattttccgcatttcatggcagactttggcgatgtccttggagctgtcagtgcacagaagtatgttgtctacatacaagttttgcgcgatgtccttggccattggatgatccgtttggccgagggcttgagcgttactgataagtgcgcggggctgcttatcagtccaaatggcacgcgacggaagcggtaggtcctgacttgcccgtcagtgttgacccacaaaaagcgtagtgcatcacagtcctcttcttttattaggatttgcaaaaacgctttttcgatgtccgcgcaaatcaaaatttcggacatgcggcaccgcatgacgatgccgatcagatcgttcagcaactgtggtcctttgtcgaggcattggttgagtgagggagtgtccttggtgtgggcagacccatcgtagacgatccttaactttgtcgtttgatgatcatcctttattaccgcttggtgcggtaaatagtgcagtttgccagtccatgccttaggatccggcaccatttccacaatgcctttgctgagttgctcttggatgatctgatcgtaaagttggaacttttctttgtccagctttttcaaattgttgtccagtcttcctcgtgccaatccataattgggctgtagctcttcagccctgttgttccatggaagcgcgacttcgtagcgtttctcttccatgttgaagtggagctccttattgaaatggtccaaccattgctcattttcggttggatgggcagcatcggccataccagcagcttcgaggtcaaagaactgtttgaccattgaattcagtccgtcgtcgtcgttttgaagctgcacttccactgcctcttgagagatggcggttgaagtgacctttttcgccatctttggctttgaaaggtttcctttgccgaaaattaatctgcccacttttgagttgccaacccaaaagcctgatgggagtcgcttctctgttttgatgtcaaaatcggcaaagtagtcagtgccaattaggaccagtggctgcagtgactctgtttggcgttgcagttgcgttgcttcaaaatcagagtcgtacagatcggcgaattcgacgtgagccatctcacgcagcacccgagtcgttatctccggctcgattgttttctctcccatcgctgttttcatgcacaattttgtcatgtgcatggtgtaggtgcctaagtcgacacctgcaaacccggtcagggttatctctgctggatttttggcttccagtttgagaaatgaggccagtgccttttcgacgtaggagcgttcagatccgctgtcgaagaataccaaaacttttttggaaagttttgggttttccgggttgtatacatctctgatgccgttcgttttgtactgctgttgttttcctttgcggttgcgttgaactgctggattgatgcatgttgcaccgtgggaggaaattgcttcctcaccccaaattgttgtggacagaacactcggttgtgcccccatttgttgcagtaccagcaatttctgatttttgctgtacactcatttgatgagtggttgatgccaaggcatttgaggcacaattttagctcctttgccttttcctctctggatttggcatccctgaaacagctacagcctgacgtccaatggctttggctgcagagacggcaagaaggggttgcctttgctttgtcatcgcgttgtggcttcttgactcccttcttttgttgcccaaaagtcccattttttggagcaatttttgctttttgctccaccgttgtctgtattgttgtttggaactttttgaatggtgttttttcgaccattctgggttttttgccaatttcccttctttggtgagattggttgtagatctcttcaattgcttcttcggcgatgacgagatccttgaatgatgagaggaacttttccgtgtcccagtccactccagcttttgcctttgcttcttgcagttggcgcaaaactggttttgtgaccttttgttccaaggtcagccaaattgttggcgcatttatgtcttgcgcgttgtttttcagcattcgagtgatgcgttgcacgtcgatgagcaactttctgtcgtcctcgaatgactgactcgctttcagcgagatgagttgtcgatgcaactcgcgaatcatgtggctgttgtcgtcgtacttctcggccaatgctttgattgccaagtcgtagtcggcgtcggtcagttgcagcccataaacgatgtcttttgcttcgcccttaagcaaagacatcaagtcagccattttcagaaactttggctttgatggatccgtgtgtattgccaaattgtataccggccaccaagattgccattcgcatttgccaccagagaaaatctgtggtcttattttggcgatttccacttggtattggacgcgccctgttgtttgtgctccggctgcttgagcggccggcgctccccccgcgttttgttgctggagttgcgcagcttccaatgtcgcctttgccgacgccaagctgatttggcttgttttgaattgtcttgcgcgtgttccggagcttttcactttgtccgcaacttgaagaagcgcaacatggttgtcgtagtcgttgatggccgcgtcttggtctttttgtggtattttgctgatgatttgagtccattctgcgcttatgctttttatttcggcgaccactttgctgattttgtccaggtcatcatctatgagatgaatgcgcagggtgagttcgccgatattcatttgttgagttgcggcggggtggtcgtgcgacaacagctcctccagctgatcagtcgcagtttgaagtcgggtcttcaaaaggcgagccatttggagtgaaataggagtttgctgtcgaaactatccgattttgcgcaaaaaaatgccttttctggtgcaaaatttgagtcgccggtactcagttagtcggtattcaaatttgcttggcgctcagatggcggcgcttagttggctggcgctgaaatggcggtactgagttggcggcgctgaaatggcggcgctgagttggctggcgctgtcttggtcggcggtgaggtggcggcggtgagatgtttggcgcttggagaaagccttaccccctaccccactagcttttcagcttatttggactcaaattagcaaaattttaacgacctttcaccaatttggtacttttgtaccttttgtgtttaccagttttatctgagtcttttcagactattcagattttcctttttaccaaatttgttctgctggtcttttcagacctttacagttaccaatttgatattttgtgacacttttgtgttaacgctttcgcgctttttacacaattgacaattcactttcactctgaattttgacctttttgacttttgtctggtcctttcgaaccgttgacaattttaccgtttttttttcaaatttccaattttcgacttttgaatgaaaaaggcacaaattctacctggttcagctgcagattgccccccaaatgaatcaagcagtctgggcgggatccgcttggttcagtttgaagaaattagaaaatgccgttccaaatccaatttatttgcttcaccaaaaaatacagtgaatagatgattttttgggcggtgtggggtgattggtggctgattatgggcgggttggtaaactgactagtggactgacaaattaagggtgaacgccgtggctttaaatagtgagatttttgaggcgttcgccctttaatcgaaaacagattaaaaacagttgctaagtgctaattgttgccttttgatcggcaattacgtgggcggcaattaaatgggggagggggctgttacatgaaattggtgcgatcaaaatatttgggtgaaatttgggataacaaaaagtgcaaagcaattaatgatcattaatcccttcccgatcgttccccctttgatcacttatcccttgtgatcacttttcctccttgttgctttcaacaatgaaatgaaaggaaaggaagggagagagggtgagagaatggggaaaattttaagggtcatagagagagagcagagaatcagagggggaaagaaacaagagggtcggagaggagagagagagagaggaagagagagataaagagaaagaaagcaaaggaggggatggggataggggacggactattaaaatgatgggaaagtaaacataaagggtggagggggaatgggaaaaaggggtgggggagccctcctaaagaaagatgggaagagggaagggacatttatacactttccatccatcaaaaaatggggatgaaaatgaagacgagaagtaagccaacagtcatcacatcaccatttgctaaaagtgacaaaaaaaagtcggggataaagcggggatttatggacgaggggggcaaaagtgaaattagcgagggataggggggaggggggaagaaaacaaaagcaatgccaacttttaattgaaatgtttaagtcggcggatttgtgtgaggggatgggaagtgatagtagaaggtctgcacgcaattacgggttacggaaactacgccatttttgagccacataattacgcaattccgaaatcaaaagaagagagagagagagagagcagagagagagagagagagagttagatggagagagagaagagagagacaaagcttggaagagagttatacaaattattacctgcgaaatcattcagaatttaatttggcatatttaaatttaactgtttaaaattttttcaagttttaaagcatcaaaaagcaaaaaaacaaaatcgcgaattttcaaaaaaataacgcgggggaaggagcttaacaggtgtgacattcatcattcttccactcactgattcattctcgcaccccaaacgatggagatgaataataatgcatgaaaaaggaacgcaaaagtcaagacccgaaacttttttttttaatttttataattaaaagagcaataaaaatgaaaaattggaaaacattgtgtggcgttccgttgtggtgaatcattcatatgtacaaaattgtcgaacgaacggccggaatgggatggattggatgaatttgtgtcgcgccaatgccgtcgtcaatttctcaatttgatctcgctcgctgctgttccgtttcgttccgccgaatcggacgaacgacggaggacggaggacggaaaatcgggggaaggagcgagcagcggcaaatgggcagcagcaaaagtcacatgcgcatgcacaacaaattgtgcgcgcattttacgcacccattctccacccactcattccattcatatacattcatttctctttgatgattgaccgcccccccccaccccacccattagagggtcagtcagttccgtaccgccaattaagagtatcggccaagcgcgtagggtatgggtacggaacgggccaactcgtcccgccaactccgtcccagccaagtttagagcatcataacttttttctttgttggcaaaatacagcaaacttggtatgagtcaaaagctcttaataagctctattcggtactcaaaactcgtaataattcgcaaggatactgtaaggaagaagctggctgggcggttaaaacgcggaaagcgggggttgataagatccataaaagaaagggcggatgtgcctcggtagcttaatggtagagctgcccacggaaagggtgcatgagtgggttcgattcccacccgaggtttaacattttgcccatttcttattggtagcaccggatggttgccccaccgcgccagcagcaattaactaatggaccgagggaccggtcccgatgaggatggagctgtaaggaagaagctggctgggcggttaaaacgcggaaagcgggggttgataagatccataaaagaaagggcggatgtgcctcggtagcttaatggtagagctgcccacggaaagggtgcatgagtgggttcgattcccacccgaggtttaacattttgcccatttcttattatatttaaaaatgtgtaaataatgcgccaatttaattgaggtaaattactcaagagcatccatcagactttctcaggcaatgaatggacaacgaaaagataatcaaacggagaatgagcttgtatgtaatttactttgggtccccgtcattaaatcttaaatcgacacattttgtaccactccgatgggggggggcggttctcagttaattaaaagataaaaatccaaatgataaaaaagtgagaggggtgaaaaactatttaaaaaaagaaattttaaaattcagaaggaatccgtggcaagggtggaaaaaatggaagaatttgcaaacaaattcaatttcgacgaataattacaattatttatttgcggacagttaattaattttgcaaaacataaatgaaatttcatttcaatttataatgaatagttccgctgaataaagcttttttgaaaactataaaataaaaaatgcagcaaaaaaaaacttttaaagttaacattaataataaaaaatcttttcatttttttttgttataaatgctcatcaacacactttttgaattcctcggccgtttttggcaagagaaagttaaataaataaattttggagatgaatttttgagaatttaaagtcggaaatttctggcttttttggatcttcatataaagctttagtcttgaactgaaaattcagcagtttttaaatttaatttagactagaaatcaatcaaaaataactgaataaataaagtaatattattataataaattttatttttaatagcaattaaatcaaacaaattgcaaagggaaaataaatattacacacaaaaaatgcgaatattanaagatgtgtcatttcgaaccanacgcgcgaaatggaagccgttcagttgaaaaatgacaaaaccaagaatttatctttatttac

SEQ ID NO: 3323 - DNA, 1961 bp, Heterodera glycines
ttgtaggcaaatagagaaaactctaggctatcgaacgatactaagaatgcaacatttggttgctcttaagcaaaaccatgccttattttaccggaaaaatagataaaatggcggattttacgaaacaactcaacaggatttcaccctgctggatttagcattgaatttcaaccaaacataatgccaatcataaaattagtcatcggatatgcattttgaaaattgctttcttcattccttgtaaaatgcggtaattgttgtgcttctgttgagctgagtttgtatacagctgaatctgagccagagttggtgtttatgagcataacatattcagcattcagctaaatttattaaaaattaggaaattaaaattagttcgttcgcatttaaattcaggacagagtgaaactgtgccggcgccggatggtccgtccaactaggcgcgacaccagcgttctcggcgctgatgcgcctagttggaacttaattgtccaaattttaattattttagtgcacatttttgaaaaaattattttttagtcaaatggttttgaatgcaatagcgatcggtattagttctactcggtatgaaatatgaataaattacatttgcatcgaaaatactttcccgaattccaattataggtgcagcaatgccaaaatgtgacaataataatgaaataaaaatagaaaataaaggaaccatttcgaatatagataaaattatccaaaattaaaacacaaatgtttttggaactgattgtttttctttaaattgaatcattttatcaattccacactttcgcttatcattttcatcattattttcatgtattatttgatatgatgtaataaaacccgggggaatgcttttcttcttatcaggcagttttttaatttttgcatgtaaaaatttcaaaattaattactatttttaaaattaattttttgttttgcaccactgaaatatggttagagacttaaaaaaacatatacaataatcataaattaatttattctatttaattaacaaattagtcaaagcattaaattgccttattaaattatgccattagaaaaatttgttaaaactaaaaattattttatggcatttaatttttttattattttctttatctataaaattgaatccggcaaaattagacaaaattttgatgaaatattcggaaatggatgggaaaaaatgaaagaaaaagaaaaaaattaaaaacaaaacaaatgagcaaaatgaatcagcggttgatcaaattgttgtagaaatggggactgacccaaaatgatcagtaaaaaaaataataatttaaaattttggtctaattaatgtataattgagagaaaaaagtaaattccaatggaatggcaacaaaattgcaaaattattaggcgcaaatcgagaaaaaaaatatacacaaatggaaaaaagaattaaatttaaatagtgaactactttattcatctatttgatgatttaaaagtttatatggccaacgtaaacagaaataatttgtgaagaaattgggcatatttcaatcatttaagaaattaacaaacagattgttattttaacaattattccaattaaacaatgcctgcttaacaataattcttacaacctaatcacaaagataaaaggtttgctcgtttgccgttggataatgcttacaccaataggagaaagctttttttggcgtccggcattggtggtgccggataaaccaataggaatttaagtctgtaaaatttttaaaacgtttctcatttttgcttgaaaaaatttgaaattttcattttgaggggggggggggggggaaattcagtacgattaaaattataagactcatgatgatgaactttttagagtgcaaaaatctagcaatttctctgtccttagagacgtatttctttttcataattttataataatcatttgctcactttga

SEQ ID NO: 3324 - DNA, 1215 bp, Heterodera glycines
  unsure (1)..(1215): unsure at all n locations
tccaaaaagacccacccgatgaccatcgatgccaaaaaggcgcttttcggcgccacaacggcaacaagctgattgtgagaataacaatcatttaaatgcgcaattctttgctgttgtttttgctgtctctgaatggcattggcaatttgctgggcttgatcaaaaattgtgccggatttgtgagtgatggaagaagctgaggaagaggacgaagaagacaacaattcattgacacggaacgattggtgcacatggaaagaatcgcgggaaaacagcataattttggtggcgaatgggcaactaaaataaaatcttttaaaatttctaaaataaaatttaaaactttaaatttaaataatcattgaaatatgtatttggcacaattccaatataacacataatatgaaaaattggcacaggaaaattggagaaaatttgcactgaaaattcggcaccaaccaactttttttggggcaccataacacctttcctacttgaccaattttcaaaaccttagaatcatttgaagcatttcaacaattagaagctgatattaatttgtaagccaattgctaagctattatacaactcgccaaaaaaaagttcggacaaaaaaacgaacaaaattggcccgattttcgagtttttgtgaattgttcaactgcttagctattgcttaaaatgtaataaattgtttgaattggtctatttccaatcttacggtatccactctcaaaacgagggaacaagcatactgtaattgggcaaaatatacggtactgccgatacatttacagtaatttcaacaaaaaaagaatgtacaatattttacaacaaaaacaataaaagttaacaattttataaaactatcctttcaacaatgcgaaacacgtcaaaatggtgatttatgtggggcgattcttgcagccgccacttggaacagagggcgccaaatttggcattcaaagtgccgaagaacacacgctttgcccgcacatggaccaacgccatggcacctgtgtccggaaaaatttttgaatagtttttttaatttctttgagaaaaaaacaaaggattttttgatttctaattttttcatttttgaaagaaatcanatttgttacgaataatgttagcaatgtcatgttttatttncaatagcgagattctctccnaaatattnttagtggattgctattgtattttcgttttttt

SEQ ID NO: 3325 - DNA, 4229 bp, Heterodera glycines
tgtccgttcgacaatgacaaagagttgtttgatgcgtgcactttcatccgcggtgagcaaagtgccgtcgatcatcgcctccaatttggcatttttatggaatgacatgggccaaattttcctgacaaattgaaattaagaaaataaaataataaaaaaaaatgaaagaaattccccataaactaaataaataaatttaaatatcgcaggggcaaaaaaaaatttaaaaaattgagaaaaatttcaaaaaaataaaaaagtcactaaaatcggcgcggcgagaacggaacaagcccactgggtttcggccaatttgctcagtttttggggtatatttccttttcatagttgtccaaatttaatgaatttactatcattcaatggccttatgtgctttccattagcctgcaaaagttcaaaaaatttcgttaaactaaaaaaaatttatgattcagaaaaccgattttttgaagttttttgtgcataacttttttaaaactaaagaaattttaaaaatgttttgcaagctagtagagagcacttggggctatcgaatggtatcaaattcattcaattcaaacaactctgaacagagttataccccaaaaactgacccggggccttggatttcaaaaaaaaaaatttttttttaattggaaataggggggggggactttgtccacctgtacatctccaactggtgccgactctgaggctttcggcatggaatgtgccgtccgatgaatgttggctccccgccaatcagttggccaatcgccgtccgttcggcggtgccaattgtgccgtcgtcgccattttggctaacactgaccaacaattcggtgccattgacgcgcttcaaatgctcaaattgggccggcaatgggggcaaaatgcgcaacagtgtagagaagaagctaaagcaattgaaaatttaaaaatttttggttaaaatcggtggcttagtcggtaaaatttctgtttttgggcgtcagggttcaattccaccttactgcatgcaatttttcttttgcatattaattttttttgaacatttaatatttgataaacatgcaaaaagaaataattacagaaacaaaacttttcagaaaatttcaaaaaaatcatgaaaaatttggcacaaaaatttcaacaaaaattgactcaattaaccgtccattaaagcatttttatgcaaaaaattgcactgttcgagaaactaaactcaacttttgtttgtaacgttaagcacaaccgcttcagtgagttcaatgtgttctgtgtgaagtgaagaaggaagaattggccgaatttcaaagctaaaaattaaataaaaatttttttgttaattatattttttattactttcgtaatcgttgaatttttgtgcttttttgattttcgtcaagcaaattttcatctttggtgcttaacatctaaaaaaattgaaaaaggaaataatttctaagtttttaaaaaattctgatgtgtaaaacaatttaaaagaacaaattttttgtgcctccggccatttcaaacaaaatgccaaaaggcaaacatttaaatccttttgaaattgtaaccgcaaaatttttgaaaatttgtgaaaattcatgcctaacaataagaggtattcatggtaaaatgtaagtcattagaaattagtaaaaaaatttttcaagaaatcgaagtagggtattaaaaatcgcattatctttataaataatccgatccccagtttttcatttccgtacaaacttgttgaattaatcatcatcattatacataccaccaaccattatcatcatcatcatcagcaaatcagcatcattcaccaaccgagccataattatacatatttagtatgccttaattatgcatttttatcatcatcaatcagcaaacaaacgagttggttggttgctgtgttgattttgtggtggtggtggtgctgttccaacttccattcattccccctcccctcccattccttcagtttttgatcgctttgcacagtcaccggtgcggtgggccccaggaccaattgggccccatctttactctcttctgctgcttacctctaatatatgctccttggtatcattaaagcatttgtccctgtcaattaaagaccggaggaccccaaatggcttgatcacttcgaaaatgaaaaactcaaatttttgctcgatcgatttttttaaagcccgaaaaatattaaagaatgccgatggacgggccggtctcttgtctgtgcataaaaacatggaaaatttaaaaatgagggctaggcactaaactatctgaatactaaaaaattccgaagaaatccaaaaaccgccaaattcttgaaaattgtctagaccgaacccgaagccctgctgctctaacggactatcagcaagtgataccagagagaggaaaccaaacaaaacacaaaacattcaatatgatttcctggaaaatattgtaaaaaattagagttgagcgggaccgggacctgaacacggacaactgagtaccgaagtcccggttttgaccgggaccgggactagtcccggttttttcccggttttcccagccaaaaattcccggtttttcaacccgaaaaggtcccggtcccgggtttgcccaaaattcccggtcccgctcaactctataaaaaatggtagactggaagggaattagaaccctcatcaacctctgtgttgcggcgatcggcttcccaacaattaaatagggtggggggggggtcaaatgccccgggggtacaaaatgctttttgcctttgccatcatcgcttttgatgctcttttttcatttcatttaaaactatgcgtcacacattgaatcgtcgtcattccaattcttccactccccccttccccgccgcgatcatttccaattcttcttgcccattattattcatcatcacatcgcacatccgtccccatccgtcaatttttcaccctttctctccccacccgttttttttctcgacaattctttttaattcattttgatttttctgtttgtttgtattgtgttattgttattgtgttgttgctttccgttctgctgttcttagacaatcacttacaaacacagcgtccaagtggcaaactttttaaaaaaaattttagggtagaaaactaaaggtcagccggtgacgaatagccaatgatataagaaaatggatcaattccgaacctttccggttttaaaactcgaatcggggactttaatagagcctggaatttcaaatttgcggatcccgctgcgcgattgaaactcaaaattttttgcgggacgtgatcccgcaggcataaatcccgcaaatcctgcatttaaaattggcgggatccaacgtgatttgtgctattcctgtttagtggccctgatttgcccaaaaaaggcactcattaaaatgtttttttctttgattataatttttatgtttgagaaattttttgaaatttttcaaatttgcagagagaacgcctagacctatcggatgagcgaaaaataaaaaaaatttgatcgtcccttctaatcagttttcttaaagcattaaattgtgtgcgtcacacttaattgtccccccccccccccctacaccaatggcaccgcctctcttttagcttcgttaattgttttttttttcaatttttccaccaccatcaattaaagcactccaagcacctgtctatataccacacacattacgttttcttaatgccatttactcttggcgttaaaagcattttttacacataattagtcgccttggccccgcttttttctacccccccccctcttatctctgtcgacgattttactcagggttgtcgccttgttgctgatcaagaatgtggctgatccattgactgttgttcaacggaacaattccagcagaagcagcaccagcagcagtagttgggtttggcaaattgtgctgaaaaaacaatgaaaatattaatattgtaagctaaaatttttataatcaaaattgtttatttaatttttaaattaatctctttaggaaaagttcattttagtatcaaattcatatgttaatttttctcatttgatcctcaatgtttttttgaatgattaattatcttctcttattcataaaattttatgtcaataaattcatcactttttttattgacagcaaatttcttcattttggggataattttattttttatgcaaaataatttgaa

SEQ ID NO: 3326 - DNA, 2879 bp, Heterodera glycines
caaaaagtgaaaagtttgtattgttgataaaaaattataaatttaatgaacggataataattatttgtattttttgatatttagaattcaatatacaagtcaaaaattatatctttaataaaggagataataattgtttctatttaaacaataaaaattttcaatagtaagaatgaaaataaataattactgtgacctttttaaattgctataaaatatatttgcaaaataaatatatcattatataaaatttatattcataaaaatgaagaatcggaaatgaatgaaataaacttcttataccattaaaaaaaggactttttatattatgacaaatttttgtcaatgattcatatcttagcattctaaagtctttactggctttatctcttctactgcacccgatgcttcaaatgtgtgtgatataaccaaacgtcatacagtgtatacatccccccccccccatcaaatcatcatcatcacaattcaccccgccacttgattggaaagataaggaaggaaggaaacgtcgtcacaccgatttagggaggggggggactgtttctgacaaaaaaaagaaattatttgggttcattggaattttagtatatcacaaatttaaaaaaaatgatattccaatttcataaatatttagaaataatttaaaaaaggtccctttcaaaaatgaaaaatgaactatttttggcacatattcttttctagagaccggaatttgaaattcaggaaattttggagccttggctcccacaatcaaaaattcgtatcattcgaaaagtttttcaaattttagtacacattgccaagaaaaatagtacgccaatttttctctagcactctctcctgattagaacagtctctcttatataccgtatattctctaattatcgcccagtctctattaatcccgcagtctccaattacccccccccctttctgaggaggttgaaaaataatcccccagtctccatttctaaaattttttaaaattttaacaaaaattatttaattctaaattgaaacttgtttaaatgtttattaaacatgaaaaaatacagaaaaatcactcagtgattctattttatcgatgtatttgaatggtcattgcagggcccggatttttaggcgctaaaaaccccgaaataggtacctaaatagttgctaaaaagtcactcgaaatcgaaaattgatcgaagaaaatgtgttttttgcgtttatctcaccatatgctatccgcaaaaaaaaaaaggtgaaaacctaaaaatccgggccctggtcatatgcttacaattagcattacaaatttatttaaatcgtttatgataatcttgatcctccaaataaaccaaaaccgggaaaagctaggaatttgtaccggtcttgcgcaaaaaatgacaagatttttgccattttggggtcaaattaaaaaaaatggttcaatggggtccggcggtgtcgataggcgacggaacagctgtggcttcctccataaattgctttacaaacgcagcaaaaagattccattgctaaatatatggaatttttcatgtaaaattaagaaattctgtaacaaaaaatgcaataaaaaattattttttgacgagatgacatttttggcgacatgttcaaaaaaattcaaaaaattttcactaaataaatcagtcgaaaaacgaatttttttttatgtaatttgctttatctaataatttttcaataattgattttggctaattttttgggcttatttcaaaaaattcaatatattaacagagcgcacattttttcatgccaaaaagtccgcgcgcttttattacataaaaaggcaattcaaaatttaatttacaaattaattttaaaagcgtttgtgtccccaaaaaaggaaagtgccgctaattgctctccctaattggctccatttaaattaattaaatttctccttttcctctttttcacagatgttcgccgatagaatgtgttgaacatccccaaacacatatttagcattttccattttcttaatttcttttctcagtggcttctttctcaactgctcaattcttgaggtaaaagcattgatttttttaaaaacggtaaattttaattaaatttaagttttcgtttaggaatttttgcattttctaaccctttaatttttatttttagacatttttcgttgaatttctcagtatactcttattttcggactgtttcccctaattttcaattgccaaaacccaaaaaagggtcataaaccgaaaatttaggccccaaaacggaaaagtgccaaaaaaatttggcaaattttgccgcaaaatataaaatttcattgctttttagggccattattaatttcgctatttttttgcagcattttattatgacactgagccccaacttgaaatatgccacacacatcatctttttcatctcgtggattttgtttgtcgaaatcctttacggcgtaatcccgtttcttgacaatgcaaaaagtgccgtggcattttccatcgacgaatcattcagcccaattgaaaggtgattggaaaaacaaatttattagctccaattgaaattttggcttattgcagttttcacgggactagctggtttcggagcgagcccaagtttttggttacaagttttttcttggccaaccaaatccaacaatcttggtatcattcgatagccctaagtgtcctctattagtatgcaaaattgcgaaaaatttcgttaaggttcaaaaaagttacggccagaagaataaaaaaaccagattttccaacttttttggccataacttttttgaaccttaacaaaacatatcgaaattttgcatgctaatagaggacacttatggcttt

SEQ ID NO: 3327 - DNA, 2567 bp, Heterodera glycines
agttggatttggtcggcaaagaaaaaacttatagccaacaacttgggctcgcgccggaaaaccaacagacttcgttttcacgaccataaaaaaagacatgaatcataaaataatttaatgaacatatctttttgtagaagcatatgaattaaacatttttggacatcattcgatagccccgagagtcctctatttgtatgcaaaatttcaaaaatggtttcaaaaaaatatttgccaaaaaactaaaaattaacttttcatgcatttgtggccataactttttttaatataatgaaattcgttgaatttttgcatgccaacagaggacatttggggttatcgaataacaccaagactatgcttttacaaaaagttatggtgcattaaaattgtcaaattattttatggcccagtaaactgcaatagagccggaaatttatgcctcagccatttaggaaattgtaaaacttacaaaacgataaaccgatgcaaaaaaaattttttttaacataaactctttcgctgctggaagaatttttttttcaaattttagcaaaattcgttttgccgatttagtcccaaaaatgactcattttggtgagggttttcgggtccaaccaattaggcattttggcaatttttaggaaaaataaaactgaaaattttcaggtatggcgttgtgaacacatttctactttacgtactccgtttcctgtctttgctagtacgttttgcgcaacattttttgctgtttggcattttgcggttttggctttttaccctaactggacaaatttttcattttttttttcaaatttttctggggttggatgccttatttagcccagaaaaaaatttacaggaataatttctgttcattatgagcgggtggctcccaaatgtttttggctatttttaaaatttttccggtacgccctgacgccttttatctcaggtttttttagaaatttttaaaattatcattaggcctatgaattgttttttcaaaattttcacgggctgctttcctctccccccgggtcccaaacccgtaaaatttgtgccatttttctctctttttaaattattttttcaatttttgccccccttttttgcccaggtgcttccccagtgcatttgcaactcgttgggtctgattttgttcaacagtttcaaggaccgcatcaagctgaagaccacgccgttgttggcgccgttcatttgcttccgcgtggtcaccaagggcgactacccggacctggtcaaggtcttcgcattatccagcaaaattttacaaaaatttgtcgggaaaataggcacatcttaaatttggggaaaaatcgttgaaaaacaaaatggaattttacaaataaatttaaaatgagtcggtgggctggacaaatgtgcgccgccatgggccaaattttttttttttttttggctataatttcttttaatttgtccgaattgaaccatttttggtattatttgatcgcccatatattctcctaaacggctttttattgtcaaaatcgaaaagttttttttttgaaaaaaaattttcattcgaaaaatgtttattgttagcaaaattagaaaaagcaaaaatgcattctattttttgagccaattattcaaacaacagaatgagtgcttaagctatcaggaaaatttttcaaaaatatattttttactgaaacattctaattgtaagtttgaaaacttaaacagaaaaatgaagttcatccccctccaccctctccaacaacggttttcaatttttcaacccctctctcgcaaaaaaaaaaatttaaaaattttctaattcagcccctcccctcatccatcacacacacaaaaaagattttgtgtttttttttgcaggtaaacctggagaagaacttgcaaatgtgctacgaggcgggcctggagagcttcatcttcgaggtggtcacggacaaggccatccatttgccccactgcagcaaccgcgtgcgcgaaattgtcgtcccccacgcgtacaagtgggttttgttgttggttgtttgggttggtggacttcctcacaatcaatcccccccccccccccccctccgagaattttttttttaatttctaaaaattacctagaaattttttaagaaaaaaccttaggaaattttttataagaaaatttcaagaaaaattttttttttttttttcgacgattttttcaaacttttatgatgagttactaagttttccttaaaaactttcctaagattcgctgaaaacaattaaaaaaaaatgttttcttaacaaatttctaggttagagaaatttattaaaaattattaatttaacttaaaaattttttgatttggaagaaaaatgggttggttttgaaaaacgaccaaaaaaaaagactaaaaaagcgtgtatttcgcccataatataaaatttggaacacaattttaaatggtcgctgaaaaattttcaaaaaaatatatttttttttcttgaatcccctaataaaattttcgagaggaacataggcagtggcatttatttttttttttttgttatta

SEQ ID NO: 3328 - DNA, 3076 bp, Heterodera glycines
  unsure (1)..(3076): unsure at all n locations
tttctaaaaaagtgaaaaaattttcaaaagagggcttctttaaactagcgccaacttttgtgtttattaaagcattttttatatttcttcagctacattgaccattccgtcattgaatttctccgttcaaacaagcacatttgggacagaagtggcaccaaattggagttgactgtgtattcatacaaaactaatgatgtccagcagatttgggatgctttgaccagtgaaatttggccaatttttgcaacaaacattcgcaatttgggctttaccagtgccaatggtttggacaattttcgtcgccacacttcaccgacaattctcaccgatctcaatcatctgaattcaatcaattccaattttctgttgcctgatgcaattgctgatgatggaccggatgcaactgctggccaagtgttgtccaaatggctgcacattccaacaactgatggtcaaccaaagcgattgtattgccatggttattatgatgaatcaaatttggaatggatcaacaatttgaaggaggtggccggtcatattttgactgatttgattgccttcgatttgcgttttctttttgtttaggcatttccccgtgccacttcttccgccagtttcattattcgaattgatcgtgagagagcaatgtcaaatgctgagccatttgaattggagaacgaacgaaccaaggaaaagctgacattggagaaagagccacgttctgctggttattggctgttgaagcgatgcccaattagtgaaaaggcggcggcgattcaatttgaaaattgggatgccaatttgaacaaaatcaaatttcatttgtggggtgacatcaacaaattcattgggtgagcagcgacagcaatttttgattttgtcgaaaaaatatattaattttaggccattatcgccaccaacggaagaaaaagcggacgaatgaaagcacgggaaattaattatatttgttaaatggtcgacgatctcatcaattggaatttgatttgatgcgctcattttctttttgttttgctaatgtcacttattttgaatacaacaatttctgaaaaatntagttaattcttnaacaaaattacaaccccaaaatattttcataacatattcaatctaaattttcataattaagaatggtccaaatcccttttttcatttaggcgcttttgagcaaccaaatttttgggtgtaataattagagctcggataaaaaggcaccaaaaatcgcgaaaaaggcacgaaaatcgcgaaaaaggcatgaaaaaaggcatttaaaaaaatttttctaaggttttttagggagcaaaacacgtaaaacttaaccaaaaacttaattttggtcatttaaatggttattaaatattttataatgtttttcgaataaggaaaatttttaaaccgagaattttttatcaagaaaaaaaatgaattttggcgatcaatttttgagaaaatttttcaattcttaggggtgtattttctgaaattttttcaattcttagggatgttttttctgaaaatttttcaagtcatttcttaaaggtgtattttcccgatttattctatttttgatggaattttcggaaaaaacgccaaaggcactaaaatcggaaaaaaacgtcaaaaaggcaccaaaacggcaaaatgccaaaaaacctcaaaccaagtggaaaatgcgctttttatgcttaatatatcgaaactagtgcgcagaaaaaaaaggcaaatgcctcaaaatccgagctctagtaataatataaaattcgatagaaagaaaaaaatttccatttacacatatttcttcaatttgattttatttatttgtgtcaattataaatcaaagctggtggatgggatgaagaaagaatgcatgaacggatgggatgacagatcaaaattagaaaaattgaatgaaaaaacgcacaaaaattggaataataattaaaaaaacattcgcacaaaaatgggatgaatgaaaagcggaagaaaaagagagagtcactatcatcagagtcatcgtcatcatcaacagtttggtcctcctcacatacataatacagtatattctccacaccgtatcccatcagcaatcgtaccgtgtgctgtacatattgagggaaattttttaaaataaaattataacaattttcaagttttatccggtgtcaccagttgtacctctaatttccaatggattttaatggaaatttgaatcacataaatccgcaaattggcatttttgtggcataaagtctaactaagatcaccgttgaaaatatcggtgcaaaaaaattttgacaattagacggttcatgaaataaatacccatcacatatcgttttaagttccttaaaccaaatttcgtttcttttttcaatttaccgctttgccgatggctccggtccgatgatggcacagcctccgctgcccgagctgccgtttgctggaagagaacaaaaaaaaattagtgatgagtgaattttttttacctaattgttttttggagcatatggagggacatagaaattaaaaattatacgtagacaactgagcataggtggacaggggggggggtaatttggtaaattgtacggggattcgaggcaatttcctaaaatattcggcgaaaatcgaatagcacagctaaagacggaaatttttttttatgaaattgggaaaaaaaatttaatttttgttccgaaaaaacacattatttttaagatgcatttcattttgtccaatactgtgatcactgatcagtcacttcttcaggctgatcgtgagtgatcaaaactgtagcaccaccctatgtgatttttggctgtgctaacaattgttcatcatggtaaaaaatgcacccaaataatatgattaatcatatacataatatatatacagactatcctattaccatttacagtagtttagcactaaaaatgttaatgtgattgaatgttgtctttttcaaataaaaaatgttcataggatgtcgtttgtgtatgattaatcatgttaattgaatgatttttaccatgtggacaattggtagcgcaaccaa

SEQ ID NO: 3329 - DNA, 1343 bp, Heterodera glycines
tgttcataggatgtcgtttgtgtatgattaatcatcgctccttgggttcatttttaccatgttggacaattggtagcgcaaccaaagtcccttggatgggaaacagcttcctctccacccctcggggtgttaaaattttgatcactcccccgatcaacctgaaggagttaactctgattcatggcgttgcaattgttttgtttataatcagcatcgaaataccaatagattttgccgaaaaaatgataaattaaaaaataactcattcattctggtttctttgtacaaaattgttacaaaatcgtttttttttaatttcgcaagttgatctatccttttttggggttcgccgaagattttgtgaaattatctcgcagaaacccgtgtgcgaaatggcatacccattggccacttttagaaatgagttagacacaacagcaacaacacaaaaaatggtgccaatggaccaccacaacaaatttgccaatgtaagtgcacaacaaaatgccaaaaaattgtgtgtgaaaaaaagacattttaaatatattttatttattttacgcgtgcgctggtcagtcatatatcagtcaaaaatgtggtgaaagttgccaattaaaatagattaatatatagagcactaatgaggtaattaatggacagactaagaaataattaattaagaaattaagcaacaccgccaaatttgtgccacagggtggtgaacagggcgtggaaaaagcaaaacaaaatgaaaaacgcgtagaaaatggacaacaaaaatgtgttgagaacaccaccgggaacagcagcaattgggtgttcaccaccaccaccgtcaacaatcggaaattgctgatgatgcggaggaggaggagaagccgacgatttggagcagggcggaggagggacaccaccaatgccaatgccaacaaaacaacactcacagaggcgcgactgctcctgggacatggcggcgaccacctcggtgacgagtcgcgggtgctccttgaccatctcggcccagccgtcggtctaaaaattttaaagaaatccatgggaaattggaaaggtgctaggtcgttatttaaaaaaccatcattatgattttatgagccccggggtcgtttgggccccaacccaaaaatagaaaaaggtacttttttaaaaattaagattctaaaaactaagcctgagggatccctcgccacttgtacactttctgtcgtcttctccgctagatgggaaggaagaattaagtgctcgacagaactcaattgacattcggatcagtgaaaacggaaacggcgacgggcgaacaattaaaaaatgcttaatcattttat

SEQ ID NO: 3330 - DNA, 2552 bp, Heterodera glycines
aagctaagttataaataatttttcataaaatcataatgattgttttttaaataacggctccgccccattggaaagaaaaaaaattttttttttttttgaggtggaggggggggggagagaaagagagagttgaggttgaaggagacgccccatcccatgaaaaatttcaataaaaatcattaagaaatttcaatttaatttgctggggagatgtaaagggggagaagtatttagcgggaatcagaaccgtagccaaacaaaaaaatttttcggagggaggaatcgaagatttttttggcctaaaaatcttttcaccaatgctatatttaaattggcagcgagccgtttttcgccaaaaattactaattttggccattttgggggtttaaattttccaaaaacaaaaaagataaataggggtccagcggcgcaggaagttttttttgggaatttaatgcaatatgaaaagaaatcattaaaattttcaagaatttcctgttttgtgatttttttttaaattaggggccctcaccatgatgacattgttggagtattgcgcgatgaagcgcagcgcgtccgccttcaagtcgagcgcgttgtgcatgtcggccaacacaaggttacggcacacattgtcagtggacagtccggcacggagcacctggggaaatgggtaaaaggagcatatgccaaaaaatagtcaatcaaccaaaatataaatatttttttttgttgtttaaaaccccctttgatagtgttattctcaaatctttgtaagaaattgataaactgtaaaagggactttgaaaaagttatttaatttcttgaaaacccattgtgcgtatgaacctcattagcttaaaaatttaaataaaaaaaaaatttccccaaattttcatagaaaaaattaaaaaactaaaattttctgtagtttttgacgacaaaatttgaaaaaaatggtttggcgttaaataatgtccattgccaacctgatcagccatctccttgagtccgatcagttgaaaacggtcggcaaccgccagcaaatcgagcgccatttgctgcagcaacggcgaacgaccgctgtacatatagaagagcatttcgcgcataacctaaaagcgtgagggaaaatttaaaaaaaggattcaatttacaagtaaatttcaagaagaaaaaaattttcatcagaatttccgggcgatttttggaatgattttttgaaaaaacgcagtaattaacagtaaaattttgaaaatcgctaggaaaatctttcttaatttttttaaaatattttcggggaggggcgaataaaaggcaaaaataaaataaaatgaacggcccgaaatacgggatgcacttcatttccctccgtcgtttctcctccgtctaaaatttttaaatttcttttcaagaaaaaaaattattgaaagattttcagcgattaaaattttttgaaaaacttagtagttcatcaaaaaatcgcccgcaaaatttttcatttttttcttgaaatcttcttgctaagaaatttcctaagaattttttctggaaaatttctgttagttttttagggggggggggcgatgtggaggggaaacgacccgctccgcgaaattcgggctcaaagactgctgctccgccggaattcggccccaccctatggccaatggtccaagcccactaaaaaatcttttttttttccttgaaaatttttttgcggtgacgttttgggatttacccacaagtccaccacccggcaccacccacctcaaagtcgatgtcttcatagaacacctccgacttctgtgcctcctccgtgtgcggttccaacatggcactgaacacgggagaacgtgccgccagcaccaccttgtgcgcactcagctcatgcatctccttgccttcgccacgacagacgatcttgaagtctgtatgcctggaaaatggggaaattttttttttttgaaaaatcatttccgatggttaattatgagtaattagtaaattaatcatcattacctgttctggccaaacatcacttccaagtccttggccagctgaacaatgaaaaagtaattaataaagacaaaaaaaaacccatggttcgctagactctcgcccacatggctttttttaaatttaaatttttgttttcagcgtctaaaaataccctggaaaaatgaaaaaaaatttttttttgagcgtgggtcacaaaagggataaataatgattttttcttccaattcccaaaaattgtggtgttttttcaagttctccctcccgtccttttacttcgcatggccgtggctcgggcatggcctggttgatggtgttctgactgttcttggtgatggtgtccgacacgatggtcaggttgagcagcagttggatttcgtcctgtggcatgatgtggttgatcagcaaatcccggcggatgtactcgaaatagccgttcaactggaaaatttgaaaaaatatatatacatacatataaatttgggaggatttccaaaatgcagaaaatagtggtcgagcaatcgaggtttaag

SEQ ID NO: 3331 - DNA, 3883 bp, Heterodera glycines
  unsure (1)..(3883): unsure at all n locations
tcgtttcttagccgtaggtacnnggtttaattttgcaaaaaaaaaaaaaaattttttnttgctcatttggctacatgtatccaaaaccatgtcccacctgctgtgtgcccgtgtacaccgtggccggcacttcctcactgcgcgtgttgtacaccgaaaactttgccttgaacttgacattggtgcaggagaacaccttggatagaaatggtggtgaaaatgtaaaaaaatgaggaacaaagaaaaaacaaataaaattggcccggaaattaaaaaaaaattaggaccctgcaaaatcaaaagttcttaaaattttatttaaacaaaaaaatttcaactttaagcagaaaagagcgtacatgtacaattaggtattatttcatttagaataacaaattcttaaatttgaacgcggttttcctacgagtaaatttttcaaaaaaaaaaaaaaaaatttttttcaatgggtggagagggagacctgagaaaacgaagtgtgtggaggattaaatatatccccttggctcactcactggatatgtacgaggagcccctccaggcgcacttcatttactcctggcatcgcttcccgcggtattttttttaaataccaaaaactaatttttcaaaaaaaaatttgtttttttttgaaaatttttgtttggaaatgaacctgaaagaagcagaagtccttgttcgactccttgttgccctggggatggagacgtattttgaactgcaaatagttcgcgttgtccgccgcagcggcagccgctgccgcggcaccgccgcccatcagtccgccgccggcactgccgccaaccaacgaattggactgggacgagcaaccgcttgacgtgtgctgtaaaagaaaatggagaagtaacatgcgatattgtacactggaaaatgggagataaggcccaaaaaaaattgagaaatcggccgtgccgatccccgaaaatgtcggagatcggaatttcggcgccactcagaaatagagggtgaaagtctagacggaagcggggcccgtaacgagatttttcccctgaatccgggttccgaaattggaattttacaccgtaaatcccgtcccggttccgttctgaacactaatactggtccgggccaccgaagatacacccgaaaaattagagaagaaaatttgatggttgagaatggttgagagaactggaggacgagccgctgccgattaaattccgaggtttccgatattttaattggcgaaaaagaaaacatagattttttgaatgatttgtgaagtcgagatgtacgaaggatgaagagtgatggcaaaccgagtctttgatgcggacggacgtttccaagtagcgcacttcgcattgaccgaagcccttgatggtccctaaaaaatttggatttattttcgaaatacctagatattttccttttttgttggtaaaacttacacacgtgagtgtgttggagacttcgaacttccgtggaggacctgaaaatgttatgcaattagtccatggaaaccgaaaaaaaaatttagacagtttcgcaatgaaagcatcggaaaattttttttatgggattttcgtgaaattttccgcaaattcgggccaatttcacgttccataaagatcccgaatacctagataaattttcaataaccatgtgcagcttaggattgggagtgaattggacatgttaaaatttcagttttcatacaaattctgggggacccaggggagtcaatgtgaaattttgcaattttcaactcccaaaaaattaaatttccgatgaatttatattagttcgtctaccaaccagctgtccgatgggcgcatcggagttccgcacagatcagccatgtcagtgtcctcgggtggctgttgatttaaagcaaaaaaataataatttgggtttctgaaggttgtataaatgttagagttggacatggggccatggatttttctaaaatttgtccacaaaacccaggttcatgaccagttttttttccacaaaatgccgaactctaacattgtttctatgctatttaataaacaatttcttttttgtttgttgatttacaatagaatttggtggaagtctggggaaaaacattaaaattcgatgaaaacaaaaaaaaatcaattctgtaagttaaagggattgtaaattgatgaaggggaaatggaaggaatttggggcaaaatgtctcaattttaaatttgcaaaaaaacactaacacaaatctttggatttttggcaccaattcaaaaaataaacacttgtatacaaattatgttcgttttttaggcataaaaaatcgcgaaataggcactaatttgtaagttaataccacagaattgtgttccctacggaaaataaatttaaaattttgttttgatttttcctgtggtatgtaaaaaagtgtacggattacgaatctgagcaagaaatgagatttgttttgcaatgctaattttagtgcatattttaaatttctcgagttattagggcatcttttgaccattttaatgcttacaacgcgtaaccattctgatcatgaatctggctggcatctctattccggccaattatcaaatcaccgactaagaaaaccaataaaatggttttgagcaattttgagttttggggcctccgataaaaatttatccaaattccaattgaccaactcaaaaatgatcgaccatttctcaagtatattgaacaaaaattctaataaaacaagcaaatgttgaagaagcaacaaaagcatttttgagagaaaataagcatcaaatccatttgtaatttgtgagatcgtcgaccatttctcaaatataattaattcacttccgcgcactcagacgagattttggttgctttgacccgctttttcttctgttgacggtggagacaatggcctaaaattaagtgtttacatttttaacaaaatcaaattccgttggttgttgctgctcacccaatggaacgactgccacgcatcagctcaatttgcacatagttcaatttgtcgtccaatttttcgtcgttttcccattgaatcgccgccttttcatcaattgggtatcgcttcaacaacaaattaacaacattataacgtggctctttctccaatgtcagcttttccttggttcgttcgttcaccaattcaaatggctcagcatttgacattgctctcacacgatcaattcgaataatgaaactggcggaagaagtggcacggagaaatgcctaagcaaaaagaaaacgcaaatcaaaggcaatcaaatcagtcaaaatatgaccggccacctccttcaaattgttgatccattccaaatttgattcatcataataaccatggcaatacaatcgctttggttgaccatcagttgttggaatgtgcagccatttggacaacacttggcgagcagttgcatccggtccatcatcagcaattgcatcaggcaacagaaaattggaattgattgaattcagatgattgagatcggtgagaattgtcggtgaagtgtggcgacgaaaattgtccaaaccattggcactggtaaagcccaaattgcgaatgtttgttgcaaaaattggccaaatttcactggtcaaagcatcccaaatctgctggacatcattagttttgtatgaatacacagtcaactccaatttggtgccacttctgtcccaaattggcttgttggaacggagaaattcaatgacggaatggtcaatgtagctgacgaaatataaaaaatgctttaataaacacaaaagttggcgctagtttaaagaagccctcttttgaaaattttttcactttttttagaaaaatttttttttttgtatttttatacaaaatttgcttttttac

SEQ ID NO: 3332 - DNA, 339 bp, Heterodera glycines
caaaaaaactttatttatgtcgtgaacaaaataagcaaaatgataaaataatttttgatcgccataaaagggacaccggtaatactttggtttgtcccccctattggtaatagtaccgatgggtaccccccctttttcgaaaaatgaaattttcaaaatgatgatgctttctttcatttatgggatcatattcgtactatttatccgtgtcaataattgctcattcgtttagaactgtgaatttgttgtttttttctatcttccatgcatttgaattgattttgagagataaatgtgaattttagtgaaaaataaattttagatttttgttcgaatttg

SEQ ID NO: 3333 - DNA, 2369 bp, Heterodera glycines
  unsure (1)..(2369): unsure at all n locations
atcacaccgtacattaaaaagcatggcataaatccggtgacgggcaagaaaatgagcagcaaagatctgacggtgctaaattttgccaaggacaaagacggtcttttagaaaagacaaaagcccattttacaatgaaatccaatttagacaattttcggtgtcctgtcacttatcgaatgttcacacagacgaggtccatcctttccaatcagaatttaattactttattcttcagcataatcgtggcaatcagaacaacgggcaatgtgtactcaatggaggcggtcgaagagctgaatttgaagcggaatcatctgaaggatttgttgacggacacgcccttccagaaaaaagttccataataaggaaaaagctttattttttcaattacccttttcaggacattattacactgcaggacccgcaggacttggacaagttcaacatcgaacagttttaccatgtccaattcgacaccaaaacaaaggcacaaattgcggaggaaaagcgcgcgatgcaaagcccaaattactttttgaaccgactgaacaacgaggcaaaagaggcactgcaacagttggagaagcaatatgtcaaggaggtggaaattatttaacaaatggaatgagtcacgtttaaatgcatttagggaacgaaaaaggcggatgatcaaacggcggacgaagtgaacgccgcccatttttcgcagggaaaagtcgcggccggactcacttcgacaacgatggaaccggtgactctgaacaaagcggcggtgttggaagaagacgtggtcaagttcgtttgtccaaaacattttgacaattgtatggcactgactttcgtatgttttttcaaggtattcacgcgtaacaaagaatggttatgtacgaattgtgacgaaccacggaccccttaacttggaattgttctgccgacacgcgccgcgcgcgtgcgaaaactttattgtgcactgccgcaatggatattttaatggcacgaaattctatcggctgatcaaaggatttattgtaagttgtcatatctctcccaatggaaaatcgttgaaatttcctttacttttttgttgtagatttttcaaattttaggataaaaacattcagacaatcaagaattttattgttgtgttgtaacaattattgcacagtttttagttaacaaatttaaagattgtctcgagctgttttttgaaatttttcgggtgaatttttaaaaacaataaattgacatattgggnggggggggatgggcttttatattngtaggtgaaaaaaagctgattgtgangtcattcgatgtgggtttcttttggtactgggtttaattacccgggacacttgttttaacactgacacaaaacgggtttaaattttctcaataattttgaaagctgatcaaaacttgtaagttataacacaaaaacagctttttcttcaacccttatagagatttttggacaacaactcaataatttacttggtaaaatttttatattcagctccaaggcggagatccgaccggaacaggcaaaggcggtgagtccatctggggcaaaacgttcaaggacgagatccagggcacgtacaaacatggcgagcgtgggatgttgagtatggccaaccgcggaagcgacactaacaattcccaattgtaagtgcagaagagaaccatttgcattttccaagagaatacagtttcatcactttcgccgcgtgccctcacctcgacggaaaacacacggtgttcggccgtttggtcggcggtgcgcaaacgttgtgcaatattgagaatttggagacagacgaagaggaccaaccgttgcggactgtgctgttcatgcaagccgaagtatttgtggacccatttgatgaggcaatggaaaaagtgcgcagagagagagaaacagcggcaaaagcgaaaagggaatcgcaaaacggtaaaaacaattcaataagaagcttaggtggacagggggtccgaggtaatttcgtagaatttttggccaaaatcgaaaaagcacttgtaaagatgggaaaattttacttgaaaaaatcaaaattttgtgccaaaagctcaaaatttttacgatttttgaattgcatttcgttaatcttttcacaaaattctattttatcttttcctactcgttaaaatttttacgaaattgaattcgctttactgtttcgtaaatttttacgaaattaacaccttttttttagtgttaacttgttaataaaaattcatgaaatcgactaaaaagcgcaaaaattctgtcgtttttttacaattattaacaaattgcactgaaattcaaaaaattttcccggcggtgcctatcggcaccgccgga

SEQ ID NO: 3334 - DNA, 3554 bp, Heterodera glycines
atgaaaaggagccgaaacaaacaaagcctaaggcgtccttctagggagtggggaatacataagcccggaggtgaaaccctcactgaagaggatagcaatgacagagaaagtaaagagggacaaagaaacgaaaacaatttcatttaatattttaggaagacaaaattacagcggatgaagcgaagagaaagccgacataaaccaaatggtcattcgaagtcattcatcgcagtccaattccatcgtcctttcctctatgatggcagtgttcacatgtttttctgaatctagattttaaaaagttagtttctatcgtaaaacaacctttttcctttgtctcttgtcttggcccaataatacaaaatgcacctgtaaaattcggcctcataaaaccctttccccagcggtacactcacagtctgaccgttcgccaacccttacattggaaaacaatattgaatttttaaccgatgcactaaagtgagaacgaagtggtgattcgccaattaggactaaccctttgccgacaatcactccgtccattagcacgcaattatccactttagagccatcgccaaaaacacaaccgtcaccaaatactgtccttttaagttgacattttgaaccaattttgggcgcattcataggtgaaaagagcggagcgggcaataatttgagaagctaacaataataaaagtgaattctttcctctttttttgtattaccgttttattcgcttcgaagtatgagccgacattgttgcactgagcaattattgtgaagtccgactctgtgggaacccaagcgaagcaattggcacgctgcacaatccgtggcaccaaatcggctttgacagaggaaaaggaagcagcggttgaccttgaaaatcgaggaatacctaattgagaaagctagacaaatgcaatcacttttttgataacaaaatgtccaatgccttccgttggacgaggtacaaatgcacgtccttatattttgcggttgcttttgccttggggcatctgaaagaagaatttgtcacgtgagagtcaataacaataacaattttatgacagtgcctgtcaaacaatgaaattgggattccttcctcctccgcaaaatcgtcctcgtccaccaaaaagagcaattgtccgttcggacccaaaatgacaaaatctctgtctaaaaatacaaaattcaaccaatcttcttttcccatcatttacactttttaacgcgatctttaggcccggggataggcccacccaaagccgaatcggtgagcagacaggacaggacagcgttgttctccatgtactgcttgaacatgtcacgcagccggacatcactgaccaagtcaccgctaatcaacaaaatgtgatcactctaaaaggatggtaattaattggattgattgactcattaccccctccttttacatgcataaattagttttgacccccctattaggaaatgcctttattcgtcccatttgcttttgccttcaatttcccgagcagtcttttgagtacgtccgctgttccccagtcatccacgtcctcctccaaactgtcaatggccaccacttcgatgtccattcccttaagtgttggccatcgtccaccgccgtccgttttcagcgcattttcaatttgcaatttttgccccaggggaacaatcaaaaggcaatctgatgaagaaaatgagtacatcaaaatgaacggaaaaccattaaggaaagcctaaaggcattgtttgacctctgacgcgattcagtcgaagtaaattaagcgaaaaccaataaagtggcatattggccatgggcaacaacgccttcggcatttgattggtcaaagacggcattcgacttccacgacctccggcaaaaacgacagcttggcaatcgctgagagaaaccatcaacaaaggccaaaagtaaaattaagaaagcaaatgacattttattaattagaattatagggacatttttattaaccataatgaaacaagccgaatttttatgaaaagatttatccaaaaaataattaaatagacacagaaaatattgttcttttttggtttcaccccttccccacctcaagatattctgaaattgtatcaattatctgaaggcgcacataccaattttttttaaattgtagaagcaggatatttattattgtatttttcgaaaattaaggaccaaggggtgcggagggtaaaagaacgaatagtacacaaaaagatttacaatccgagatcaggtgatgaacgcggaagtcccttcttgctggcgttctgtcgttctcctcccgctttggctatgccgaaccggcaagtacagcttgaattccaccggcaactcatcctcagtataaaggcgatcagcaaaataaacacgacgcaaacgacaatttgcatggatctgtaggaaataatgctggttgttagacaaatgatatattttgaaaaatatacttgtattcggagtgtttccacataagtgctgccgtaagctcgtttgacgaaatcggcgagattgaactgaacttgattccatccctcgtccagtcttagtggcatcgtacaaatgaaaggcttcacgcgggtcgtcgattggaagttagaagcgcgaaagcgtcgcttcatgcctttgtcgtccaaaatcttaaatcatttttataaacgatttttagttaacaaaggtatttcagcttttacgacctgaacttcaaaagtgaaatatttgttcaggttcttgacagtcatcacaaaataaggcaatttaattccaagatttttcttagggtcgagagggcaagtgatgaaagttgtgcttaaaatattaatgataataatgtatgtgagcattgttcaatgtcccacctgacattgtttccaagcagttcgataacggaggattgaatgtctaataataaatgggaaattaataaattcaataataagtttttaattcaccttcatcggtgattcttttgatatgaccattccgtacattctaaaaatcaaatacctaatcataaattaattatgaaaaaagcaaaaagaccttattccaaatttgcaaaggtttacttccaatgctatacaaaactgacaataatccactttgaaatgtgttgtgaaacatactatctttgttctaaaaaacaaaaaccaaatttagtttggtaaataaagaaaggaatagcttaatcctagggaatcattttcattgccatggaaacagaatcccactaaaacaacactaaataagtgcattcaattgcaaaaattaataaattttttttaatacataaaattttattttattttccatctcgactgaccttaactgattaaaccgttttagcgttctctcctcagttttcatctgttctttctaacacatacaatacaaaacttggtatttttgcagtttaggtggcccgatgaaaaaccaaaggcgggggggggggatttacagggtcactacaatcaaggaagacccataaactatagtttaattttaaagattaattccttgaagctataat

SEQ ID NO: 3335 - DNA, 1466 bp, Heterodera glycines
gatgccggacgtatcattccattgggaagcggcgagagcgtgccaaagaggacattgagagccaacgacaaaggcttgaggaagagcggcgaaattgtgatgcctttcaatttatgtgttggtaattcgttttttacagtggcggcgagcatcaaagcgaaattcactacaaatattgacgaacaagaagagaaattcaaagaacgaacggttggattggtaacacttgacgaagtgaaggagagacagaacgaaatattttacaggtgaaaaccattctttttatttaattttaggaaatttagtgggccatctttaaaattttcaaacgaagaccgacccaaatttgagaaagccattcaaaaaagagtgctttcgtttggcgcttttgacgacgacgacgacgaggaggacgaggcactgattccaatcaccaaaaagagacacggaatggacccaacggtggacacttcttttctgcctgaccgcgaaagggacgaacaattgcaacggtaatgaataggaaggctcattattaattgtatgaaattaaaattcccatttttagtgagcgcgaacggatcgctaaagaatggcaagaaatgcaggagagggaaaagaatgaggagataaccgtggcattttgctattgggacgggtccagccatcggaaggactcaaaaacaaaggtcaactgtcaaaaaacaacaacaattattcttggcatggatttatttgttaatcattcagaaagggacgacaattgctcaatttctgcagaaggcattggacgtgggcgaaagtttactaccacaagatttattttttgtttttagacatttcgcaaagaattcctcgaattgaaattggcaacagtggataatctgatgttcgtgaaggaggacttaatcatcccgcacttttacacgtaaatttattatattctcattcatttgatgacaaaaccctgatttcttatgaaaattttgctttttttttttaaaaagagaaataacaaacagtgaaaaatagaagaattattagggtggaataaagggattccaaattgacattttagtcacaaataccgaaacagccaaaaattggcatataaagccaagctatttgctactgcgaatttctcactttccataataattgctttttcagttttcaagacttcatcaaaacgcgtcaaatgggcaaaacgggtccgctgtggcagttcgaagctgttggcgaaattcgcgtgcggcaagatgccgcgttggacattggcgaatcgcacccggtgaaggtgacaaacaaagcgtaggaacgcaactcacaaatcaacattttaacaccatcaaggtcattttgcgcagttggtatgagaaaaacaagcacatttacccggcttcgcgttgggagccatttgtgccggggaaagtgtacaaacggacaattgacgacttatccacgat

SEQ ID NO: 3336 - DNA, 1256 bp, Heterodera glycines
tgcattaacgaagtaataataataaattactcggtttcctttaaaggccatggcaatgacgggcccgtaacaggcggacagaaaggcatcggaaagtgcaagcaaaccgaggaagaaaaaattggagttgcggggacggagcagtacacaagcgatcagagcattgcataccaaagaaatgacactgaaggtgccggggcattttgcaaccgaatgttttttagaccttaacgaagtgccgagcacagccaccaaatacctttaaaatggccgaaaatatttaattaaaaagaaataattattttaatagaaattcaaatttctctccactcgacaacagtggctacttcagaatcctttattgcaatacattgtctccggtcctttgacaaattattattaatggtcacttattttgcttggattgtctccgattagcccaacttaccatcgtcggtccgcaaaaatgtccaattcgcagttgccgtcttctgattctcccaccacttgcgcgggcgttgttattggcgtggtgccgtagagaagatggctgcttccgtcagcttctattgccatcgcctttggcattcccaggaattcgtccgccatttagcggcaataattaatttggaaacggccttcactcacttattgaagaaaatgggtgaaagagaaatcatgggaaagctgacaaaattctaagggttcgtaaaaagtaaattcgaaaaacaaattgaaataggcaaagtcgcagtttcctgaggaatttcgcccaaaaacccataatttatttgtccatttgcgcaaaaggcaaaaaaagtaatgcgtcgaccacgaaatgcctaatgcaccaaccaacacagggacactttcactcatttttcatttcctcgtgggaagggcaaagatatgaacgaatctcggggggggggggggggggtggatttgattagcggaatatgtgtggcaggcgaagggtgggaaattaaggaaggtggcgaggggaaggagataaggtagggagcaagagttgttgttgtttccaggggggggggcaaattcaattagcccacacttccgttgttgggccaactgatgactaacggacggaatttggtcggacagtgccagcaaagagcgcaccaatcgcaacccaacaaaatggcgataattattaaaaagaaaaatgacaaaataacttttggaactactaaataaaaacgaatgaatgctctttaaaccgacggagaaacgat

SEQ ID NO: 3337 - DNA, 4117 bp, Heterodera glycines
  unsure (1)..(4117): unsure at all n locations
tttctcattatatttctgctgttaattattattnattggcatttctataaatgtgaaattgaacccncanagtgaatgaatttaaatgggggcggtataatntaatcacctaatcatatgtaaagaaataaacagttcaacaaacgaggaatacaataatatgtcgaagaaaacttattaaattgtggcaaaaaaaaattcagagcgataaagcgaaaattaagtcgaaccaagcaaaatgcgtgaaaggctctaaaaaataaattaatttatcatcggtcgcacttcgatagatttccatggcatttgccaaactttgaaatcatttacataaaacagacaattaattacatatgtatgtatgttaatcaatttaaatgagaaaaaagcatttaattttcgttttaattaagaaaaatgagaaagtgataaaatggcggcacgcaatcggacggaattcaaagaaatgggaaaatgcacacggagaaaagacaaagaaaacgaacgatgaatgaacgaacacctgtccaaaacgccacacgcaaatgcaaaaaaggaattatgccgaaatgaaccaattcagcagaggaaaaggcgggagaagtcaaaatggcatttggaaagaaatgttagaattactgtaataagaagaaaggaaaagcacagaatcaaacggaaaaagaagcaatttgcaaatatgagaagagaaatgaattaaatgagaaaagaaagaaaaacgaattccatggccaaaacaatgggccaaaaaaattggaaattgtgccgagaaaggaaatgacaagcgaagcttttgaagttgaatgttttttggaaattagcaaattgatgggaattgcgtgggacagagcgaaggaattgcaaaggaatgcctttcccaccgacggaagaaacattcccccgccgacgataagcggcgaagggaaggccgacttcgttttggaagcggagggcggacgagctgcaatttgataggaagagccgaccaattaaagacggaaagtcatggccaaggatggcgaggggggacgaaacatttaaggggggagaggagggatgataattactcaattaattatccgcttaatccaagctaattatggagggagaggcgctctaagcgaattgaaatgacggaatggaaaaatgcttttataggtgatgaatggatgaactatgttgctctgaatggggaacgttttgcgttgtcgcgaaaaatgccattcccgtggagagaagcaattgagtggatgatggcattgcggggggggggggggggggtcatcaactctcaaggatgggatgtgacacacatagctcggcagagaaatgaatattcgcgtaattagcccaggcgagaaagggaagcacccgctaaacgtggcacattattttggcggaatgccatccatcttaagggtatttggacaagtggacgaagcagtaggacgggcaatgggagtgccaattccatccgactcattaaaccccgggcgaatgcatcgcccattattgggtcacgacgggaggagcagtgaaaggaaggaaatgataatggagggcaaaggaaaggggtagggcattatattcgaacaaaccctttccacgcgtgtccgtccttttctgtttacactattaacaatgaggacacaaaattaattaatgaattaatccccccatgaataaatatcacatatcaatgcttctccattgcatttccgccccttctcttccatccaactcattcttccgcttcgtatcatccgaccacagcaattgtggcagtcccattgttgttcaacgcgtttgggtggtcaccgtggaaagacgccgttggcacctgcggcgtggtggtgagaaatttagaggacgagtcaaaaggaaccggtggttgggcagggcgagaaatggcctcgtcaagaaaaaattccttgaaaattcacaataaaagaacgaacagtcaccccaacactcaaatttacttttaaacaaagtgccaaaagagcgtgtgccaaaaagacagcaaaaacgaagccaaaagcggtctaaaatttggaaatgaattttattgtgccatggaatattttgttgtgcagaatgttcaaatatgtcatccaaaatgctcactaatctgtttgggtcttctctgacagttggccataacgaaaggatcttaaaacagaaaaatcacgaaaatattaaatatttaaaaaaccaaccaaaactgaaccggtgagtacaacggcactgactgccaaagtccaccgagccaacgtaaatgggaagagaagccaaagagcggtgacgggaatgaacggagccaaggaatagccaaaggcacacagcaaatcgaagaaggaatattggagactgagcggacgatggtaccacagaaaggcatagaccaaagaaggcattgtcagcacgtaaccgaacacgagggaagtggcaccagtgactgaaagggaggagggacaattggaaagtgagagggaaaaagagagaaagcagaggggagagagagtgggaagggagagggaacggcgggccaaaacaaaccaaagctgaagtcgctgataaacaattcgtcggagccgaaggtatgcaaaaaacgcgacagattgccaacaatcgcaatagaaaatacgagcgaaacactaacctaaacaaaaagggaaaattggattaataatatgcaattgttggcactcaaaaaatacccaaaatggtccccacaaatcggggttcggctgcacaaaatcggagatgaaattgcccgtccggcgaggcatcgcactgttcaacaaacgggcaaaaacctgcaatttgcatagaaacacaaattcatgatggaatgcacctgttcttcgtctatatcaaagaagcgacggtaaaaactcagagaaagaaaatgcacttttgaggagtcatccctttgcgattcgctggacgaataaacatccaaaagattgccagaaggaaaggccttaaaccaaagcagagaattgaaaggaatttaaagtcaaagcaacttaccgggtcaggaggaggtttattattgacggagtcggaattgaaaaattcggacgaagcaccgccaccagaggaagggaaatctgaagggaaatggaagaagaaagtataaaacaggaacaatggatacccctgaactccaagcggtccattcttgttgccaatgtcagtaaaacggctatgaaaagtcggagattgacaatgagagcataaaattgtaatatagcgcatcaaacactttaataataaaactgacacttaaaacggatactatgctctttaaaaccaaataataaccacaaagggatgtcaattaaaattaattccgacattccaaaacccattctgatcaaatgtgtctcatcggtctcggctccttcgatgcgccccgttgcgctcttctcggcccctctcttcgcgctcgcggctgtcctggcgatggtcccgtcggtggtgccgcggctccttggcctcgccccttctgccctctctctctctgtctccctccctccctctctctctgcctccctctctctccctgtctctgccgccctccctctctctgctgcgtgcgcttcgtccgctgctttctcgactcctcgccctttcgcgctgtctgcctcccccatgccctgctgttctgtcatgttcgcgccgttcatttcgctctttttcccgtggcggcttttttccgtcggttctgtgcgtagcaaaaaatcaaaacggaaacacaaaatttgaaatgcaaattgaaaaagatgaacaattcgaatgttttggctttgtcctgagactcactgttcgccttcctcctcaactttgggccgtttcaccgcttcggccatcgctttttcctcttcactgtcttcgcaagaacactcgccaccagaacatgaacaagaacagctgcaaatgagaaaacgcatcgaaaattgagagcaaattacaattaaatgtttctggctcaatttttgtatttattacaaanaaggttttctattcgattggacaaaaaacaaaaaatgacaatggaaaaactaaaattttttattgaatttgcatcaca

SEQ ID NO: 3338 - DNA, 1432 bp, Heterodera glycines
ccgccgggggaaaaatttgaaaatttgagtgtaatttgttaacagattttcaacaaaaaaggctggttttcgggattaataggctcaataatttgtacggattttcattttaaaaaatgataaaaatgtgacaattaaaataaaactatgagtaatcatattttgtcgataggaaagccatgagtatacaaaaagaacattcaaaatatgttagtttctgtagagggattgaaccaggggaaagaagacgaaaagtcaaggagactagccactaggcaatccacacaattgtcgtcgtcacttttaaagaatatatttcatattttttttatttttccttttcattaatttttcactcagacccccattcttaccagtgcttgtttttcccgtttcccggttgccctaccgggaccgggacctgagcttttcaaaatccgggaccgggaaccgggacctcggatgaccgggaattccagcccggttccgctgcactctagtttttattttagtaaaggcattttggtaaaattattattttgaaaaaataaaaattatgaaattttcaataccggttttaccgggtacccgttttcagtacccgctaatacccaggcccggtttttgcccaaatacccgggcccgtgcagccctaatataaacagataataatcaaagtttgtctaaattcgaatcacaaattcttgcgttattaaattttatttttataaaagtgagagaaattgagttttataattggaaaataaaaaaaattgaaaaaatagatgaaattttaggaggattcgtctgctcttttttttaaattgccgggaggagaaaattcggcccaaagtttgcctcaatttggtcgccagggttttgcaaggaaatgaatggaaacaattggtcaattgggaccgaaatgaacaaatcgggagtaactgaaattcaaaatttttaattttaattgcatttaaattacaacccaaacggtatccatttttcgtgaaaaacatttgacgcgttgccaaatgaacgccaaaaccgaatacatcgccacgagaaaatgtgagtccgactaaagtctgctgctggtaaccgttggcccaaaaaatgccattgctttggagggcaaaagtgccataacggttcacaatggataaatatggcttctgtttgatggcgaatccgacaacaatattggcgtagctgaatgtaaaaaaatgaaaaagaaagtcaacaaaaataaaaaagagaatttaaaaaattcattttctggctttatacaaaggggtggggttgatccaattttagctttatccctgggggtgagttggaggagtcagcggccaaattgcgagatttagtacattttcccctcactgtgacccccgcccctcggtgagaaaggaccctctattttagcaactct

SEQ ID NO: 3339 - DNA, 1812 bp, Heterodera glycines
  unsure (1)..(1812): unsure at all n locations
gggtgggcattttttgccaatgnaggcacattgaccgtttgctgatgagtcatctgacaaaggacagagtgattgattgattaaggacaaatttgagaaaaatatttcttctataccaaaaaataaattcttgaattttttaatccgaaaaatgaatcgctttttgttcacccccccccccccccccttcccaattgaccatttgttgctgcttttgctccaattggctaattctccccaaaattgcattctgatcattttgcaactgtgttaattgaccaactgaaacagagtgaatcattaaaatttaccgcaaaatattctttcattaaaaaataaataattacatgagagaaataattaacaaaataattatcaaatttgcccacctatggattcacacgttttcataagctgatcaaaatgccatgtttgctgctgatttttcttctccaattcaccagtccgttcaaaaattggtgtgaattgatccacagaaactgtgggagggataaattaattaattaaaatgaggctaataataaaattaaattaattttttataagttctagaggtcggcatttaaaaaaagcctgtacctgaattccatattggacctggataaaagataaccactcggaataagcaattttaaaatataaggcaggaaatccaaattttcgtgccaaatatggacaggaattttttcataatcgatatggacatggacttcctggaccaaaacccaggtagatgcacgtccaaaaaaacacaggtcatctaaaaatggtctggacctggatccaagaaaagccaggcctgtatcaaggaaaatccacacatggatcaaggaaaatccaagctaggctccaaggtccaggccgatctctcataattttcccaccgtattgtctctgctgctgttcgtccttttctttttgctgtttctccaattcaccgatccgtcccaaaagtacaatttgttcgttttgcaaccttgaaagctggccaatcaatgcttaatgagacagattgtgattattaggattttaatccttttcaaaagaattgcgcgaactacagtattccaaagttttggtaccgtttttctcattttccttctcgtcctcttcttgtttattctgcagcacgaaaagctcggcctgtagcatgacaagatgttcagaggtcatctgcttttgtttttcgaattctgcttgaagattgttctgaaaaaaggcttttttaaaaaacattccatcttttatgaataaattcatttaaatattatttatcattatttttaaatttaagtgttacagttaaactcacattatctgctctgagttccccaatcatggacagttgctgcgatgaattcaattccaacgaggcaaacttttcacaaaaatcctataaaaaataaaataaattatcagaaatttccatttttaagcacaagaaattgcaaaatatgcgcctaaataggcactaaaagcctaaattaggtataaaacgaaaaggcataagaataggcacacaaaaatttaatcaaggctttttaagcgataaaatgatattgttttttatagatgcatttttggtttttattgtgtttttgttataaaatatttgaaattcctaaaaatagtcttcaaacaatggtcaaataggcaaaaaatattccttttaaatttattaggtacgaaatgttgaaataagcaaaagtaggcattataaaagtttcccaaaaacatctagcaaaaatgcttaatgaaattataaaaggatttggcattcttttctgctcc

SEQ ID NO: 3340 - DNA, 2261 bp, Heterodera glycines
atttggcattcttttctgctccagctgtaatttcctcccttttaatcgaaaatttaaactaattaccgcatttattgagctaataatactccccccccccttgtaacagtaatccacgcccctatttagtgcaataattagtttcaggaaacgattaaacgaatagtttactaaataaaatattttagccgcaattttttgtttcttaaatttgagggtcgccccatggtcactccgccaataggcaccgcctgagaaatgttttggaatacaagtggtgagatttgatcacagtttaccaaaaaaaaaacaacaaaattttggctaaataaaaaaataattagagaatttaaggttaaattaaataaaatagaaaataagccatcttttttatgatttcgataataaaagataagcaaatgattttgcttcataaattcagagattttttaatttaaaggaaaaagcaattggccccggggggaatcgaaccttcaaaatgttttgctgttgcggatcactggctgatgatgattcagcattggtggccccctcattctgacccaaacaaatcacatcggcagaatttcctttaaacttaaatatatttttttgattttccataaaaatatttacatttgtgtccattttctactttgtttaccttctgctgctgggtctttggtcgaattttgcattttatttcaaaacttttgagtgaattgaattcaatcggttttcctgtaaaatttaagtgtttttttaattgtacgaaagtttttgaattttttaagatgtgtgttataaatttaacatagtatccgtggtatcaaattataatgaatattctcaattaatgtgctaattggaggaggagagacagataaaagcccattgattgaaaattggaatggacatagggcgagggaatgcagctgaagaaatagcggaagaaagtgagtgagtgaccatcagacagatgggcagagagagagggtcactcgcggaccaaagaccaaaaaatagctttgccgaatgaattttttcttgcaaagtcaacaaaaaaattgttaattattttgtatattatttaaaaagttttaattaactttgttgccaaaatcaattgaaataaatgaaatgtacatacatatcaggggtgggacaaccctcgcctctcgtctttcgccaactctcgccatttttgggactctcgcctctcacctctcgttttttgggacgagaggtgaaaatgcacgcctaaagactgaactttcgagcagtcagaaaaatataaatatttaacctttcttcatacggcatgggaacaaggccacttttttgaatgcttttcttgtaaaatttttggactgcttcaattttgcgtgcatttttctttttttaatagattccaagtttctttggcgtattttaactatggtctgctatagcttttatatgccgaaattaaagtttcaagcttcgagtttttaacgctcggtgaagctgataacaagaaaaatatggaattttttaaaattttattaatatggttagaaaaggatttgattgattaaaatgcccaaatccttttgtttctgcaatggttcgccatcaagaaaataaataaattttgtgttattttcacccagataaaggaccattgtattttctaatcggcaaacatcttaataccaacattcttaggcaaattatttcggaagatcattaatagggttgtaaattatatggattaacatattttttctgcgcatgtgctatgaagaaagaggctcaaaaatagcatttctgcgttaaattttttgatttggtgaaggtttttagtccatataaatccatatttagggggttttcgggaataaatccatatttcgacatttttgccatttttgccattttagtccatatttcggccattcttggcaaatttacataagaaaaattcaaaaaaagcaaaaaatacacctctaaatctcgactttttgaaaatttaaaaaattacacccccaaaaatatgaaaaatttgggttttcgtcgtcattttggcatttttaataaatattttcaccattttttgcgaacttttctttttttaaatgcaaatttttttttgaaattgccaaactggaggtgtttttttatacaacggacgacaataaaaaatttgcatttttaaattttaaattcattttttggttgtttattgtatttttaagtttatttaagcaaatattgaatag

SEQ ID NO: 3341 - DNA, 2543 bp, Heterodera glycines
  unsure (1)..(2543): unsure at all n locations
tgcaggtcgaatttntgtttatatcannatcgatttgggctgtaaaatctgtatttttctgctttttcttcaatacgggtcttaggttcaaaatggaccgaaactgttgccggattcctggtgatcgctgtttctctttttcacaggttttcccccctacccccctttgatgagacccgaaaattttactgatttctccctatgctctatgactctcactcctttgcatatggatgggtttattcagcattgaccaaataagcaattgtgaggcataatttgaaaaatccccattatccaacatcctataagcatccgaaatttctcatccagcgcgatggcttggaagcctttgcggacgaacaaaaaattcaccaaaacgcgaacgttctgccgttaccatcttcgaaaggatgtattcgtgcctaaattcatttaaaattacttaaatatcagaaacaataattttttgagatgaaaaatgctttattaaaaatttttagaagaaaaaaaacttaattctaaaaaatgttcgtgagaaaattttatttacaattttttttcgaaattttcatttctttggggctcaaaagagaaaaagcatatagctgactatggactcgaccctccccttgtctcactatggcctttgtccacccatgtattttaatgaaatccttccaccactgcgcccctgtccccttacaagcttcaaatgtgcctccgctgccaccaagttgatgtcctccaccgtctcctttcattcagccacgcaacaaattcggccattctttcttctatgtcctcgggcagtacatcaaccggttcagttcccacgtaaacgtcagttacgcggtagactccagctgcatcttcttgtacattggagtacacctcctcatggaggcgtttgatggtctaaacataacatttagaatgaatgtaatcaaaaaattcatttatcagtgttaaaaggaaaggtgcataaagtagtacggatcgtttttgggaaaaatcaggatcaggattcagagtcaaaaatataaaaacttaacatttattgcttttagtatgggttaaaaatggacgacttgaaattttagccctaaatccgttaataatgggacaccgagggttcgaaaacaagaataagcccacagtaccgaattaaataaattaataaacacgcaaaaaataatatttttaccaagttcttaatatgttgcttttcgcataattttttacggcgcattattttttaaaaaaattctgaaaccgaggggtctggcggggaagataggcgcctccggcaaaattttgaaaaatttgttcgtcttttgaacagatttggtcaaaaaaatgacaaaggtggcaggtgtcaattttttggtaacagtaataaggtgaagcgcggtccagcgggctataggcaccaacgggaaaattttcacaattttcgggtgaaatttgcgattcaaatggcttaatttaattgaaatttatttaaaaatctttcggaaaatatttggcattctatccttgaaattttcaaaaaatgcatgcgagtcccgtgggatcacgcacaaaaaatcaaattttggatttcgctgtgggattagaacaaaataaaaagagtaaaaaaattttagtgcggatttcgaaattagtcgaaacaatgatatattcgtgatcagcgtcccacgtaaacggtagtctttatataaaaccatcaaaaagggcgttgtataaaaaagattaaatgaaaattttcaacaaaaaactacccaccataatttttgtcaaagtcaaccaaattaaactcttgatatcatcgataaccctatagagagagtactctattagctcacctaaattaaaaaaaaattcgtcaagtttgaacacaattatggccaaaagtacgccaggaactaggttttcaaaagtttttggtcattaattttttgaacttgacataatttttaaattttgcaggctagttgaaacctatgttaaagaatgatattcagaaattactttattctaaagaatgtttggagtcagaatttttgatgagcaaaattattttatgtctactgaaaaaattttcgttataaatattttagatattttattttcttgatattattcgatagctcttattgttttcaaatagtttgctaaatttaaaaaaagttatgaccaaaaatgtctgaaaccctgtttcattgagtacttttggtcataactttgttcaaccttaataaatattgtttttaattttgaaggctaatagagaactcttatgactatcgaaagatatcaagcatgtttactttggttgactttgacaaaaggttttttgtcgtaaatttttcatttgatggttttttatacacgatatagcaccccgtaaaccactgaaaacacaacaaaactgatcaagaccatcttttttgtctctttttatgggatcagtaaaaccgatgattgtcccctaaaatcgtaaaaaagagccaataactgaccggcgggtaaaaaataaa

SEQ ID NO: 3342 - DNA, 1099 bp, Heterodera glycines
ttactttctacttcaatccttgatcagacttaagaaaattctatttacctaaataaccataaaattattttttttattgctgctaaagccatttaaatagtaaaaaagttcactcgctgtcgtaatgtccactgtccaaatgtccccaaatgtccgggagccctgactgactactacctactaaaataaaaagaaaaggaacaacaacaaaatatttaaatgggaaaatgacgcgaaaacaatcgtcacaaagaattagtaaggataaatgccttatttgagataggatattggccataccagtatacttgtttttacgggcccgtaacccgtactttttcgggctgatactggcttttccttagtaggggtcggggaccccgagcgttgtaaaatgtaaaagttaaaaagttaacgcaataaaatatttatttatgggtttacgaatttttttagggtgtaaaattgaaaatgttctttaaagatcaacaaaattatgccaaatcattatgagatacataattttagaaatcaaaaattataaattttggattagaattttgagaattttttcatttcttaagggtgcatttttaaacattttatggccgattcttagggctatatatatttttttttaattttaggttgattcttaggggggggggggggggggtaattaatcagattttattttatcagtagcatcgccaacttaccgaaaaaataataattttgctggtgaaatcgtaccaaaaactaaaccaccatcatgttactaataaaaaattcactatttaatcaagttaataattaaatgataaaaaatttcagtttgttttgacttaactaaccaaaaagtttctctctagccaattccgcgaactttcaattaaagataattagtaagtcttcttcatgttaatgatgttcaccaactgaaaattaattagttaactaattaagggaaatctatgtattaaaagtgttcaaaatattatgcaccaataaatggtgaccaccactaatattgtgcttccgaaaatattccaaatggatgattttcacaaccattacttacttttgtgtgggggggtgt

SEQ ID NO: 3343 - DNA, 544 bp, Heterodera glycines
gcggcattagggcttaacttggtaagccaaacaagattttttttttttgaatttctccgccagattttcgccaaatttcagcgtaaagcatccaaatttgtgttgttcggcgcattggccaccggtggcagtgtgttgctgtactcgttggagaatagcggtgcgcgtgcctacgactttgttgtgcacccgagccatttgccatggtcccacggcggactgatggacgcaattgacatgcgatcgtccgttttttttcttgtcccacatttaacatctttattttaatgtgccaagttttcaaccgtaatgtctccaattgcctaaacaaaatttggatttggcccgatttaaaaaaaaaataatttttttttaatcaacgcctgaaattaaaaaaaacttgtcgtccaagaaaccgttgaaaccaatcctttctatttacctcgcaataaaaagggcacttttctatttagtttggtggatatatgcaaagcaaatcattcatggatggaagttttttggtccctcaaataatacccaaaat

SEQ ID NO: 3344 - DNA, 5180 bp, Heterodera glycines
  unsure (1)..(5180): unsure at all n locations
atttttcagaaaaatataccctaagaaatgaaaaatctctcaaaaaatctatcttaaaatttattttttgtaatttttgacaagaatttttgattttaaaatatttataacgagcacagcgaatgggagatgtcatgccgtttttgctttcttttgtaaattaccaagttttaccctttgccaatcttccctccactaccgccaaatgaattttttctctctttctaatgcaattcatcgatcgattctttcatttctttttgccgttcttcttccattttcattaaattgattttgtttactcagcattagtcattttgaagaaaatgaatgttacctaagtaaaatcaggaaaaggaagagaatttatcaaatgaacttttatatgaatttatctaactccatttcacataccattttgtcggaaaaaaccttaccataaacaccatacacatccaataaaagataaaatttagaaaaatgctttcacaagaagaaatttttcgaaatacacgaactgttgcccaaggattggatgcattgagggaagaaaatgaggccatcaagaacaaattgttggtcgggatggacgtgttgacacctgatgaacgtcaactcatcgatgagaaggcgtcaattgtggaaaaaaatcttgaaaacatccaactcggactggaagaatcgcaggttctttttcccattaaaattctttgaagttttttaaacttttcaaggtgatgttggcattggcatcgcatttacaaaatttggaggcggaaaaacaaaaatataaggcgcaagtgcgtcgtctttgtcaggaaaatgcgtggattcgggacgagctgaactcaacgcaacaacagcttcgccaatgcgaacaagtacaataaatgaatttttcattgaaattgacgaattatttacttcctaggacaaggcacaactcgaggaagagaacaagcacttgaaatttatgaacagtatcaagaagttcgacgaggatttgccggacagatcggagaacgaagaaaacacatcggagcaactgcgatccaacgaagtgaacacgtcgacgactttgcaagagcttggttttggaccggacgaggacgacgatttgcacagtgagttgggagaaattgttttgctaagtgatgagttaagattagaaaacggttcaatcggattttatacaaccataaaaatatacgcttcccacatttgtgcctgtgctctcctatttttttttcaatttttattaacatcttgtaccatattaaaattaaaaaagtcttaatctactttcactttaaaatagagtttatttgaattagcagatgccagtcacttttcacaaccgactccggcgaatgcgatggctgccagtaccagcgcgggttacgatattccgcagcgtttgaaaacgctccacaatttggtaagtttgtctgctgttctctgttcttgactatttaactgttaattaggtcattcaatacgctgcccaggggcgttacgaagttgccgttccgttgtgcaagcaggccctggaggacctggagaagaacaacggccacgaccaccccgacgttgccaccatgctgaacattctcgcattggtttatcggtttgtcccgcggttctttctttacgctatgtttcccattcagtgaccagcgcaagtacaaagaggctgccgccctcctcaacgaggccttggccattcgcgagcgatgcctcggcgaggaccacccggcggttgccgcaactctgaacaatttggccgtcctttatgggaagaggggcaagtacaaagaggcggagccactttgcaagagagcgttggaaatccgagagaaagttttgggcaacgaccatcccgacgtggccaaacagctgaacaacctggccttgatttgtcaaaaccaggcaattatcaacaaatgaatcacccattcattgtccatttttagggaatgtacgatgaagttgaaaaatattatcgtcgagcgctggaaatttacgagtcgaaattgggaccggacgattcgaatgtggcgaagacaaagaacaatctttcgtcggcatttctgaagcaaggcaaatacaaggtaaatagtcaaaagtgggaaaagggcgagcaagcagtctcttaattttgcaaattttggtgatttgttaaattaaggaggcggaaatgttgtacaaacaaattctgacacgggcgcacgaacgacagtacggccgagtgaccgatgagaacaaaccgatttggatgatagcggaagaccgggaggacagtaaacaagcggacagcggaatttaccacgagaatttgcaagtgtcgatgaaagttgacaagtgagtgatgcaataagacacttaagaaaaaataggttttggagggccggcgtgccgataggggcgaattttaaatttatttctaacagatattcacaaaaaataagattttttcgataaatttttgtttttttcatgatttactcaagcaaattggaactcagattttaaaaattttttcttgcggcacattttgcaaaaaaaacttggtgaatgtgcgagggtggaggtccggcggtgccgttaggcgccgccgggaaaatttttagaaaatttgaatgcaattttttaacaaatttttgtaaattttgttagaaattagcaaaattttccagaatttccctcttttgggtgaaaatacgcccccaaatcagaacatatcttagaaatacgaatataaagaaaccaaatcagataaaaataattaaaaagaaaacgtcaaccggtattgaacccataataaaaaatactgttagttgtgaagcacaaaccactaaaccaaaatatattgggaattcaaagcaaaatttactttatttcataaaaatttgtcaaagatgattaaaaaaattcaaaatgtataaatttttgcattttatcccacaaatatgccattcttaggggggggtattttcgcccccgcgggggcgaaggtcgcgggggcgggggtgaggccaaaaaacctgccccgcccccggcgggggtgacgggggcggggtccgaaccctagttataacttatcttatcagctatcacttaacaaacaaaaatcgaaataaaaggtttgaattttttagcttcgtgaatttgttgacggagctgacttcatggagaggattcagcagattatccgagaagacgtgttcgctcaattggccttcttttctttaaaaataattcaggtgaaagcattgcaagtgaaagcgaaacgagtggacaagcgcgaaattgaggaggaaagggcgagcccggccttctcttttagactgcacatgaattttacaaagttattcggcttttgatcactctcgcggagatattatgaaattttaaaattcattgatgtttatttctcttattcatgcgtaaagcttttgcgattgactctttgtcttaacattcattcctcggcacattaagtgccttaaacacaatgactaattatgggaagtcagtgaaaacatatgaatggggtgggtgggacacattcgtaaattgaaatattgaagtcccaaattccttggaatttcttcaaatctgctacgcaactgatgcaaatttcatgctcactttttttcttccaatacttaacatgaattacaatgtaattaattttatttatttaaaagaaaatgagcctgattaatgatgaatgaaaaatgcatttgcttgggagattgctttgtgagtattgtttttcatatccgtgtttgttatttttgcgtgacaaaatcaattttgaactgtttcaaacggaaataaggttcactttctgatggaaatcctcggcttcagggaatgctccttccatttgtggcttctcacactcaatttcctcttcgaacatttttggctttttgtttgatgtcgcgtgcgtcaaattgtctaattttccgagaacaacacgcataacatccttctttctgctggtgttaatttcagaatttgaaaaagaatgaacagacgacgatgaaggtgcgttttctgctgctgaagaattcgtgcattttttattgtttcggttcacatcgatttaattcttaaacttacgctttgtgtgattctgttctacgctccatcttgaacagaaatcaagcagtccattcatcagctgattgtttccatcttcggcaggaggactaaaaaattctcattcctaacatcaaatttaattattatttttttttaatttatgtaaaatgctaccaaatttttttgcgagcagcagaaattaaatgaaatttttcggtttttgaactgttaaaagaggaagacagagactgaggccacgaattttccttgttccaattaattaaatccgtgtccaccggcatttaataaaaattgaattaattcttaaatttgtgattacctattttacaattacaaaatttgtgctgtaaaataatgaaataattttgaaattataaaccagttaagaaatgaattcctccgagtggacggaccatcggatgaataaatgggaaaggacgggcgaaggaaaagtgggttgggaatggctttggatgagggtgggtggcctgtgtccgtttctctgttcattctttacttccggtccgaagacgttccgagaaaagtggactatttcgaggccaaaaataacttcggtgtttttgtgggaatttcttaggaatcggtgagtaaagccgacaatgagcaattacaaatcgaatcgttgaccgttcaaaatgacgcgcaaatttaaatgagaatggcgccactgcctgttggaccttcggttccccgaggtttttacattcattcgtctgctgccccttcccatcgttactccgccgcccctttccttccctcctccttttcctcttcgacctttcactagcagcacaaacaaaacatcagcagatggaggatgaccaccactgaaaaaggcagtaagtaacggcggagaaaatggagataactcagtaagaagatgagactcgaaaggaggagaaaatgatggaaaaagcgatgccaacgaacgaatttgacaaaataggcaattattactttaagaatgagcgactccggatncaattatgaaaaattagaatttgagtggataactaagtatttta

SEQ ID NO: 3345 - DNA, 4576 bp, Heterodera glycines
  unsure (1)..(4576): unsure at all n locations
agcttttgcgatgacttctttgtctacccatcattccctcggcacattaagtgccttaaacacaaatgactantatggnaagtcagtgaaaacatatgaatggggtgggtgggacacattcgtaaaatgaaatatgaagtcccaaattccttggaatttcttcaaatctgctacgcaactgatgcaaatttcatgctcactttttttcttccaatacttaacatgaattacataataaaaaactcaatttcgagacttggacaattcgtggcttggacaatttgtgggtcagcgactgtaactcattcccaatattcggacgaaatgctgtcccgattagtgaattaaagtaaattccattttcgcaaaatttggaggtgccttatcaaaaacagcacttctcagacttggaatttctcattcgtcacgttgattttgcgctggatttgtttctgtttcgtttcgtccttcttccgttttcttccgtttctttctttgtccgattctttggctttaaattgcccatcatttcgtcatcgcttcgcaatttccaaaaaagggtttacacaattatttattttattgtgaattgaatcgccaaaacattgtcattgtccgtgtttggcgggggaggggcggcggcgactgtttaagcgtttgatcgatgcccccggcgctctccgattcaattcgtcgtcgttccttaatcgatcttcccaaaattctcgccattaatggccctctcgacctcaactttccgccattaattggtgaaaccgcaccactttcactttttgttcgataaacacacttttaattgtgcgtacactttctttcattttccactttctaaatttcttcttttccatcacaaaatttgggcatttaatgaacaaaaggaaaagtgtcgctggtaagtgaaattcatcttttctaattaacatttagcaaaataatccaatgtttcccacatgttttttatggcttattattatcactttttccaatttgttttatcatttggcctttggcggcggaattcccacggaaaagaaaaagataaaaaaatgttcaaagtgtcagcaaagaattaataaatggaggtgctttaacacacaaataaaatcaattccattgctatctccgaataatttggctttcttttccatattttttgcccatttttgtgctttttaagtgtccgccgatggcgggacggcagctaccggcagaagcagtccgttgcactgcggggtccaagccattcaatgcgtgggcttcggccggaagaaagtgtggccggccaaagacgcggcaaagtcgcagctacgagacagtctcagttcggtaaagagacggacaaaacggaaaatgaacggaaaagaaaatggcaataaatggaaaaaatggaaaaacggcaaaggcgattctttgtccttcttcgttttagtcgccggagttatttccctttttttctgttcagtcgtacgttgaacatcatctgaccctcgacgaacttcgcgacgttcaccccgattcgttcattgacgtaatcagcccggagaagagcgacggactgtccagcgaggaggccaagtcagacacactttttataccgtaccctttcgttacggtaggaagcgccttttggacggaggggcaaatgttctggcgccgcccaagcgcatttccaacttgcagttgtttgccaaacagtttctgtacaagttttggcttctcctgatgggtaattagctttttctcatccctccctaattaattcccattaattgctcattaattatttgtcaggtgccgctctgtgcaccattttcacttatttgatcaatttgtaccacgggacggaagagttgctcaatttgtactgtgccttcattctgatcgtcatcgtcgtggtgatgtcgttcatgtcattttggcaggaacgcaaggccattcaggtgaaaaagagacgaacggaattggaaattcgaaattcaaatgcacaattattctcagattctttatgattttgggcttcacatgccatccaatataagtgccatttattagcaattaatccattcattaatcaactaattatttgttcactttactgctcggtgattcgagactgtgaggagaagagtctgcagccggacaatctcgtcgtgggtgacgtcataatcatacggtaagcggagaagcacagtccgtatacggtggatgaccctgggaggacggacatttcgccattgaaacaaaattaaacaaaatgtaaatgttttttcaaacagatcaggacaacaagtgcctgctgatattcggtaaggcttctctctttatcttaaattatctttcattttgtatataatttaaatttccctaaattgaaattcttaagcattctccagtccacaggggtcaaaattgaatcctccgcaattaccggcgaaccccaacccgtcgactacactcacgaacccgctgctgctcacatttcgctgtttgatgcacggaatgtcgcactgaggggatgttactgtacggaaggagaagctgtgggattggtgatacgagcgggaaagtatacggtgggcaactgtaatcctcctgtctgatcacttctcacttctgctcaccaatttggttttacctctctctttgcattacttttcctgtctctcactttttttgtccgatcattcttttctttctgttcactctttctcttcttttttcctttctgatcacttcttcttctcctctgctgctgatcattccttctcttctcagatgctcggcaatttcactcacctccaatcgaccgttaagctgaccgagactcttctgcagaaggaaattgccaagttcgtgcagttcgtttccatcgtcgccttgtcaatgggtgtcattttctttctgatcggttgcatcgttacaaagttagcagtcatttcgcttttcttactcagtcattgctcaatttttggtttgaaaatgtgctctaccatttcgtcaccggctttctcatcattatgtaaattgatggctaattgaaagaaggcaaacccaaactttcctccttcgacagagttgccaatgtcccccaggggcttccggcgatgctaatctcccaaatggcaatcatcgcaagaagattagccaaaaagaatgtgttcattaagaagttaagttataacagaatgccactaaaaccaaagtaagaagtgatcattttagttggacataatcgacgaattgggcgccgctacggtaaatcaaacacaaactgatcaactgatcagtatcactttcattcacctggaggtgatcgctgccgacaaaacgggcactttgactcagaacttgatgattctgacggacatgtggtcggttctgcacatcaagcattaattaattaattgttcccccttttccattttatgtataatcgtcgcttcttttctggtgcgtttttccctcttttggtgcttttcctttcgtcttttcagtccatggtgaacttaaacaagcacacattaaaatgatgaagcaaagtgcacagcgaagagagttggagaagcctttgcccgatttgttggcagtgatgtgcatgtgcaacaaagtgagggagaatggcaaatagccaattgaaaagggcaaatgtcggcaccaaaatgactcttggcaaaagttaccacttaaatgacccttggaaactgtcggcaccctaatgatccttggaaattgtcggcaccctcatgacctttggcaaatgttgccacttaaatgacccttggaaactgtcggcaccctaatgacccttggaaattgtcggcaccctaatgacccttggcaatgttggcaaccaaatgacccttctcccatgccaaaggcccatttcgaacggacgcgtcgttcgatgcgtcgtgtcagcactcagcgtgcgttggaacgtcaattgcgcgagtttaaaatcgcttctcgtcagacaaagacgttcactgtggtgtgagtattaggggggaatgatcagaaggtgccattggccacccgcagcaatcagtcgggccacgagtcggtccgcgtcccctccaacaacaatttgtcacaaatggaggccacggtgaccggcgaatggcccagcgatgacccggaacggtggccgacctcacgcaaaaggaccaacgatctgatcggcagcccattagaggtggcacttctccgttacgttgaaatggtcgccagcgttgagggcattcggaaccgatacaaagtcagactccggaaattgcgagactgtcctttttcatttttttgtttttctctttttcggtgtgcgtggaaatcccttttaattcggtccgtcgttggcaattagtcgtcgtgcgctgcttggcaactttgagtagtcaaagtcagtcaaaagatgcaaaaaggcctaaatttggccaatttcttacgccgtcttcatccttcgaacggagtttcgatgagagagcggccaaaaaagagacgacagacacagcaacagaagaaagcggcgaatttgtggtgatgatcaaaggggcgc

SEQ ID NO: 3346 - DNA, 1295 bp, Heterodera glycines
acgattcgtcaactcacccaaaatgcgccgactagtcaactcagcctaatgtaaacgattcgtcaactcgacgattcgtcaactcagccaaaatgcgacaattcgtcaattctatcaaaaaattatttcaaaaagcagtttccatagcttttcatggcgcttaacaaaatcaattataatactaattagactaatttagaaccaagaatacataaaatcacgacccttctgaacaaaaatttattcaaaaacttgcataaaactaattttactaaacaaaaatcaaaacaacaaaacgaatcaatatggtgatcatcgcgagattagagtaaacaaatttaaccggtattatgagtaatgaatgaaaaaatagcgactgggccaaatgctggtcgcgcaatcttgtccttaaaacggtccaaagtggcgaagtcaattgaaaaaatgaaggaggaatctaaggtgtaaaagggaaaataaaggctttgccaaatccggtttccttttgggtcactgacttttcgtttagttcgagtcttccgttgcaattgtcgccaggaaagacatatcgcgttgccgtaaatctatcagttaatcggttactaaataaaccgaagcattgttaagcaatccgaccattgtgccattgtttgattcttcttaccgcgtgtcggtgttcgaatcagaaattgaacggcctttggtcctgccaacggctttcgtacgcctccaacagatagttgagtccgagtctttgttggctgggaagggatccgcgagcggaaccaccgccctctaaagcgagtgaagcggaaccctgcaaaaaaatcaaaaaattttcatccaaaaacttaatcaccgaccttgattgcttttttaagtaaattttggatgagttgacgaatcgtcacattttggctgagttgacgaatctttgagttgacgaatcgttggcatttggctgagttgacgaatcgtcgcattttggctgagttgacgaatcgtcgagttgacgaatcgtcgagttgacgaatcgttgagttgaagaatcgaggcgaggcgtttatttaatatcgatatttcggtaatttttgaaattttaaagcaattttttttcaatgatttggcggaaaaataaactggggagagtgatacagtggcggaaaaaagtcttgactcaagatgataaaatttgtaaaattttaaatttcgactggaaatttagctgattattttttgtttatgtatatttattttaccccgatatatggggcctttcatataccacaaaatca

SEQ ID NO: 3347 - DNA, 2572 bp, Heterodera glycines
tttttttctgtttttttttgcattttacgtctttttagcctttggttgccgacttctacaaattcgtgcatgcagaggcagaagcagaacgtctttttcgctacatctgtcccagctgtggacatgtagggaaacactgggtgacagactgcccccgtcacaagggtattgaaaataattaaaaattttgaaataatattgaaacacaggagttgttgcctttcgtggtgaaatggaagtcgaaaagggcgtggtcgagactcgctggatgattggccttccgcttacgaatgaaacttgcttggcttgtcgccttcatggacatacgccaattgactgtggcatattgaagaaatggcgtaagtttccaaaggacaagaaaatttattttccacaaattatattataggtgagcagttggtgaacaaaatgcgcacggcatctgccattgtcccccgctttccgtcgcaaaatacagcggaaatgtgtttcgcttgccaaacaattggtcacatactgcaaaaatgtccgaacaaggttattgaaaatgatgtatagggacgtgaattttagtgaagaaaaatcccgaaatagtaaactaaaatagtgagtaaaaatgccaaaatagtgaagaaatagtgacaaaaagtccgaaatagtgacgaatagtgacacaattttcagccaaaaattgagcaaaactaatttttattcactgattgcattgcaaatgagtagggctgggatttttaagggcaaaaaaacaaaataggtacataaaaaaataatttttaaaattaaaattcttgccacgaaaatacctttttgagaaaatttttttcatttcttaggagtgttttttgaattttttttttttttttgtcgattcttaggggtgtattttttgaaaaaatttttaggtcgattcttaggggtgtattttttggttttattgcatttttgttaaggaattttgcccaaaaatgtcaaaatagtgaaaaaatagtgacaaaatcccaaaatagtgatttctagtgaccgataatgacatcagaatcgaaaaatttttatgcggaaatgcgttttttgagctcctttcttcaaatcaattgagcaaaaaaaatagttaaaacctaaaattcacgtccctaatgatgtattgataagattttatgtattaaagaaattggctgaagaatttcgtcagtaccgctacaacatgagtccgccgaatgtcgaaccgaattcgccatggctgtggaatgtccacacggagcgcttgattccattgaagcaccctgtggcgggcgttcaggcgtgccgcagggcagaatacggtattttgaattttggacatttctgctcacttggtgatttcaaaaactccagaaggcaaaaatgttggccgacaaaggcaagcggcatctgccagagctgaaatggatgagttgaaatatttaaccgaagaccaactcagcgagcgtgtcgctggtggccataaagtggaactaaactccaactactggctggtgcgcgcgcttcaatctgcagaatacgaagatgaatgaacaatgcaattggcatctgcccatgtttaacatttatttgttgtttttttttattcatcacatttacatgggcatttttggtcggacgtttatctccgataactttaactgttttttatctacgccttggtaaatatatcaataagtcttgttttgacccaagcggtattatctgccgacagatttttttgttcaatttaagttttttagaaaggcatttcattgttttttcctttctcacccgtcaatgccgacttttgcgaggcgagcttcaaaaagttcggacggagcgggagagaggggggggggagagattatgttcagccaagggtctgcagacataaattgcaaaattatttcataattcgacatgatgatgccaaaccataaagaaagcaacctcttttggcgatcgaaccgctcagatcctatgacgcgggcatcgtcaagggtcgtcgtgtgttggcgcaaattttgtggaacggggagtcggaccatccgccgaacaatctcctaggccgagcagtttgtgaaacgggcggccgaactaggcgattacgaggagagctggacattaagcacttggtagccaatggagagggcaaaataaacatttccaagggggtgaatcattttgattattctcttccagtggcatgggttatcagttccataaaacaaaaatattggattgagttcgaatttgtctaatgcaatgttctttattttaaaatttaaaggtatttgggtgacacggtgaaataccaacgtgaaaagtcggcgccctatggccataaaatgggcgaattgtccaaggacatgcagaacgcgctcatgtagggactcaaagcgtgcgacgagggcgacattttccagcgacttaggtatactcatctcgcggtttagtaaaccacgtttgacgcgttaaccacggtttcgttaatggtttagccttaacgacggttaaaaagggaaggacgagcataccggttaaagattcttaa

SEQ ID NO: 3348 - DNA, 2242 bp, Heterodera glycines
gcattttctgcgctgccatttgtttcattctttcggccgccatttctttcacgttcggtctgaacaatggttgcgatggtgaaagtgtgagagtgccattccttaaagtgtctttctttgcattcgtaattgggtcaattagatataccgttttgacttgtcaggaaagtgatgttcctcaaaattcggttccatcggaccaccgcaagccaatggtcggcgaattgtctcaaccacgagcggtgcaaattctcgcgaatgttgtgcattttctcatttatatgacgggatttgtttgctcgaattcggtggacaattgagcaaagaaagttttggcacaatttgatcaagaagtgtctccgactaagaaaatgccatttcgagtgccatccgttgggaaaaaattttgttggcacacaaatggaattggcgagaaacgacgcgttcaatgagttcggataccaatgcattggccattctttgctgctttttcttcgcaacgaatgaaatccatcgacgaatcacttttcgagtgcttaaacaatttactcgaaaaactcatccgaattttaattttttgactaactgcaaattgttgcgaattgtattttcaagtgcaatgccggcaattgctgtcaattccgtcaaaacaactttttcaagcaaatgctcccgcatggacagcaactactgatcagtgttgttattagcgtccagcacggggggaactcctccaatttggccaaacggtttaaggaccgattggaatggctctaaaatacaatgagaaaatgccaatctttagcaaaaatataaaataaataaataaggccctaattcatccaccgaaagacctgacgaatgaaaaactcggcgatgcttcaactcacatatttttgcgtgcagttgcaaaagacgcgccgtgcaattcaatgagctccttcaacacggggtcgttcacatacgcaccgctgtccttggcgaaacaagaaaagagacggcgttcaaatggtcaggtcgaacggcggaaggattgttgcagagaaccttgagcggaaagaatgcaagttaatcgaatattgttgtttcgaaatcattggcatgcctttggaagagtcaaatggtgggccttttgttcaatccaatagcattttgtcctttgaattgactcggcgttcggtgcgtgctgggtaaaaagaaattgggaccatcgcgaacatttatcaaattggggtcggtggcgtccatttccaagttgaattggcgaatgaatttcatcgcctcgtctattgagtcgaaggagagatattcgacaaaagtttcaattgggaaaatgttttaaggcatgcaaatcactttaagagcattggaacggatgagcggaaaaaagtgatgcacagacacgcctaaggcaaaacggagagtaattaattagcaataaataggaggagaagtcagtcaattaggcaacgaacgacctgaagaaaagtggtttgaagacgtacgagacggaagaaacggatgtaattgttattctgaagggcactggagagagagagggcgagttgcacttgcggattggcacggacttaggagagcacttggcttaataggaagggaatgaaccaaaaactcaaaatttgaaaagtagaatttttgaaatcggacaagttcaaaaggatgtcgtaggaacggaattcggactcattgacacagaaaagttgtttttttgccaaatcgtcatacatgtgccgaagtgtttggagacttttcgacaaattctctaaagaatatgcaaaaaatatattaaaactggtagtaataatacccgtgttcattttatggtcaaaaagatccgcttcaagttcaacaagtccaaaaaatgcaaaaaatgtgaagccgagcgcatttctcaaccaaatccaaggccatttcattgtttaacatttgttgcgttatatcctatgagcatccaatgaggtttggtaataaatatggggtacttatgtggtttacagaccataaaaaaaaaatttttttaacacatttctaggtggttttcggggtcgctgatcacgaatctgacatccattgcgacgaattccgaatcccggactcgaattcgaacaaaaagtcgaaaattaaaatttaaaaaaaatcaatttacggtgcgaaaataacaaaagttcaacacaatgccatgacaaacatagacaaaaatcacgctcgcatcgatacaatt

SEQ ID NO: 3349 - DNA, 4143 bp, Heterodera glycines
aagtcgcagaattgtatcgatgcgagcgttgattttgtctatgtttgtcatggcattgtgttgaacttttgttattttcgcaccgtaaattgatttttttttaaattttaattttcgactttttgttcgaattcgagtccgggattcggaattcgtcgcaatggatgtcagattcgtgatcagcgaccccgaaaaccccctagaaatgtgttaaaaaaaatttttttttatggtctgtaaaccacataagtaccaaattttgtcatcatccaacaattacttttctgattgctcttgtcctcgcccaaagaaagccgtaccatcgcgccaaatcattgctcgaagttgtcggaatttcgcccgcgatctgtcattttaaagccaaataatttgggaaatgcaatgcgaacattgaaaatgagataatccattgtcagttgcaatattttcagcggacgaagctcatgggcgagtggagtatcctaaaatggtaaaagtgaagagattggaaatatcactcagtccaaacaccgaattcaatttacaaaaagggcaccggatcagcagccgatcggctgtaatccttgaccatcttttcatggaccatttgtccatgcgcattgcattcgtaaaagtgcactgtcttttttgcatctcgcatatatcgctctttctcaggacacatgtcgggacaggaaccctgaaatagcggaattggttagttaagggttaaaatgataaaagccaggaatgacttgagtaatctgtcggctgcccaattggtcagaagttaagtcacgcaatttgtacaaaatacatctcggtgttgtaaaaggtaaaatttgtcggcatttgttaagcacgttgggccaacaagctctttcagaccgttaactttaaaatttaaacgaaatttaaaaaacttattctgaacacacacttatgtcctgttttgtggaaattgccttcaactttggcaaaagacccacaaaactctctccgccgctatgcaaacgcttctgtcgcttttgaagaacagattgaacgggtctattttgaaaccgcctttagaatttgccgtttaacattttcaccaaattaaattagccttttaacctcgaaagtgtagtcatatccaccacgagatagaagacttttcccgcgatttgttttggtctctgcgaatcggagaagagccatgagccaatgaatttggaaaaaaaacgaatagagggaaaaacggcaaatgatgaacaccagcaattacaactcgagaatgaccatcagcattcgggaatgcaaaacaattcctctccaaattctcttatcaaaatgacctcccaagaaaattgaccacccgagataaagtgaacgaccggtcttatcactacaacggccaaagtaccactgaattttaccacattgaaattaagagaaaaaatgctttatttttactacacgcatttattaattttcattaaacatagtgcattttttaaataaaaatgacttttcggatcagtttgaccctgaggcacggcttgttcatgtgaatatataataataataaaataataattttattctgtcgaaatcggtcactgtcgaaatcagccactgtcgaaatttcctggcacgatttgattgacctggtcatttgaccacgaaatacgagaaaaaggtagcaaaagaaaatggtaaattttctgctggagcaaccagcagcagggatgtgccgagccagacaaaatccgattccgattaaatcgccgattccgattatggccaaaaatccgatacggttttaaaaccgattacgattatggcccaaaatccgattaattgcgattccgattacgattccgatttttttttaataattttttcccaaaaattttattcataatcaaaatcataaattttaagattgtgatgcaaaaataaaagtttgtccacattctcaggcaataaacgttttctcagatctgtcacaatcaacccagcggtggagaatattcccagatatttgacatttttgctaaataacaaaaaacttgattatatcggggagaattaatccggcactgctttgtgagaaaaatttaatttcagtcattatgttaaaataagattaaaacattcgtttcagaaaacattttttcaaaattcattggtattctcgctaaaaaaattccttcaaaaggtcaattcttaggggtgtaataatcggatttcaaggcaaaatccgattacgattatccgattccgattatggaccaaaatccgattaattgcgattccgattacgattacgattccgattcggcacatccctgaccagcagccaccgttttttaaccatcaactatgttcttttgctataccacaaactttaaccacgaattttttatttacataaatattttgcttcttttcatggaaaacaagaagtaatattttgctttgaaaatgatcaatagagaatgatcatgaaataattgttggccgcatttctattttttgttggtcgctaatattgttcgcccatttttcattataaataaaccaatataattttgcatcttcttcttcgtccaaagtcaatatatcctttcgagtaaaaatattcaaaataaacttaataattttatataaaaattattaaagaattattacatattttaatttactaaaaatgtctttgttctccaaacaattgtctgagcaaatcgcaacatcgattaaagacaattacgcaacattcttcccaaacagcaaagaagctaaatttgcccaaaaggcaaatacttttgctggaattcctggcgccgttcaacgcctctcttttccccgacgccatccgcttcatcaagtgttgacgtggatttggaaattcagtccttgactgaagctgggtttgaggtgcctcaaaagaataccatgggttttcattccctttgtagcaagtgccaacgaaaatgatgaacacagagttcggggctccattcaaaaatgttttgggagaaattcaattgcttagccaagcggaaagagatggagaactaataaataaaaagatttcggtaatattaaaataatattatttaaatgtccggcaacatttttgtaggttaaacgaaaacggtataaattttttatgccaattatgccaagaggatttgaacccactgcatggcgcaaaaggagcacccgttccgttacagttgcaaattataatggcactgcagtatttggccagcaacacatttgaaattcatatcggaaggcatatggagtgggccaaacaacagtttcatctgttataaatagagtcttcgcatcaatagcaaataaaagcggtcgctttgttcattttcggaaggaaataatgaattgcgaacaaaaaccgatttttacaattactgccaactgccacacattttgggatctattgattgcacccacataagaattaatgtataaaaattttttataaataattttgttaaaattactaaacatagaatcctggaactgatgatgaacaatcatacgtaaatcgaaaaggattttgttcaattaatattcaggcattttcttattttttttaaatattattatcaattttaagggcatcgttgactcaaaatgtgtatttataaacgtcgatgtttcatggccgggggcaacatatacagtcatggtcataagtgttgtcccatcatgctttgaaaaaaataattgcgtataaaattgtcattttccaatttcaacagataagtagcataccattggatagcattttttatgggctttccaatgataccatatttgcatttgtgacataaacatttatttgatttattttaccatattcacaatttgatcaaaatataggtggtcaaaagtgttgtcccatttcattttttggcacaattttgcagtccaaaaattctgaaaaaattcctgctaaggtaactttgagtgctgatcaaaaaagtcttttacagcaacttggtccgatcactctttcctggtgatctgaacaccccaatatacagtgaaaaacggaaaatttttcgaaaaaaattcctagggggttgggaaaatttttctggaaattttaagtgggcccattagaaa

SEQ ID NO: 3350 - DNA, 2346 bp, Heterodera glycines
  unsure (1)..(2346): unsure at all n locations
aggctttatntgggaactgcaaacgctcatattttatgctcccccgcgatttgtcttcatagacatttcgtgttctttcaagaaagaatctcacttggccgccaatagcattgctattgataacacgaccaatgaggcgatcatcgccaagttcttccagaactatgcgtgtgccattgatcagtccttccttatcacttttattgataagaaggacgacgacgcatccgactttaagccggagactgtgcgggggcatgcccgagtctgtgcgccggttcaacgcagccacttcggactcgatctcatcgatgtccagtgggcggtcgtcaaggggcttatccgtggacaagtattcccgcacttgacctggcacattcgccatcatgatctcgttgacttcatcacacgtgtcaatgtgcggagcgagaatcaaacgattgagcagctctttgtcattgccaaggagttgttggaagttaggatagacataatctatcagctcttccttgctcttaacgaggaactgcggaggaatccagaagtgctctccggtttctccgagcccgatttggcggcacatttgcaagtacgcttgctgaccttggcccagtctctggttgatggtcaatttcatcgtggtgaattgaccaaacaacggagacgtttgaaaacaggctgtcacctgagcggttaagccttcatgaggcacgaccggcagcgactgtttgaagtcaccgctgaaaatgaccgtttttcctccgaagaggagatccttgtgctggcgaattgccatctctttgcacactcggtcgatgacctcaatcaccgtgttgtgaagcatggtgatctcatcaatgatgatgagttgggcctcacgaatccgacgggcaaagaagctctccagcggaatgcttgggagtttgtctaatgacacttctctacccagacgaaacgtggaatgggctgttttcccatatggcagcaaaatggctgcacacccagtggatgccgtagcaagcactttgtaggtgtatggggcctttcgcaagcgcctaataatttggccaaacaggaatgtctttcctgtgcctccatcgccgtatatgaagaaacggcgggggacagtcgaatccctagggttcgactgtattgccaacaaaacagcatcaaagaccttctgttggtcgctgttaagtggcggaggggtatttggctgtggacgaggatttggttgccctggaggcaaattcaaatcatcatcgccaaagaaaaactcttcaattgccgcgtcagtatttttggcaattgaagttggcgggtctggcaggctaaaatgcacacagcttaagttaaagcagctgtgcagccgccaatcaatgtcggctagggcttcaagctctgctactttatgctgtgccagagtaataatgccttgcggattgtacatttggtctttgtacttgttccacaattctatggcattactcggctggccatagaccaggatgctcacaaaaagccatctcatctgatctggccagcgcgacagagctgcctccgccagagttttgtcccaaattttgtcgtcttcaagaagaccatgcattattgcagcctcagtgaatgaggtacaaagcaacccattaaccatcttaagatggtctgggtctccaggaaagtgacgcataagtgaatagagcgcgaacctttccgggtccgatgggggtacaggaacaattcggccgataggtggccttttaatttgctgccttttgtacaggacccatttgtcctttgcccatcggaaccgctctgggactttttcgaaaagaatgtccttaaactttggatcattcttccactcattttgccattgtttccaataggctgaacactgcgtttctggcagttcgccttgctggatttgttgagctttgctcaccagctggaatgccctatatacaatgggctgttggtttggcaaatgaattgccaatttgacaacatgatgcgaaagacgggcaaatggcattgaatgaacaatggcatatgcttccgttgcaccacggaagttcatcttggcatattgagccggctcgtcaattttgattttattgccggactcttctttgcactcgacataacaatgtcctggccctttaaaagggtacttgagtgcgtatttaatatttgctttgttaccatatgcaaacagtacattatggtgtactcggtaacgtagcagaatataaggattatacggcacgacatgcgagttgtcgtatattaagccgtttacctctaattgggcaccaccatcagttggtgaaggccggaaataca

SEQ ID NO: 3351 - DNA, 4190 bp, Heterodera glycines
  unsure (1)..(4190): unsure at all n locations
tcagtaaatacttgaccgttttgntgtaaattctctttgaactcaggccatttccctgttgttcgtgaaagtaatgaagagacgcgctttcttcgcgtcatggcaccgtgcaaaaacggtgttgcaatcttcatacattttcttccaatattggagagaatttacgttgtgttcggaaagccgaacaacactgccaatgtcatcaacagttttctgttgtgcattggggttttgccgtgcttgctgcctgttgtattggttgaccaaatactgcagcagattttttggagtgctgatccgcagatccatgtcaggtctacgcaaaaatgttgctatttgccaatcaatttttgcagcctggtcaaggatccagcgctgaccaagtcctccaccacatgaaaggatgtggtggtattgcaactccacattttcatcccttattgcgagataatacttgcaataatctcgcagggagataaattgtttggatttgtcaatccgccggtgctgcgatgaaacagatgctacagattcagcatctgaatctgcgactgaccccgcatcagatgatgcaattgactgagtctcgcacgactcattatctgactcggcttccgagtcaaataggccagatgcattctgagcaccttttcgcttacgcgatggtggcttagcatatttaatgccagttgtgtatccatcatcgcccattggcttgattaatggatacgtaagactatcagtccacggactgaaaggagcaatttcatttaattgcccttgtttgttctctacccaaattcctttgggcggaggagcaccagtggggtccgcatgaatagcgaacatcccttcacccgtagaaggggtgattatttggtgtgggtgcaattttgggtctttcagaccagctggagccctgcgctcattcaacaaagtcatgcgaaagaagcgaagctcttccggagtttgttgttggagaagctcagtgagctgctcacgcgcctgcttatatgcctgcgcagcaggatgatgcaattggatcatttgttctaagatctcaagagtctgctcatttagctggtgaccctgcacaaactcatcttcgtttgtgattttctccccagtaaacctggggttgtttcgacgctgttccatagcctcgactgggtccagaatgtacaactggccaaagccaggaatctgagttgtaccagcctgcatgctgcttatgcggcgatggaattctccgttaagaataacggccatcggaccgccagcagggcttggtttgttgccagcggaaacgctcgcaaattggaacaggttgttataacgcgacatgtgtcgcacaaattctttcccttcacgggattgcttattccccacaatcagctgtttgagctcatcaggatgcgggttaagcattggcagcacaactcttcccttccggcagcaaatgctactgtcttcatgtgagaagagatgtgcaccgcaatcggcgcattttttgtcaccgagtttcccggagtcacaatattccgggaaatgtttggctgctgctgcagcgcattgccaccccttgtgaaatgcagagcaacgccgtgtgatcggcgttgccactcccagcgaatttgctggcggggggcgtttcggcgccggtgaaggcgaacggctaacagaagctgaaagccttttttgaacgcgcattgatcgccttggtggcgtcttaggtctgatgaaaattacatcatcagcctgcgcgattggttcttgctggacaattgtgtccgcaacaacaccgtgggtgtcagcttgattttcgccgatcactggtgcttgcgcaagaacagcagtatcttccgaggaaggaagtactgctgaatcatccccttcaattggcactatgtgcttggaggaagtttgcgctacatccccattgtgatgagacacaacagcgaaagatgttgaaacaccttcccttggatgaaacggcacaatatcagagccgtaaagctcatttatgtgccataaaatgcgcttcttctcataattgatgttcaagtccggcagaacaaaagtgcaattgttcataagccaggattcagcatacaggcacacaaagtacccgcagctatttccatcgtgttgtaccgtaagatttaccgcattaaaaatcccggtcaacactgctgacggcaaaatgtcagaaatgatctttccaattttatccgtcagttgccaatccaacctgccatagggggtaggcaaagaatcggcaaaatgagtaccccactgaacatcatggacaatcagagtccaatgtccagggaaatgcactggcaaaagtatgacttctgccggaacattagggttgtacccaaatgtcatatttttgtaaggcatgactctgtccaagccatttctccataccattgggtcaacaacgaccacttttcgttgtgaaatgctagccaaatatgctaaatatgtggcagcaaaaccgtcattgagaaactgagtcagatcattccaacaggtctcaatgtatcttgggccagagctcggggcaagcgatgtttcgccatcacgttcgtaaaggccaattgctgcccatctccaaattttacaggcaaaattccgcgtggttgcgaaattaatttgcactgtgctgaaatttattttttcaggcacagtgtgcgaggttgccgaaattggggcatttacaagattgatatccatttcagagcttttgctcatggaatcactgagtctgcctcggcctgggcctccaatttttttggcaggtcgccctgcacgactttgagtcgaaacaggtgttaaagcaatagcttcattggcaaacatgggttggtcaatctcggcgacctttcccctttttttgcacggcgaaccctggtcactttgagtgagcacagtttgatgtatgtcaatgagagacatactttcttgcgtagccaagtttggcttcgctccggctttcgagggcctgcctctttttttacttccaatagaagacgccggcgtgcttatttgcaaagcacttaagcttggggtggtggtgccccggagagatgccgatgcctctccattcccatctgcactcccgtctgagacgggtgagttatcccgactgacagatcgctctgcctgtcgccgatacacatcttgcttcttctttttcaaattgcgttgtttagaaggcatctaaaacaacaaatcagaaagtattacaaatgcggcaaaaatatgaggtaattaaccaataaatgcacacatatgttaaaaatttattaacaaaaaatgcacaaataaaggtcaaagacatcattcttcgctgtggagtgtagtcgtccaatgctgaaatacatcagtcagggctcacacatcccattaagaatgcagatgcaaaaatgtccggtccataacccaaaagggcaggaccagccacaatttttggtgcgaaccacaatcccccttagggataggtccagcgacgacttttggtgcgaaccacaatcccccgaagggttaggtccagcaaccatttttggtgcgacaaatgcctcggagtgccagtcagcaaaccacattggtacgacaatgcctcgaagggccagtcaacgaaccactggtgcgacacattccccgaagggactgtcagcgaaccacattggtgcgacaatgccccgaagggcctgtctgcgaaccacattggtgcgacacaagccccagagggccagtcatcgaaccgtcttggtgcgacacatgccccagaagggccagtcagcgaaccgctttggtgcgacacatgcccgaagggatcgtcagcgaaccacattggtgcgacaaatgccccgaaggcctgtcagcgaaccactggtgcgacacattccccgaagggactgtcagcgaaccacatgggtgcgacaatgccccgaagggcctgtctgcgaaccacattggtgcgacacgtgccacgaagggccagtcagcgaaccacattggtgcgacacgtgcctcgaagggccagtcagcgaaccatatttgcaaaaaataaaatataaatgtcaatcttgggaattaataaaggacagaacaattaaaaatgccaagaatttgcaaaaaagaattattttttaatttggcagttttaattgttcttgagt

SEQ ID NO: 3352 - DNA, 984 bp, Heterodera glycines
  unsure (1)..(984): unsure at all n locations
ctgaggacggtcaaaaaataggagaatgtccatccaaacatccatgcaaatacaactgaaattttgaaagcaatcaaaaaatataatggaagactaaaaaaaaagaaatttttgttaaaatatggcgatagatcaacaaaatgtttttgcaaaaaaaaaaaaaaataataatttgtgactattttcttaagtaaaaaattttcctgaactccctccctatggtctaaatgcccgaaaaacatgctttttggtgggttaggctaatttttgagtttccatagcacttattttcgaggtttttatagcctaaaatccataacaaatttttaaaaaacataattaacttattttggcgtttttctgaaaattattaacaaaagcaatcaaaacgaaaatacaccctagaaatctagccaaaatttctaaaaattatacccctaaaaatcgactctagaaactaaaaaaaattcccttgtatttttgttaaaatatggcgatagagcaacaaaatgtttttgcaaataaaaaattgaaaaaaaaaaataattgtgactattttcatgagtaaaaaaaaagtggcataaaatcgctaagtaaaaaaaagagtaccctaaaagagcattttttatataaaaagtaaatcaaaaagtgggttgaccagtgccgtgcgcggccaccgaacgtcgtatttagagtatggagaagccagaaaaaatatgtgcccacaattgccctccggcttccgcaacggatcaaaaatcagctgcagaaattcggcaaatgccgccggcgacacattctccagccgggcctcctgctgctcagattcgacaaagccttgccaggtgaacattgtggcgaagatcggggagtacatggacaaatactgaagaaggggggggggggctttaaaataaagaaatattttatttttctggaattgtacaggcccnaaggggtcgaacacgaccctcttacgaagta

SEQ ID NO: 3353 - DNA, 3002 bp, Heterodera glycines
tcgcattatatttacgcgctttttctgttgtaattttctccccaggtgtgtgcttaaaaatgctcataagtcatctaacataagtgggttttttttggctggacaaatagggatttacgaaagaaatatcagtcaaaattgatgttgcaaccggtttattcaattgctgaagctaattaagtcttccggtaacgttgcataaaatttgtgcaatgcaaaaatgagggaaaactgatgcgaaacagatacatttgcagccctgtcgcagtcacgctttccttccgttgcttcactggcgccacccaccgttttgatgatgtccaccgctggtcaaacgcccgtccaccgcagccgacactgtagcgccggctcaaacaatgcgcagcccaacaacagtcacgaagcaatctccagaatggacgtggtttgtgcacaagggaccaaccatttttgagggtggaaaaatgatggaaatggtgccatcctccgacgctcttttaaaatgcctaaataaaatggtttaagctagaggtagagcgggaccgggaccaaaacacggacaactgagtaccgaggtcccggttttgaccgggaccagtcccgggttttttcccggttttcccagccaaaaatccccggtcccgctctactctagtttaagcaacaattcatttggtcttttaattcagttaagtgagcggatccgtgacttccattacaacgaggaccaaacgcacgcacagctcaatcgaaaattgcaattacgcgaccaactttattacgcaatttcaccgattttcccaagtacaatcgaattatttttgataaatgaagcacaaaatgctccgttctgttgttcagtgtgcggactttacattgtcggctcgtcactgaacggattcgggacgaagcggtcggacttggacctttgtctgatgataaccaatcgtgatgtgagtttaggcattaataaagggcagaaaagcaaaggaaatgtccagagaaattgggccccaattctcttttaaattcattttgtcgtccgcagattgaccaacgcactgatgcggttgttgtcctgtcgtcggtgatgcggacattggagagcaatcaaattgtggccgagcagaatctgatcctggccaaagtgccgattctacgcatcaaatttatcggcactttccacgacataacggttgacctgaacgtcaacaactcggtggccattcggaacacgcatttgatgtgttactacagctcttgtgagttatcttcattaaacggctttttgtcaatccccgagaggcctgttttttgaaaaccaagaaattttgctttttcgttggtctaaaattcggttgcctcggacagaccctatggtttttttgtttgtttgttcatccttccattctccgcagttgactggcgtgtccgaccgttggtgatggtggtcaaagagtgggcaaagcgtcacggcatcaacgactcggcctgctcctccttcacatcgtactcgctggtgctgatggtcatccactatttgcagtgcggtgcacagccaccggtgctgcccaatctgcagcaaatgtacccgaaacggttcagcgtacgtgcggatgtgcgcacgctgaacgtgtcgttgccgttcgagccaattccaaccgcgatgggctggcagttcaaggacgacgcgacgctcagcgagttgctgctcggcttcctccgttactacgccttccaattcgagtgggactgattacacgaagggggaactcctcgggaaacttagggctttattgcggatatttgtgccgttgatgatttttagcgcccggttcagtccccgttttccccatcatcaattgttaacaactcattcaatagtgtgttattactgtccattcttttagctttgacgcggacgcgataagcattcgaatgggcaaaaaggtcaacagggcacaggtggcacaaaatcaagttggtttttattttctcatttgtcagtgtgttggggttggtcgaatgtgcctgaatttgcagtcgcccttcaacacgttgtcccaatggcattgcatttgcattgaggagcctttcacactgtcaaatgccgctcactctgtgtacgatgagcgcatcttccaggtaaaccaaaatctaccattttctcatgttcactctttgctcttccaggacatcaaaaaggcctttgtggacagttaccgcgaattggacaagcacagggacttggaccgttttttgggaccgacggttgaggcgtcgacggcgccgttgggccaataattttgtttttgatgaattttatgtctttgttctgtctgcaccccaccacgaattactggcgatcggagaaaatatattttgtcttcattttaaaattgtctatttttgctacggaatgaacattttaaattgatatttcatatcgctttttgttggtcaagctttcagtgcagagagtcaacttacaattagatcaaaaacagtcgaaagtaaataaaaatttaaaaatcagtgtttgattggctattgcgtcatgacggattcaattttttctacataagatgctttttattcatagaccctggatgggaacggagacgcacttgagacttctcggcttagaaattggctgcttaattcagaatggcggcattgctttttctttctctatcatttagctcttcaatttccccgaaaagtgactgagttttggatggccaaacgttcacacgtttatgcggactcggcacgagtgtcggaattcaaacgggtgtgccgtgaagagagattgggaatccaaaattcacgacccccccttgaggttggcgttttatactgaaatggacggtaatactggagaattggtgtcccggcaaaaaataaattaaaaatttttcttttctaaaagtcgttaaaacatgtttagggcggttttctgggtcgctgatcacgaatctgacactaattttgacaaattt

SEQ ID NO: 3354 - DNA, 4232 bp, Heterodera glycines
ctgctcgccagcccagcggacggaagtcaatgcgcaacgcttcgccccgacgcgccaaacattcgcacgccttacggagaatgaatggcacaaaaattgttttttaattcgaaattatgccatttgctcgcctggtccatgccgccgccctccaagccgacaaagcgttccgcgtgggtcgcaatttcggccaattctttctgcaaaaaaacaattcgccaaatttaaaaagagtaacgggcattgttcccaaatttgtagggatgtgcgagaaatgatttttttaccgagaatcgagaccgagacttagaaatgaccccgagggacgagactgagacgcgaaaaacccgagaaatttctcgagtcgagactctcgcacatccctacaaatttgctcaaatttgcgcgtttccttccccgctttggcacaccttcgaaatgtgttcaaaaatttgctgtccaccaccaccaccaaagtcggcactttgcacacaaagcgtggccaatgccgcggcacagaccaatgccgaagagctgctcagtccggcacttggcggaattcgactggccaccaccgcacgcattcctttggcctacgcacaaaaaaacaatgaaattttgattattttcgaagctaaaactctttgtaaggcttctgcctctgtgttgacaccctcccgttgggccaaactctccaaaatgccgcgccaacccgccaaaaaatagtggtgccatttgggcacggcgccattggaggaagcgccggaaaacgaatcggaaatggccaaagtgaagggacttaaaaggaaattaattagtaattgttttagaaatatttaatactttaaaaaattttaaatgcccttattgggatttttgtgcctttgttttaagtcagtgggcggttcagtcccaaaggtatttagccacttcagttccgggtctgtaagtcctcaggaaatgttcgctccaagattattttcaattttacaaatttctgaaaagggggggaggccgagaagtgtctaaatggacaggtgccggctggggaggctgtgccgttgcgctggtggacaaaaacaaaagcgctcagttggaagcgaacggactgaatgtgctgttttggagcgaaccgtgcgaaggcattgaagcttttccattcagtggatgaggcgaaaatgaaattcaattgaacaaacagaaaacgacagaaatgtttctaatagctgtttgactccatttttataatttattgccgtaaaattaacgaaattaacgaaatgaaccgataaatagaaaatgcaaagagatgaactcattttagcgtatattattcacagaggaaagaaaaaacatttaaatgtaacaaatctgcacattcatcacatgacttccatctcaatggacgcgtcttcttcgtccgtcatttgttcgctttggccagcaacgcctccgccttcgctaccatttcctcgtacgcattcttcgccttcaccaatttctgcgcgacaactgcgccctccttcagatcgtcgatgtttttactgacactcttctaaaaggggaataattttggaaagatagcaaaatttaaattttaaaatagtgtcaatggcatggctttttgggggatggatcatttgtcttttggtcgaaatgaaaccccccataatttgtaagaatgtttttatgaccaaatttttaggttttatcaaaaatggagggtgggacagccttacaaaattacccatattttgcccatttccaaaatggtcttaaagccgtacaacgaatgtgccgaattcaatttgccaaattggcaatcattaagaattggtgtcccgacgaaaaaaaatattaaaaatttgtcgggtattttttctaggctaaaaaatgtgctgatcacgaatctgacaatgagctcagattttgaaaatcattgattttatctaagattttttgtcaattacttgattttttccaaaattaagaaaattagtcggacataaaactgatactaaaaacagctttcaaagatctattaaatgtatggagaagtcaagttttgaatttttacgattttttgaaattaattattaatccctaggggtcgtatgagacgggggcctggggttcgagtccgcttggttgcggtttattttttttatgacacttgatgaaaatcagacaaaatgaaggttcatgcatagtcagagcttagattcgtgatcagcgcattttttaacccaaattcattgctaaactttttttaaaaataatttaaaaatagataaaatcaagtaattgacaaaaaatcttagataaaaatcaatgattttcaaaatctgagctcagattcgtgatcagcgcattttttaagcctagaaaaaataccctacaaatttttaacattttttttcgtcgggacaccaattcttaatgattgcctaaagttgggcccaaatgtccgtccccgtccacccacgtacctcgttctcgtcaatttccaactcttcgctggcgggcgcaatggacacgacggtggctcaaacgggtgggggaaacgaaattttggggcccaaccgcaccggcgcacagaaaggagagaggaaagagaccaccaaacacttactgcttatgtagtcgctgatgttgtaaaagcgcttggtccggtcaaatgggacggggacctaaagaaatttatgaaaaacaaaacggaaaaaacggataaaaaggcgtcattttccttaaaaatcttcaaaatcggggcatttggatttgttttaaccgaatgttagcaatttattgagcaaaagccaaaaaataagctcttttctagaatggactgcaaaaatggcttcggttttccattagaaaataataataataatttttttgttttttggttttctcgacacaaaaacaaatagaaaaaacagccaatcaaatgggttgccagatttgcaattatctttgtagctagaacaaatttgcaggaatttcccaaaaattcggagattgcaaagaaaagagaaacgcgcccaccaatcggcccttcataaaggtgagcaaagtgcgccgaaatcggctcaacatgcacaccaactccacgtgaaggacggcaacacccggacgcacaatccgtgccaaaattctgtccaacgggcgaaggtcggcaaaaaatttgcggcattgcaccgcgggcggaagcgcgacggatgccaccaaatcaaacgggggcaaaacgtcgttgtcactgttggaggtggaaaaaaagttggtggcagcgtccaattggggcggtggcaatgtcgcggaatacgactgtggcaactcgttctaaatttgttttgctccacttaaaactgcaaaatttgcagtgattttgcgaaaattccaacgatttccccgtccccactttcgtcccattctgctgctgacctccgtcactgccgctgttttcgcgttgggttccgtgccgagcacatgcgaccgaccgacgatagcgaacagtcgcaagtcgccgtcgcaattattttcgtctttgtgcaccattgacgaacgtctcccaccgccggaatacatttgtaggctgccgatgtaaaaaaaggcttttgagaattaaatttttttcccttttcacagcaagtcaattttggactccgcttcgggtctgtatcgttttggcgccgccgttttggcgccagcccaagttttcggactataacttttttatttgttaaccaaatccaataatcttggtattattcgaaagcttaacatgtttagaagatatttctaagctattgcttcgcgattagacaattaccaaaaaagttataacatgaaattgcaaaaaagtcgaaaattttgaggttttttcctaataacttttttagaaatgaccattcctgttcgttatttgtctcgttcataaaggttgccattcggtgaatgctgacctccgctgacaattgcttctttaaaattaataattattaattctcatttgttggcgctgtgtccaccttttccgctgctgacaatgcctccatccgttggaacagttcggcctaaaacagagaataaaaagcggtaaatctcccaaatttaaaagcaatctcagaggctctggcaggatgaagacattgtgccaattcaaaaaaacacatttgcctcaaccgacggcagtgactcggtcttcttcaaactttgggccattgcgcctccgc

SEQ ID NO: 3355 - DNA, 2883 bp, Heterodera glycines
tgaggttttttcctaataacttttttagaagataaaatttttgtttgttttttgtaaggctactagagcttgtgaaggtctttcgaatgataccaaaattgttagatttggtcaacaagaaaaaaagttataataaaaaaactaaggctggcgccaaaacggcggcgccaaaacgacccgttccctccgcttcagtgtcagacaaaattatatacataacgccaaataaccacttacgtagttttttttcgcgttatttcaaaatttacacaggtaaaagccttttttgtattttttttattttgatcagccataactcgctttttttttattttgatcagccataactcgcttcattcccaaataaactaaacagatttggtatctaaaaaagtttttgaaaaggagaaccttttttctgaacgaatgctaagcaatttgtcatctaaggaaaaaaaagttgagagtttcaattttcatgacgttataactcaagtcataaactgctgatttcaatcaaaacgctaaaactatcatgaaatgcggtcataatcgccacccaagaagaaatatctgaacaagactttatggtcaacgacaacagagcaccatcatcaacaatacgaaattgacgcatgaaaacatcaaaatcaacggtcacttctttttcgtgatgcgaatgcgagatttcacgaagtgctgggacgacggaaacaacctgcgagatcattgtagttcaaagagcggagacgtaagtctaaaggaaaaagtaagaaaaaggtgtattcagcagagttcgtggatttgagtgaccgaagcaaatattgggtatagtttggtttgtccactcccccccccccttttttaaataaaaattttcaaaaaatcgtgttaaacaagtttttatggggttttcgaggtcgatactcatttcgacctattccggaacccgtacctgaattctgttcagattctaacataaaagtgaattttgctgcaaaattaattttgatttttgttcgaattcgggtcatgggttcgcaatgggtattagaatcgtgatcagcgacctcgaaaaacaccataaaaccaaaattaaataacccgctattcggggaggggcatcatttttcagatattttcccatttcactaaaaattttgttttcggtttcggggcattagccccctcccactacgcccttggggataacaataattggggccgcaacgacaaaacttacaacgagtcgcttgcccaaacatttggacgtcccagtgttctgacaccatctcacatagatggtccacccgtttttcaaaaatggctgctggatcggtcagccccaagtcacgaacaatctgaacaccgacgctcgagtccaagccgaaataggcgctcaaagctaaaatttcaactgcagaaattaggcatgtaaagcatagaattgaaatagcgaatcagtcgtctctgcccccttcccctcctctgcccgacaaaaaaagaactgcggccccgatggcttacagctgaaggtaccgtccagtgagtggtttggaagtgccatgacagcacgtttaaactggcccttagctctgccaaagtcagccctctaaattcaatcatatcagattaaaattttgatggtttaaagcttggattatataaaccatctggcgaagggtttcccaggaagtcaattcaacccgaatccaggcgaattgttttttgagcaaaaagtgtcaaaaatttccgaaaactcgacagacgccccaccggacatcgaaacggagtgcgttggtcaattcaaaaagcaattcgaggggtaggattttctttttttgtaccattttgtggatgactaatttatggaagaaaaactgatatttctcaaccccaaccccattaatgggcactttgtgtgcaattaggtcatgggaaaggtgaattgtggtcataatcgccaatttacttagtggaagaatgcatgatactctcatgtttacaattaggcccaaaatcagaccacttaaaactggaaaaacatttacaaaatccaagcctcaattttgccaactctagctaagatacttacagcctctgcaagtgtggtaattggtcgaccgccgctcataatcgttagatgcgtgtacacaaatggcagatacaacttaaatgcacaaaaggataagtggaaaaaatgaaaagcagaaaaattctaattttgaatgttaggtagggggaagaaatgagggaaatgcatggactatagagatgcaattgaaaatgtttagacaaagtaattgagtgagaaattaaaattatgaattttctgagcgagttagcacaaattcattttaatttttacggtttgacgtcctccaaaaagtcaatccataaaaaaataaaaatggcatctctgcccaaaacgacgttgtcgctgtcagcggcgtccaaatgtggcggcgacaattcgctcttaaaattgttctgctccgtaaaaaatttgccgttttttgcataggaatggttatgagaaagtcaactgaaagaatttgatcaccaaaagttggaccaatgcccctacgtccagctcgaatcgacaagggatgtccgctgggaacacgcccgactcatccgcctccaaattcggaaatttgagcggggtttttgtcatcgcgatgtcaaaagcactaatctgtaaaaaaaaaagcaaattttttgttttttggggaattttcggtaccaggggctccgattggtcatccaccaatgccatgttgcgacaaatttgcggcattttagtggtcggagtacggcccaaaacggtgtgccattggccgacaaaaaactgctggtcaatgcacacgcgcatgtcgaagg

SEQ ID NO: 3356 - DNA, 2478 bp, Heterodera glycines
caatttattaaatatttcgaaagttcgatcagcgtagtcatttttggtgtaaatctagttttctaaaaacaacaaatttacgagttttcccagggtgccttcggcactgactaaccttttcccctaagaatcggactaaaaattttcaacctaaaaatcgactttttcaatccttaattatgtttaaattttaattaattattcactttatgttatggcttaaggcatctgctgattggcggccacctcttggttctgtttggaatccatcacatcctttggtaagtttatgaaaagtaccaaaaaatctattttttgagaattttttactttttaaggcaaaatttgaattttgcgaaggaaacccaataagtcaatcttccagagctagataaagatttatgccaaaaaatattgaaatgcttgtaatatgtaataaaaaattaagccaacagcggaagtacaaaaattacgacaattaaaaccccctaagaatggaattaaaaattttcaacctaaaaatcggcttttcaaaaaacctaatgacttttagaagccctaattatgtagaaatttatcactatttaaaatgtacccaaattaattatttatatattttaactagctcgaccggatttttcctggatccaccaggtccaggtcatttttcgacaacctggatttttcatggacctacattttcctggatttttgccaggaaatccaggtccaggcatgaaaaacctggatttcctggataaatttttttctttttatggcgtaatgtatttaaaacgaatataaaatctgcaaaatttttccgccacccttataaatccttatgctcttaaaaattgactcaaaacgaaaaatttggacaaaatttgttagcaattcgcattaaaaattacaaatttttcccggcgacgcctataggcaccgccggactctcctcggttccccctgggaaattttttttaaaaatttttgcaaacagaaatttttcaagaaaaaaatcttagaagttttttaataaggaaattataagaaaaacattttttcaaaaaatttctcgggggggagggaacgagatgctccccatccctcacacattcccaaatagttttttggaaaaatgcgccgaaaaaattgttaaaaatctgatttttgattttgaatgcactgaaatttacaaattgcttattgtttcccaaaattgttaaaatcgatttacctataaacttagaaaaaaatgagaaaattttttatgaaaaaatttcaagattaaattttggaaaaatttttcagcgattttttctgaaagttcgaaaaacttaattcctataaaaaattgaaaacccgtttcaaaattttttcaacttttttttttttacaaatacatattaaaataattttttggtgtgattaattttattatttcaagtgaccgatgttttttcaagttttcaaaaaatgcttaaattggttttaaaatacattctcattataaattagatatttttagacgttcctaagcaattaattgattttttcaagcatttgtttgctttttaaaacaaattttaaaaaatccaggtccaggcctggatccaggtctcgaagagcctggatttttcctggacctggattttcctggatttttgtccaggaaatccaggtccaggtccaacatggaatccaggtccaggtccaggtccaggcttttttcaaaataccgagctctagtaaagactaatcaatttatatatacaaaatgacaaattatattaataaatcattttgatttagtagatggaagcatgagcgaggcaaaaaaattttctgacgacaccatgccaagaaaaattattataataaactatcccaaaatgtcgatgttagaagtcaaacaaatattctttctaataattaataaattaacaaatttaatatttaatcaaaaatttacactaaaatgactaatattatttatatacgtgaactattactttcaatttataaaaacaaaaataaattacaaaactaatcaactgagtaatatgagacatattgttatatttttataaaaatgtaaatattttatgagtgtaaattttaaaagccatgtaaaattttataaagctagacatgacatctttcgatagctcttaatttcaataattaaccaaaacaaaaccatttaaaaagtttgtttacatttaccataaaactttgaactctctatcatctggattttaattttgacactttaaaattttgcattttttttttgaaatatggacaattacaaaagcttttgagggtttgaaaaatgttagatttcaaaaattaaaaaataaatactgttgccatcgacatacaaagccaaacaattagggtattgtttgaatataatatgaatagctagactaattgaaaaaaggataagttaacatttttgccttaaaatgaaatttt

SEQ ID NO: 3357 - DNA, 1562 bp, Heterodera glycines
agatttataatagacaagacatatcattaaattattaaatataaaaaatgccataaaatgatctaattaggccatgcctttttgatctattttgaacacagaatcgtcggtaaatatgtgcgcagatatgaattgtttcaataaaaaattaataaatcaattgtaatgtgattaaattagtcaaaattaatttttattatttaaaatttccttgatgtgcgctaatgcaagttatgaaaaaaaacaatattgtaattgtattcttcattcgtcataaaacaaaattttattttataaggggttgacgcaatttgttcggacacaagaaagctcgataaaaatatttaatggtatgcataaaagcagttaagtaataaaacttgataattcttctaaaaactaatggtatatatgaataataattaataaatgaagaaaaaatagaaactttacgagattctcgacaattgcatataaaatttacttttaaattagttaataaaaactgatattagcaattttaagaattcttcaatttaaccaaaattaatcgttaaatataaatgatacaagcatatattccaaagtttaattgactaacaaagataagcaatgtgcatatcaaaaaagaaaaatgactgtatcacgttggcacagggcatgaatttctttttactcgtcaattatttaaattaagtaaaaattaataatgatttattaaattcaaaaaaaaaactgccatatgaaaatagataaaaatatataaattgagtttcatcaactataattaaaagttaagcgaaatatacatcttatggtggtgccataatattaaaatctttatttattacgcaaaataaatcacaggccaataaaaagtttgtcggttcaaaaacatgaaagcaaaaaataaaaaattaacaaaagttaaaaaatattattaagtcaatttattgtgtattttttgaattgttctacacgccgaagaatgaacgacgggtttttgcttgaaattagctttaatttaaaaagtatatataattaagaatacaacttttaaaaataatatttttttatatgtaattttgttaataaaaacaaagcagcaatatattatgtgaaataataaaactgaaaaatatcatttttctaaattaactttaactagttttaaaaaccatagcaaattcaaataataaattttaaaattttttagtaaaatacataaacgcagaaaaagtaataattttatatatatattatccgtaatttgttctcgtactcatgtaataaaaataaattatataattggagatttaaatataagatgaataataatcataaaaaatctattttcaaataaaaatgatagaagaaattattttatgttaaagtaaagtaattagatactttgaataaaataattttcaatcttaaataaaattttataaaataagaaataaatactattacctagaaaagatttttatatttatttatataatgaaaaaaaaatccttagacggaattagtcatgaaatataattcataaccgcaaatag

SEQ ID NO: 3358 - DNA, 758 bp, Heterodera glycines
  unsure (1)..(758): unsure at all n locations
tatatatttttatatttatctgataaaaactgactctggaaataataagacaattctaaaccaagtaaaaataatcatttaaataaaatgctgcataacatattagtagtgtaagaccccgttttggtggccatctgagcgccgggacatttcatttccagcgctctggccggccatttgacaatcacttataaggctcatgcttggagataaaggaatcggaaaaaaaaattatctcaacaatcagtcgtgaaacagttcaataattcggaagcagtgccatattgcgaaaagatgcacaagtagagtaggctcgaaataaaggcaactgccgaagattaacaaaaattcaaatttattggccccgttctgctttgacaggccatatctcgccagggagtggcggtagaccctttgttgatacatttgaaaatgtagagcgcgtctagctcattcgaataacatcaaactggtttgtttttgtcacgaaacaacccgctgatggccacgtcgaagaaaagtcccaaaatttgacatccataaaactccattttttcataggccagcgtgtttagagcaaacccgaaactgataggaaatttanattgatcataatagaagtttaatttttatttgtcccttgcattttctgggaaatcttttcgcgaaaagttgaaaaatttcaaaacggcagacaacagatgcatttcaaacaattcaacaatataatataaaatttaggcaaaaatttttgttcc

SEQ ID NO: 3359 - DNA, 5936 bp, Heterodera glycines
ttttttttagcaaattttatgatcgttgatgttattgtttagctttttactttccctgcccacaatttgtcgtgagaaaacatgaaaaaatgggcagcgaaaataaaaaatgttatgatcgttccgcgctcattgcgcaacccacggaacacaacagagaattgttgcaatatttaagctaaaatgcgctctctccagactcctttcatttaaaaaatttttatttttcattaactttataattaatttgaaatactttaaataaatttaaattatactaatgtatgacaatctcgaccaattttgtaatattgtcgtcaaaaaaattgtaaattctgcaatttatttattaattttttttacaaatgttcgttaaaggaacctttggttgtcaaatcgttctgaacattcaaatccaattatatctgtatttccaaattctcccaattaatggtaaaaagtaaaaaaatcctaaatcacagtattagcaaatggcgagcaaccggctgaaacgcgtgccggcttctcccaccgagtcagctcaagctgatgaacctcccaatcaaggccgaatcattagcgaattaaaaaataaagatgaaaagaatagcaacaacttaatcaattttcagaaaaatgttcccatgcaaagattgtccaaaatggtttctgagtcctgaaaaactgaagacacatcagcgttattcgcacggaagtgcgtattttatatatttttatttcatattttaatttctatacgttaattagttcgtttattaaaaatttcaattttcagaatgtacttttacttgtcacaaatgttcgagagtgttcaccgattcgtcaaattacagggtaataaatgtaaaaaaaataattaattcttaatttttttttttgggtggttttagccctaatttgtgatgttgtatttctgtttattttaaatgtgtttaaaatctatccaagaacagttaccggaccagccagtcaaaatatgattaaattcatttaacattttaaaattctgttaaaaatatgcaattatattttgcctatttctttttgttttgaatattttttccttttcggataagttttagcaaatattctcaacaaatttattaaaatcacatattttccccacgacacctaaattctttttttctataaattggcacaaactgaaataaattacgcatcaaatttaacaaagagagaaatctcgacctgccgaatcaaaaaaataacgtcacttttgaaaaaatgtttaccaactaaattctttgaaaaaatcatgccgcaaaaaaaaaagaaaataggttttggaagtaaaaaaagttttcgtcaataaaaacgatcgaagcattgactaagactggggcaataaaataaatttttaaaatcaaaaataataaaataaaacgatttagaaacattattatcgcgtccactttgggggacacccgttccattgcaaaacttgcgggatggaaatctctaaaattgtaaaaaaaatgtaattaatgtaaattatttttcaaccatttagcgccagcttaagaagcatgaagaacaatgttcacaacaaaattaatcttttgaacatccaaataatattattaaataataaaaaaataaataaatattaaaattactatttgtaataataatattactattaaaaataaaatgtattataattaagaaaaataattaaactaaaatttaaaaaaaataaataaaaaaataaatacataaacatattcatttatttaatcgtattgtaaactattatagctcgaatgtcattgtaaaatataatttaagtgtactctcatttttgtgttggtagttgaagataattccaaatgctctcgccaaaagccatattgatattaaaattaaaaatgttttctcaaaatataaatgatttatcgagtctaaaattttcttaactaatgttactgttaactttagtttaaatagcccaatttcgccgacagcgctttacagcaccatcggaccaatttttaaatttcaataatgtttaaaatggaacattttcgtattagatgtgaattttttcgtagtaatgaatgccaaccaatatttgtttatgaaattcaggctgtctaaacgtgttaaatatttgtgcttatttttgagcagaagttaggctgaatagccactattaccggcattttttagcgcaaatatgttcaccaaacgtgccaatatcgagcacatttcgccgacagcgcttcacagcaccgtcggaccaatttttaaatttgaataatgtttcaaaacggaatttttcaacactaagaaatgatctgaaaaaattttcagaaaatgcgccaccacctatgaattgaaaaatcttctcaaaaattgtcgacaaaatttcatttttcttgataaaaagttttatgtttgaaaattgtcattgttagaaaaacattatataaaaatatttataatatttatttaaatgatcaaaattgtttttttttggtagagtttttctcgtatagccctaaaaacccttaataacaagctgtaaatgcttttttcacgtatttttcggaatttagttccttttcatgctttttttcaattttttttgccaactaattgtaccactttcgcgatttggggcctttttgtttgcgagtcctaataataaacaatgattaattttactcaaaatttattttcgatcagcgatatgctatctcatgggcgtggctttacaaaaaaaaatggcatttaaaagaaagccacgcatttattttcatttcattattcttaaattttatgcatatctaatttcactagttttaatttttaattttgtcaaccgctaaattaattaaatacatatctaatttcactattttaaaattttcaaccgctaaaattaattaattaatttaagtttcaaatttatttgtttttcagataacccttcctattcaatttgtttaattttctatgatgtctttatcgcgtttccagtttgaaacgtctgccattggccaaaaacgtacgagcgagggggttccaaaatgcgctgcgatttttgtggccacaaggccaaaaatccactaaaaaatttatctgtccgtgtcgaattgagagattgtgttgatcctgagatcacacaaagcaccacccgcaccaccctcttctccaatacggccgaaaatttccttcagttgaaggccaaagaaattgtcgaaataggccaaaaggaaccggagaaacttgccagggtttttgaatcgaaactagaccaacaagtgttggtcaagctgaacataaaggtcgatattttttttgttaaaaccagcttaaacaattcatgttatttaaatttaggaatcaaaaggcgattttgagggaagtgactttgattggattgtttccagagtgttcactgaggacaaagttaaggtggaggaggagaaagaaaagaaaaaacttacggaggaaggagaacttgtcgatgacaaaaccaaccatggagaaattcaaattataggcgaaatgttggccggaagtactgagttcgggagtgctttgtggcatttgcaaattgccaattcattatttttaaacttaattatctgatcatttttctttaatatttttgaggaagaaatgaaacgaaaatggaattttcgctcagtaagtttttttgaacaaaaacatccatcggaggacgaagatgatgacgcagaagcggcaggcgtctcctcccctcaaacgtctcaggatcaacgccgtctacaattaggagagggaacaagtagcagagaaacagaaagtgaggaagcacatcggcagagccaaactgctccgatatttgaacaaactgcttaccatgtgcacaaattggaacgatttcccctgtcgcgccatgtcacagaatttgtgctgaacgcaagcgttgaggaacctgaggaaaccttacgatccgcgttcgagttgctaatcagacaggctgttgataacacgcaaaaacaaagtggacgtcctgttgccaagattggcatcagtttgcatggcagaggtgtgcgctattcgttcattcattaattatcatccaaatttcctctgctttacaaggttgtacgagccaattgtgctcccacttcgtccactggaacaaaacacctgcgacgtgcttatggccgagctcgacaaacttggccaaagtgatggagacgatgctggaggtgtcgaagaaggagcgggaatggacaagcgctcacttttgttgagcgaagcagttcaagtcacagtcacttgctttgcgcctcctgttggcgctcgacctcggcattttccccatcaattttgggggtacaacgagaaacatcgtatacagatctgtaactgggatgacaattactgtcttttctacgcattaattggctcacgtgcttatcacgacccggtactgttcaaagaatggacgcaagcccgacaaccgccgcaacaaaatatggcacagctaacattgctgcaagatttttgtgaaagccaagaagcatttcgtctactgttaatcaatcgggcgctgatgcgctcatccgctgagcgtttgttgaatgcagctggcattcgagaagctctgaatgcttacggcattgatcaactccaacctattcaagactattgggtgtgtgtgtatgtgtgtgttctccacagtttgaatggacaattacattacactatacatttttaggaccaacgatttcctggactttatcggattttgttgtttgaagaccggcctgaggtgctgcccaaacccatggaaggggccaactggccgtcgttttgatgtcacattgtttctctcaaatagacattatgatggaatcaaaaaaataaactgcttcttcaaattgtcacggcactactgcgtggattgtgagtgcacatatgccataacgctgaagcacatcccgggtcgatgaaacaggcaaagcttgataagtttgagcaatggtaatgagtttaagcaaaaaaaaatgggatgcaatagattggctcaacaggtacctggaaaactgtcaaactcccttctttttaccggatcaattacgcagctactgtcttaatgacacagaaatcctgatgaaatccgttctacaatttcgccataaccaacggttatgatgtcttgccaatcagttgcacgattgccaggtgagtgttaaaaaacatcatcttcagcagcatcattatttagcgtatgtatgaacatttttcgtgctatgtcatgaaaaaagaccaattggccatcgttcctgaggctggttatgagcgaaatgaccgagccagtattttggtgaatgaaaatgtatttaatttgcgtacacctttgatatgcattaaggctattaaatacctggattagagagccaaaacagaaggagtattcatatagcatgctggaaacggccgtgaaaaagtcataaaaaactttaagcttgatggctggattgaagagcggaataaatgtatcgaagtgttaggatggtaaagataagtcgtctatttagaaaggactatcatcatcgttataattaaagcttttggcacggctgtgaacgttgatatgatccaaatgacaaattcgttgatggacgaacgtgtcgtgaacttaacgagtcaacccaggatcggttgactcaacttcgtgaaccggacgaactgggtcattgtatagaggtggaggaaatttgggtgcgtacacctattttttatttaattttccgtattttaaaaataaataagcaatgaaaaattgtataggagtgtgagatcaattcaatgttgacagaccatcggaacgcagaaatgcgagacttcttagacaatgtcgggaacgagcgcggtccaatcgatccacgcgc

SEQ ID NO: 3360 - DNA, 1203 bp, Heterodera glycines
tggtgatgcggaacatgtacaacatgacgcaccaacggtggcccctaacaaatcaaagatgagaaatttgggtcaaaagaattcaaagttttgaccttatggggcagtggaagtggtaggccgttcattggatgatgaacatggtgatgcggaacaggtacaacaggacgcaacaacggtggcccctaacaaatcaaagatgagaaatgttggtcaagagaaggcgaaaaaaaggtcattttttgacctgatgaggcaatggaagcggtagaccattcggtggaggttggacatggtgatgtggaacaggaacaacatgacgcaacaacagcggtccctaacaaatcaaagatgggaaatgttggtcaagagaaggcgaaaaaaggtcatgagttttgacctgatggggcagtggaagtggtaggccgttcattggatgatggtggtggtgaacaggaacaacattacacagcattggttgtccctaagaactcaaaagtttgagaaatgttggcacaaaatagggtcaaaaaacaatacccaacctgagggggcagcggaagtggcggaacattcacaattggaaaccggatggggtgttgtggggcacggagggcgttgtatggcattggtggaccctaaagcccaaatttgacaatttgtggcaaagcaaaaaaagcgatttcgatttcgacctgacggggcataggaagtggtcggacgtggagaagagggtgttggacatggtggtgcgggactgggaatacacgatgtggcatttgtggaccctaagacccaaagctgtgaatctgggcaaagaaagctcaaaagcctttggtttctgacctgccgtggtagtagaagtggtggaaaggggcggcgaacagggccttgacgaaatgccggcggcacccgggcaattggacgttggacagctcgtgcgccaatgtccagttcctgtctttgcacaatgttttggtgggcggcattgccgtcaccgtcgtcatcgtctgagcttacatcttccgccggccgattgcctaaatttttgggggataaaatggccaaccatgaaaccgtttctctcattgtcaaagcacaaactcaccctccacaacaggaattggtagtccaacgattggtcgcggagttgggccctcattcttttgggagatgttgggtggagttgggtcacgtccgctg

SEQ ID NO: 3361 - DNA, 6080 bp, Heterodera glycines
aggtttccaacattttattataaggtatgtgaaggcctctttacgttatatttttgcaataagctgtcatagattattaatcaattaatgataccaagttcataacgatgggctgactcaaatgaatttttcactgaagaatttgaattcgatcagacggactttgaatgtgcaatgggccggagaaaatttaaaaggcaaacaaaagagcaagagatatatggtttgttactcacagaacacctatttttaattatgtccctaaatatagggatttgggctgaagaagaggacgatcaacgaccgtcgtttcagcacgggaagaaacggccgaacgattctgcaccagtctcttttgtctctgcgggtgttaaagtcggaagcaaaactcaactggcggatgtgagttattttctgactatacatacaattttcgattattccagggcaatcttcaagaagatgaggaagaaagcgaaatttcagctgttgaaactccgcccgaaaagcgtcccactccctcaacatttgtcccttctgtgccttcgaccagcgatgttggcgctcaagtttttgcgggaatgcgttcatccaaatttcaatcaggcggaggaatgaccgacacgacttggataaaagcgggaaaaggaagcgtcgtaatgcaaatgatgcaggtgaatcatacatggatagggggggaaaggggggccattttccttcaaaactggttgataaaatacatttaaaggaatggtttacaaaaaatcagaaacagcctctttgtggaatggcatttggtgattggtttgggatggatcgaacatttggccatagtgttttttaaagtcaaaaacccatgcgttataatacgcggaatagtcgaaatccatttttgaatttggtcagcaaagaattttgaagaatgaacgtggaaatgaatagagccgcattaccccgcttaagtttgctcctccctttgccgtgccattgcgattggctcctccctcagcacggctgtgattggctccaccctcagcccgccacggacagcaaacaataatgtgaatgattgatgggggaaatttgaatatgattttgtctttctgtgccatccctcccccatcatcgccactgttgggagtgggcaaaagaaatttttttctcaatttcgttggatgattgatagggaaatttgaatatgcctttgcatttcggtgcgcttctcccctgccaggcaccactccgttattgcccactgcgatgggagggcaaaaatggactgaaagaaaatgaaatttcttcgcaagtttagttttgattgacagttcagtgtcataaaaaagaaaatttgaaggaccaaacggaattgtcataaaattcaaatgcgaaggacgaaagaattgcgattgcaaaaaaaccaaaaatagtaacgatggacaaaaaatttttgtgtgtttgtgcacaatttacgttgggcaaaaacgaatgagaacaaaaaaacttgttcgtttgtgcacaagctatgttgggcaaaaaatgacgtttgtatatgattgtgttgtgtaaaacataaatgataggaaaaaatttgcgtttatgcacaattgtgaggcaaaaaataacggagcaaaaacttgtggttgtgcattttgtgggagaaaagtgacgaaaaaaaggaataatttgcaggagatgtcaatcaaaaaccgaaatgagaaggttattagtcaaatgagcagtagatttgtgtaaaaacttgtccttggtagtattttttggttttgacgtgtcgtttgtgcggttatttaaagcggttgaaagttgttgtgatcatcattcgagcaaaatggacgtaactcttcccgtcagcaactcggcaggtgaatggatcggagaggaacggagggatggtgttgtgctctatgcgccgtggacggacgagtggcatgtgcaacagcaacagcaacagcagcagcatcaacagcaacaacaccaacaacaacaacaacaacagcagcagcaacagcagtttgtccggcgaacaggcacggggtggacgcggtttccagcatggaacgaaccgctcgttgccaacgattggcgagagaaggaggaaaatcggatccaaaggaagcgactacagcgtgaaaacccggagtattgggcgcaaatattggaggaggaaaagcgagccggtgaggagcgccgcttaagggatttgcggttagagcgcacatgggatggctacaaggaaggccacttcgagcgtcggcacaatgacggctcgttttttgaggccagaaaatttcttggttcaaatcgacagaatgactttttttcattttcagtttgttgctggggtcgggaagacagtggttggaagttctggaggagggctttggtgaatgatgttggcatgggattgaaagtgttaagattaactatgattggggatggtatttggcattaatcgctgataaataaaatttttcgttgagttggaacaatggggaagaggaggggagggttggaataagttggtaaatgttttttcacagaattttgggaacacattaaaatataataaatgctcacgaataatattggtccgcatagtgcatcgactaacattatgccagcgtcaatccccctcccgtgccggcaacataagccacacaaaatagccaccaatccatccccatcccctgccggatgttggcaactaaaaccatacatctggcctatccatctgtgggtgggaggcaacttaagcctcccaatccctcctcaacccctgccgaatgttggcaactaaagccacacacccggcctatccatccgcgggtgggaagcaaagtaagcttcccaatccctcctcatccactggcaggtgttggcaactaaagccacacacccggcctatccatccgcgggtgggaagcaaagtaagcttcccaatccctcctcatccactggcaggtgttggcaactcagaccatacacacggcctaccctttcgagggtgggaagcaacgtaagcttcccaatccctcctcatccccctccggatgtaggcaacttaagcctcacatccgaccttttggggcatttgaatccaacctcttattctcaatccttcactggttgacatcatagccatataaacccatttgattttttgattttaaaaacattaatacaaaatacgtggaaaattaatgataaacaaagaaatgccaatggtcggcgggaaggttaaaaaacttctatgtaattatgggtgtgtgtgtacaaacgtccttgagtgtttcggaaaaaacgagtgacagagagcaaaaattattgcttacgtatgcaaaaaacagccaatcggacaaaaaactcttgtgaatagctcctatttaagtagctagctgctcgctgctgctattcaaaaatggagcacccctttgaaatgcccgtcgatttggatgattcccttctatcattggatgtgtcaccgacgaactccttccctattgatcctcccctggccgacgtagattcgtttgtccctgatttggtgccagaactgggcgacgactcggccgagtatttgtccgactctgaggaattcgaggttgagcgaatatgcggccaaaaaatcgaaaacggccgacagttctttttggtgaagtggaaaggatatccgaaatcccaaaacgattgggaaccggaggaaaatttggtcagctttgatcgttttcgaatatttttgttgcccataccgttaattttagctcggttgtcagcccaaaatattacaatattggcgtcgtcgccaatacgataaggagtaccgggcccggacaaaggacgacgagaaatcggccagaggggggaagaagaagaagagcaaagcgtatgaagaaaaaccaaaggccgccgtggatgtggagccggatccggtggaaaaagcaaaagaagagatgggcgctacccctggggaggtgttggaggaagagaccgaaggtctggaggaggaggatgtgtgtaaaaaagggaaaccggaatcggcagatgcgggaccagaggtcgaacaattgaagaaaatgctacgtgacagtggccaaatgccgatggataatgccccactacccctaccccgctgggtgcggggtagtggggcatttaaaaaaaggtacaaaaaattgtacgacgcaatgactaataatatgggatgatgttggatatttatgtattgcttgttgttgcataataaataataaaaaaatcaaaattgaaatcgaaaaaccaattagaatttaaagaaattgacagtattttgtattttccattgtttttctgtatggtgtgactcactgccccccccacacccgccacaccactgaaaccacacccattaccccacatttggatgatagacatttggaatagtgtgaaaataaaatataaataaaatttggtaaaaattgttatgatttataaattgaaaaataattattagggctaataaatgaataaaaagaatttttggtaaaaataaaatttaaaaaataaaaatgaaattgattaaacgaataaggttaaaattttgaaaattaaattggaaattaaatattaatttaattgtagaaataaataaatatggaaaatggaaattaaaaattggaaacaaataagaatagcggattaattagaattttaaatataaaataaaatttaaaaaaggttgggtttggttttgaaaatttaaaataaaaattaaataagtttagaaaaaatggaaattaaaattgaaaataaattaataataataaataaaattggaatggaatgaaaaaaattaaaaatgaaattaaatggaaaataaaataaactaggaattaaaattggaaataaattaaaataataaataaattggaatggaatgaaaaaattaaaaatgaaattaaattgaaaataaaaataaaacaaaacaggaattaaattggaaataaattaaaaataataaataaattggaatggaatgaaaaaattaaaaatgaaattaaattgaaaataaaaataaaataaaacaggaattaaattggaaataaattaaaaataataaataaattggaatggaatgaaaaaattaaaattaaatagaaaataaaaattaaataaaacaggaattaaattggaaataaattaaaaataataaataaattggaatggaatgaaaaaattaaaattaaatggaaaataaaaattaaataaattttaaaatgaaaattgaacattaacaatttattttttgtgcagacagtcaattaacaacatgcggggggggggggggggtgctttgcatgatctccattgcgtggtcccttcactctcccccgactgtgcataggacaaagagtgaagcgacgccgatcctgagtacttgctcatcgcgtggcacaaatgtgggatcggagaaaccggagagcacttctggattcctcggcagttcctcgttaagagcaaggaagagctgatagactatgtctatcctaacttccaacaactccttggcaatgacaaggagctgctcaatcgtttgattctcgctccgcacattgacacgtgcgacgaagtcaacgacatcatgatggcgaatgtgccaggtcatatgcgggaatacttgtccacggataagccccttgacgaccgcccactggacatcgatgagatcgagtccgaagtggctgcgttgaaccggcgcacagactcgggcatgcccccacacagtctccggcttaaagtcggatgcgtcgtcgtccttcttatcaataaaagtgataaggaaggactgatcaatggcacccgcatagttctggaagaacttggcgatgatcgcctcattggtcgtgttatcaatagcaatgctattggcggccaagtgaagttctttcttgaaagaacacgaaatgtctatgaagacaaatcgcctggcggcataaaatatgagcgtttgcagttcccaataaagcctgcattcgctatgaccattcaaaaacgtcagggccaaacaatccacactgtcggcattg

SEQ ID NO: 3362 - DNA, 963 bp, Heterodera glycines
gacagacatgttcacaaaagaatggttaatggcgctcagttggcttttggtacaacagactccacatttcctaaggggatatttatgacactttcggaggcattagttagaaatgcactcaaaggaatgattaatgaccctccgtaggcttaggcttcggcagaaatgcactcaaaagaattattaaagaccctccgtctgccctgggttggtcgaaaatacacttgaacggggtgattaatgactctctgtagactttgggtactcaataggctttaggtctcgggactgaagtgtcccgtgggcactgggagtgaaatggctaaacttaaaaaataactctggggctcaaatggtggcactgtaaaaataactctggggctcaaatggctgcgctgtaaaaataaatctggggctcaaatggcatacgcgagcgcagaaatggcccacactcgtgcgctcagatggcatgcgtcccttcccttccctataaggcatgacagctgacgcccatcctctgcctccctttccttctctaataggatttggccttgggttttatccttcagatgttttttcaattatttacctcttctgggattggatatatttattataggtgttttttaaaggtttaaatcgggtactgaaatgtccctttccactgggactgaaatggcggggctgaaatacaaccccgaaaatcttggtgagtaactactgctatataagcatgagtaatgcttttgctttttgaattattttttgaaaaattcaatttcgaaaaatctgacgaaatgtttttcaccaaattagcatttaatgtttgctgattttgcagagaattctctaaaaaataaatgaaatgagcagtgaaataaatagagggcaaaatggtattttagaaaagaaagttgcccaaaactgagctaaaaatgggaaaacattaactaaaatttccaa

SEQ ID NO: 3363 - DNA, 2429 bp, Heterodera glycines
  unsure (1)..(2429): unsure at all n locations
tatgattttgatcgctcactttccgnncaattcatggcgtaaaatgcgttgaatttcacaactttgcccatcacatgcaacttgtgtttntatnttcaacggcgtgttggcgttgtgaaataaatcagatactgtatccatttgcaatttggacaacccttttctatacaaaaaactgggtttacggtcatacagcgaccgccatcgcctttatagaaagtggccataaaatcagttcgtttaaagagagaactgcactttattctcatattagccgtcagatccccgacttagcttcaaaacaggtaaagccacacattctctatcattatgaattttgatcgcctcacttcccggcaattcatggccgtaaaatgcgtttgaatttcacaacttttgccatcacatgcaacttgtgtttttattttcaacggcgtgttggcgttgtgaaataaatcagatactgtatccatttgcaatttggacaacccttttctatacaaaaaactgggtttacggtcatacagcgaccgccatcgcctttatagaaagtggccataaaatcagttcgtttaaagagagaactgcactttattctcatattagccgtcagatccccgacttagcttcaaaacaggtaaagccacacattctctatcattatgaattttgatcgcctcacttcccggcaattcatggccgtaaaatgcgtttgaatttcacaacttttgccatcacatgcaacttgtgtttttattttcaacggcgtgttggcgttgtgaaataaatcagatactgtatccatttgcaatttggacaacccttttctatacaaaaaactgggtttacggtcatacagcgaccgccatcgcctttatagaaagtggccataaaatcagttcgtttaaagagagaactgcactttattctcatattagccgtcagatccccgacttagcttcaaaacaggtaaagccacacattctctatcattatgaattttgatcgcctcacttcccggcaattcatggccgtaaaatgcgtttgaatttcacaacttttgccatcacatgcaacttgtgtttttattttcaacggcgtgttggcgttgtgaaataaatcagatactgtatccatttgcaatttggacaacccttttctatacaaaaaactgggtttacggtcatacagcgaccgccatcgcctttatagaaagtggccataaaatcagttcgtttaaagagagaactgcactttattctcatattagccgtcagatccccgacttagcttcaaaacaggtaaagccacacattctctatcattatgaattttgatcgcctcacttcccggcaattcatggccgtaaaatgcgtttgaatttcacaacttttgccatcacatgcaacttgtgtttttattttcaacggcgtgttggcgttgtgaaataaatcagatactgtatccatttgcaatttggacaacccttttctatacaaaaaactgggtttacggtcatacagcgaccgccatcgcctttatagaaagtggccataaaatcagttcgtttaaagagagaactgcactttattctcatattagccgtcagatccccgacttagcttcaaaacaggtaaagccacacattctctatcattatgaattttgatcgcctcacttcccggcaattcatggccgtaaaatgcgtttgaatttcacaacttttgccatcacatgcaacttgtgtttttattttcaacggcgtgttggcgttgtgaaataaatcagatactgtatccatttgcaatttggacaacccttttctatacaaaaaactgggtttacggtcatacagcgaccgccatcgcctttatagaaagtggccataaaatcagttcgtttaaagagagaactgcactttattctcatattagccgtcagatccccgacttagcttcaaaacaggtaaagccacacattctctatcattatgaattttgatcgcctcacttcccggcaattcatggccgtaaaatgcgtttgaatttcacaacttttgccatcacatgcaacttgtgtttttattttcaacggcgtgttggcgttgtgaaataaatcagatactgtatccatttgcaatttggacaacccttttctatacaaaaaactgggtttacggtcatacagcgaccgccatcgcctttatagaaagtggccataaaatcagttcgtttaaagagagaactgcactttattctcatattagccgtcagatccccgacttagcttcaaaacaggtaaagccacacattctctatcattatgaattttgatcgcctcacttcccggcattcatggccgtaaaatgcgtttgaatttcacaacttttgccatcacatgcaacttgtgtttttattttaaacggcgtg

SEQ ID NO: 3364 - DNA, 961 bp, Heterodera glycines
aatcagatactgtatccatttgcaattaggacaaccctttttctatacaaaaaaactgggtttacggtcatacagcgaccgccatcgcctttatagaaagtggccataaaatcagttcgtttaaagagagaactgcactttattctcatattagccgtcagatccccgacttagcttcaaaacaggtaaagccacacattctctatcattatgaattttgatcgcctcacttcccggcaattcatggccgtaaaatgcgtttgaatttcacaacttttgccatcacatgcaacttgtgtttttattttcaacggcgtgttggcgttgtgaaataaatcagactgtatccatttgcaatttggacaacccttttctatacaaaaaactgggtttacggtcatacagcgaccgccatcgcctttatagaaagtggccataaaatcagttcgtttaaagagcgaactgcactttattctcatattagccgtcagatccccgacttagcttcaaaacaggtaaagccacacattctctatcattatgaattttgatcgcctcacttcccggcaattcatggccgtaaaatgcgtttgaatttcacaacttttgccatcacatgcaacttgtgtttttattttcaacggcgtgttggcgttgtgaaataaatcagatactgtatccatttgcaatttggacaacccttttctatacaaaaaactgggtttacggtcatacagcgaccgccatcgcctttatagaaagtggccataaaatcagttcgtttaaagagcgaactgcactttattctcatattagccgtcagatccccgacttagcttcaaaacaggtaaagccacacattctctatcattatgaattttgatcgcctcacttcccggcaattcatggccgtaaaatgcgtttgaatttcacaacttttgccatcgcatgcaacttgtgt

SEQ ID NO: 3365 - DNA, 9113 bp, Heterodera glycines
tttgtcaacataatcttccattttcttgaaatttcctgcaaaatttttttttttccaattcctgggggcttcaaaaaagtaccgactgcccaacagccccgggctcctatcgtcgcaattttctgtcgctttgccacttcgcttagcgttgcgttcagaaattcggcggcgactgcgtccaccaacggtgtcggttgcctgggggcgtgtagttgagggagtcgggctccgcttctcctgctcgaccgtttccgtaacaattgtcgctgcggctgctgcttctctgtggcgctgttgaagttggagttgtactggttgctttcctcctcggcgagtgctgtctcacaaatgcggtccaactgactccactgaccgagcgcctccaaacagcgcatttggtgcagcaaaagatcggagcgagaagactaaatagtcaggagaatgctttgaaaaataaacataaaatccgtgtgtttgtactccgttttgttgctgcggtgtcgcaattcgattcgtggaagcactggcggaaacggcggcatcatcaccgagtcctgcgtttgcagtgggtttggactggtccaactcctctctgttagtcgggagcaattggggttcactgtgtgacgaaatagatttccatgatagttgttcgtcgggcaaggtggtcatgtcgttctgatacatctccaacgccttttcccattcgcctaatttttcgtaccaacgaccctaaaaacagttgaatcggtgagcaacgaaaaaaggtattaaaacccatgttgagaaaagaaagtcacgacttaccgatatttccatgttgtgacgtttggcatactgaacaatgccggcggcgccttcttccagatttaatttgttgaatagcattatcatcgtttgacagtcatccgcgttcggttctccgttgccgcgggtgctcaaaatttccatttctttgtaacgcagtgcttttgcgtatgcacgtgtcttctccgccgattcgctgagcattcgatgtttaattggaagaggtcccttaaagaataaacaaacaaaaaaaaattttttttttttactgcgctttgtttattgccttctcagaatggtccatgaattcggccaaattcagtatggtctgaatgggttcggcatgggggcagtgcctcaacacatcgatcagctgattggtcagttcgttctgttcccgctccggcagttcagtccaaacggacataaaagcggcattgaataattccctgtaaattatttcattaaaaatagaaaagtaaggggaaaaagaacggactttgagagtgattcgcacatttcggccaacacagcgcaggcgcgaagtgcggacgacggactctgacggatgaattggttgcgcaaagtgccaacccactgaagccaatcctcacgcgagagcagtggttggaccgtccaaaagcgacgcaattggtccaaattgatggccaagcgggaaagatcacggcctaaacccaaccattcgtcccggcattttcctgttcgccttacccgaagacattctgtgcactcgagacatgtccgcactgcttccgccgggcccgggcaaaaaaccgacaattccgttgtttgtgtcgggcaagggcgaagtgtccgttgtcgccccgccgttttgcgtcggcggtaaaaaagacacttgacgcgcgaataatggtgatgaagtgctggcactgaatgtgccctgttgttgttggtaaacgcctccaccactgccaacggcattctgttgttgctgctgctgttggcgtgcgtatgaaggcgcctggagaagtgccaactgttcctggtactcatggcacagcattggttcgacacgacaccgcaccaaggcggcatttacattctctttgtacacagaaaactgagtccatttctgaaaatgaaggggaaatgaactttttccgccgaaaagcttaaatgaagacgaactctgacgatgatgccgagtaactccatcagtcgcggctgttgagacttgatgccaatgcaacgaagccatgtttgcatgacgggcaaagcgtaatcctcgatggaatgtcgacgggccaactcaagcaaagtgtccagtgccgacgtacgcactttctcctccgttttgcggtcgtccaatacggacagaattggcggcagaatcaaatggacatgggagccaagacaagcagaaattgtacgggcgcatgagagagcctgacaaaaggtcatttaacacagcatataaatcaatttgggggcaatagttaacatctaaagcacttaccccgtgcataaacccaaaattaaaaccgaaggcaccattaaaatgggcgttcatgaaaataaaaagcaaattttttatgctaaaagaaaagggtagtaaatgtagcgcaaaaaagttgcgcatcatgatttatttcaaattgatcagtttgcgggtcgcgaaaaagttataaatcgccgatggatgcaaattgctgcattaaatgtcatgcaaaaaatgtatccacggctttttatttaacgcaaacttattgttagacatttttataaaatctgtcaacaaatttaatttacatggctagggaggggtaaacccaatgctagactagcaaatcttggcgggatattgtcagtgctatacaagtcgacgtaaaaaattcattggacgcataaaaattgaatggacgcgtaaaaattaattggacgcataaagtcgattgaacgcataaactgtacttgaaccgggaaagacaccatttaaatagacagaaatgactagagaccggggtaatgggtcggggtcacttcggcgcggaccatttcggcgccgcaaattttgaaatgctataacttttttatttgtcagttagctttagccaatctagcatcatttgaaagctctatgtgtgctctatatttacatgtaaaaatagaaatgaatgattcaaaaataaaaaagttatgccacgcgacgccgaaaaagccaagaaaaagtcaatttttgaggttttttggccataacttttttgtaaactgacgaaattttttgaaattttacaggctaatagagaatctgaagagctatcaagttgttagcaacggcgccgaaaaggccggcgccgaagtgggcggttcccgtttcttcccctaccgtcgtgtgtaatttgttgtcgcgctccgtttgcgccccttcagctgcgtcttctcaattcgtcgtgacagccgacaggtgcccatgccctcgcggatcagacgttcccgctcagaagcaacgcgaaaaattttgaaatacacgaaaagcattaccttaattggggcggaagatttgatttagaaaatttttctgttagcaattcgactcgaaactctacgaaaattgaatttaccctaaaatcgagacccaaaagcccgagaaactcggacttgagacccgatattcgcgagaatccctagtatttagttaaaagcaatatgcgaagatggaataaaaaataattatttgtgatagatcagcaaaatcttgttaactcaaacaagaacaaaaaaaaactcatcagttatagtaattagcgtttttatctttttcacgaaattcaatgtttaaatgggaactaatcatacctaataaaataagctgaaaattgattatgcctttaaaatggaccaattagcatttcactgaccaccaatgggatgtagaaggagacggaagcactgtagatgcggtaagacacactcgtcggataggcacattggtaggttccgtcttcagctagtggtgccgtcctcgccggagttttgtggccatgccgaaccaaatttatggtggaaaatgatgatgatgttggcattttgctgttaaacgctgcccgtcgtggtgttgatgatgacaaattgagtgcagaagcggccaatggtgccgaagaagacggcggtacttttgtgtcaaaggaaatgcgccattcgttgacaaaccacgggggcgagcacacaacgaaagccattccccagacggaaattggagggagagaaagcacgaaattaattttagagaacgaaatatttaggtctgattttgatttttaactttttttttctgcgctttgtttcgataaaaatacccacaaaaaaagttttagccgaataattctacaatttaaagccattattcgtcattacaaataactattttcgcgttcgttaattattgtaatgaaaaaaaaatctttcatttaatcaattgtaatcagtgaattaaattgttttccgcgattttaatttattcccatagaaaaaatatttcaatatataccactattttgtcatttttatcgctatttttcattaattcgacattttataattttcttgcttttttcgatgtaaatctgagaataaaatatttctttataataattactagggtcgcggcttttagtgacgaaaaatcccgaaatagttaactaaaatagtgacgaaaaagtgcaaaaataatgaagaaatagtgaaaaaagtccgaaatatgtcgaatagtgacgtaattttcagccaaaaattaagcaaaaataatttttattcctttataaaattctcttagtaaatattgacattttttatatcaaaaattttgtcaagaaaaaaaatttgggggaagaatttttgaaaaaattttccaattcttagtggtgtatttaaaaaaaaattttttggtcgattcttaggggtgtattttttgaaaaaatttttaggtcgattcttagggggtgtattttttggttttattgcatttttgttaaagaattttccaaaaaatgtcgaaatagtgacaaaatagtgacaaaacgccaaaatagtgatttttaactattttagtgacgaagcgctaaaatagtgatttctagtgacgaaaagtgacgtccaaacgaaaaaattttaatgtagaaatgggttttttgagctcctttcttcaaaacaattgagcaaaaaaaaaagttttttcactagaaatcccgaccctaataattaccaaagctgagaagtgcacaagccatccatcgtctcctacagaaaagttaacttaaaaataaaataattatttcaagatttgcctcgttctcggatagcgcaatgggcttgtgatggccatatacctgcaaaattaatccagataaaaaactattaaaatagacaatattttatttattggtaatttttggcaattcattacaatatgatgattaaaattacctgtcaagtgaaataatgcacaaattaaggatggacgccgtgcagagaagcacatcaaaagttgcccaaattcggcacaatgccctgcccaatggccaattgtggttgtggagcaagtcgaacagtgccaacggcataatcaataagcccacaagcaaatctgttcaataaaaagaattgattcaaatgtgggcattagagctttcataattttctagtgtaaaatggaaaattgaaggaaaatttaaaaaaaaagtttgaatttacaatataaaaaatgaccagctgttgctaaagaagtgagcaaaaaattggtgaaagtgcgcatccgtttgtagaggaacacagaaaggacgaccaaaacattgccaaaaacggtggtgagaatgagcaaaatctgcaaaatttgcatagtcaaagaaagcataacaattagttaaaattaggttggatttaaatatttatcaactacaattttgtaataaaaaatatctggtaaaaattttgatacaaaagaataaactgttttttagaaaaattaataaaatgaaaataacgaacaaaaaaatcgaaaaccattctcaaaaatgatcatttttgcggatcactcgcaaagagtgaacgaaattaacttggataagctcaccagaacaaaggcgatgaaaaggtcggcaaagcccagacaaacactgtttgatcgctgctgaccagctgttgttgttgtagcaccattggcataattagcgaattggggggacagcggatgattccctggtgccggtgatctgccaatgacggatgtgccaccggccatggccaaaaccgacagaccaatgccggccaatccgatcacaaaaagcattaaaaatttaacgacaaatattttatcagaggcaaataaacatggcttaatttaaaataaagtttgtaattaattttgtcaatctgctcagataattatttattgattaattacacgtgttattagcccccattaaaagccaaacataatcccgaaaatatggggcgtgcttttaatgagaaaatattctttcagtatattcgggatgggattaaaaaaccaacccacacaaattataacaaataaatgtgaataagtggtaaagatttgggaaaaatcacgtgaaagcttttcttccattgcaaatgtaaacttttaaacttttatttttgaaagtgcgaaaatggaacaatcttctttttttattattcatttcaactaaaagcaacagttttgtgcgattgataaaaggaaagtaaactcatataaataaaaaataagaaaaatatccgacaataataaagagttaaaaatatattcaaagatgagaggattctttctatatatacatgaatcaattgagatttaattttcttaaattttaattaagcaaagcgcaatactccgactaaaattgcatatttcttctcttaaaatattttaattgtatcacaaagaagccaatgaaataaaaaagtttactgaattaaatgacaaatttatttaaattcaaaaatatgaatccctaaaaaagtgacgataagccaaaatgaaaggtcaaaaacgatcgggattaaaaagaggaagtaatttaattagcaaaaaattcataatatttttcagatttaaaaagactaaataatttggtctaattcttttatgaaaaaccaacaataaagtgacttgcttaaaattttttgagggttgttcttaaaatgtaacaaatgactctcccccgctcttggccaattattcccttctctcccctttcatcagcggcaggtgtgacgcaatgaatcataaagaaaaagtgtcattgagcccagagggcattcatttgaaattctcagaatcataaataaaacaaaagccaatgaatgagttgagatgggaaaatgaatggcatatttttagttgcattctttaaactttttggctgaaaatgaacttttaattttagaaacatcttttttttctattcaattaatactttttaaaattttaatcaaatgaaatttaattatattctttatttttatgaatatgaatttaaccaaaattattaaaaacaaaaatgccaattatgtatttaacaataaaattgcaatttgaatagattttaaataaaaaatatatataaatttctaaaattcaatccaaaattcggcggaagatttccattggaatgttttaattaagcgcactaatcgggtcacaaaatcacttagcaaaagaagcagtcagataaggtcgggacaacagaacagaagattgcccttaaataatttcgcgccattttcagctccttttttggtcattggatttaaaagatattaaagcggcggcggcggagggacggacagacggacgatgaatgaatgaatgaggggaagaagcgggggagataagcgtacagagcagcgaaatttacgcgcccaaatcccccggggagagcttaaggcggggggggggggctaacagggaaaaattggaatttcccaggataaattgtggagggttagaaaataatttgtgggttaaggacaaattttggcgaaaaaaagtgtaaggcaatggcagcagcggattattattggacagcaaaattggggaaaatgaaatttccaaataaaagaagggcaaattttttagggattaagcacaaaccaacaaaataatggagaatttgtaggggaaaaatgcgatggtcaacgaattcattcaggcatttgaaataataaaaagtcaaatttgcgttatattccaatatgaaacaataaatacgcaaacgccaaataaaataatgtaacaaaaaaaaaactaaaattgtcattttaattgaaatcagcatttttctaattaggcaaaatgaattgtttaaaaacatttgttttgttttttatttgacattttccgctaataattcattaaaaatgaacttttcggttaaatggatgatgatgatgaataaatgcccttccatttacacagacattgcttatttctttagtcaaaaccgttatttatgtgcaatataataaatggacgcgcccattcatccaaaaaaaaaaaatttaaaaaataagaggggaaaggacaaataggaaaaagggaaaaatgctatttaaaaagtttaaaattttaaaatacacactaatcaattataaatggaattattgattataattttaaattttattcttggaaaaatgctcatttaatataataaatgagacgaaaaaaagaaggcaaggcaaaaacagcgaaatggcataggacaaaaaagcattcacacaaattcttcgccttaaaatagaaataaatgaaagcattaaacaaattgacaaaagtaattcagctctattgaatgctaatatgaggaagtaaatttatgaataaataaatatttaaaaagtaatcaaagaaaaaaaaaaagaaaatttaatgaaaaaaagaataaaacaaaaaaagaaaaattttattttatccttttttaattttttagtttaattataaaattttataacattcgcacttttaatctcataaatgtcaaaattttaatgttttttctttggtcgtatcgaatggcaatttgattattcattttccactgctgcacatcttcggcaaatatgcacataaaacgacgcaaaaattttggtcataataaaaaaaaattgagtgggcgaatgagacggggacgggggggggagagagtggtcaatgggagaggaagaagatgcaatttataggggagaaaacaccggcgaggcgggggagggggaggggaagggggggccggaagccgggggggggg

SEQ ID NO: 3366 - DNA, 405 bp, Heterodera glycines
tccataaccaaaaaaaatccccttagactcgaatctaatggcgggagcgggggggggggaatggtgccaatgccaaacgaagacgcgaaaatattgatggatttggcataatactcacattttgacgccaagagggagtttttatttaattttaaaatcattttttgagaccacccatttttaaaaattaaatgttaatcggtatctctggcgcaattttttataatgaaattgacccaaatatattcgttggcatatttttcccaattaaggatgttttcaaaaaaagaatgaaagatttacactttgaatttcaaaaagaaatgtgcccatcagcataattgggaggataccagagtgttatgtgctttatctcatgtggattttgcctggaaaatgcgacaa

SEQ ID NO: 3367 - DNA, 4084 bp, Heterodera glycines
  unsure (1)..(4084): unsure at all n locations
tttaaggcgaacatggcactgtcgcagtcgcccggcaaatttgaactgatgtccggcgttgatcaattcttcccgcgtctgcaacatgtactgcttgcgatgctcgcggacgatggggccggagaggaggcgcgcaatctgtccaacaaatgcatgagcttaggttggctgcaatttgattaattaaccttgggcatatatttgaaattctaatattaatttgccaattttaggacataaaacagaatttaattgtaatttatttctatttatggatttattattaatttagtctccaatttaccgtatttcctaaaatatagcccccggggctttattttaagggggggggttataatttaggggggggggggctatatattaggaaatacggtattttaatttggatgttaatttttattttgctaattcccctcccttttccccagtgattgccaatcacaacgatccgaatgccatttttttggtgctgtccgatatgagtgcggacccggaactgatgcttaaggacgacccgctgctggatgatctgatagagaagtgctgggcgcgggacaacaagctccaagggcgatcagcggattgattcgtccactgggccataacgatgaccgattggtctaatcgtcgatcttttttggacattccccttcattttatattggctatgctttatttccaattagtggttactgaccactagattttctactttccgagaccataagactgagaatttacctcgaggctctctgattgtgagtcgaaaccgacacccagaaaccagagaaatagaaagcataaaagaattggtctcacggatcctaatggccatttatcacaggttcacgagtatgctgtttcctactcattgaatattaacaggaatttattgaacaatttacaaaaaatgaaaatatcacaagagaaaaattattcaaaaaaaaacattgttatagaaatagatatactttgaaacgctcatcattggtcgttatgatccaatagtgggtatacacttcaaggtagctataccagctctgattggcaaaatgagcgcttgtgatcccgacgttaaggacacatccggcagatgtcatcgaactgacatgtaccatcacaaaacttctgtaacgatcgtctgatgtcaatgggccgacagcactctcaattttttctgtcaaccgtatcaggttgctgattttgtcattctccctgaacaatgaagcaaattaacaaacaaacaaaaaagcagcgtgaacaatttgaattaccttatcatttttccttctcaaataaggctgtaagcctaatgacacattgagcccagcccaccccctccaatgaactagagacttgacttcaataaaacgcgaaaaatattttacttaataaattctgtgagtgcagtttgcttctcttcaaaccattttgttgcaaaaactgctctttnttcttcaccaagcctatgtcgcacaactacaatgttaatgccatggtaaagatgaattgccaaacagtgctcaaaaggacaccgcagccaaaaattagcaaatcggtcccaatttaacgtcacgaggacttgtgacacataactaaatttttttcacaattagactgcaatgtttaaattaagtttacatattaatttattccacccacccaaatgggccccgagaaacgacttcatggttaatgatgtcagctgtgtaattgtacaagtatgggtccgtgacatcagcagcaatggccttctcaatgtgcctttctatttccattggccatgcgtcactctatggcaaagattggattaattgagcattttttgtgataaagatgatacagtcccccattactgtattatatatttttaatttatttaccagttccatgctgacccactctgaaacattccctaatatttctttggtgatcaccgcaatttcctcaatctcctctttggttttttcgtgatcaggagcatgggagaagttcgcgcacaaaccacccattaaggcctaaatttaaaacgaactacaatttaaatatgcgaataatatgaattagcattgtaatgagtgatagtaccagtctaagtgcatcatgtgttacgacttcggcaaatcgcaaaagtggccgccgcctggaagagtaactctcgtagacactgcggagaaggcacctattataggtatattaaaatactgtaattgaaaaattaatatttatttttttaaattcacttgaatgaaattatttttgttggaattaattttaaacaaaaacaaaggacaaaaacaaacgtttcgggagtagggccttttaacagatcagataaagaagtgttcagttccatcaagttggtcgaattgtttgtagccatttttccaaacactaaattttcgctttagcttcgcttacccataggatgatagataaaaaataataaaatttaagaaatttaaaacaaacattcccgcaattttgaaacggtgtgttgcgcttcgctcttcgagaacaatgcgaaccgttcaatcgtctctaaaataattcattgattgataaattatcttaggccacttattccactaattaagtgagcttacgcaaataaattgcgcagaaagaaacataatcagttgagcctttttggtctcttaatcgccggaaaaccgtatcaaagagccgtttggttttgttgacgtctgccaaatgacttttggggattgaatggcagttgacattcactttttgattaatgtactgtgaaaaatattatgattatttttaaaaattaaaaatccatctgacatttaaaacaaattttggtgccaaattccactcagtgcatgcataaaaaaactcccttttccatctgcgcactttcttcgggtcaagaatctttcggaaaattgaggaaagcgcattcattggaacgtggacaaactggggaaattttccatttccttaatgtttttaattggcctaagaatgaccgtgtcatagtcgttcagctcgaatgccgctcggattcgattcattccgccttcgattatgtttttttgttcggtgaatcttcgctcaacttggtcatgcaaaattccgagagccttgagaagagggtcctcgggctaaaatggatgcaaaacgcttagcagattaataaagtacaaagtttattttaaatgatcaaaccggaagtagctggtcaatgcacgccgccaggatgctgcccgcggggcctgttaatttcatgaaaaacttactgctctcgctgatccatttcaggtggtgaaggaagtcaaatgccgggccggaaagtttgttgtactcggccgtcaatttgctcaccaccgatacagctgaaaattgacattattcttggtcctcgtaaaacgttccaaagaaggcttacggtcgctgtccaaagtttcgccggtaatttttggtggacccaaagcaacagccaaccagcagcagaagcaaaacacctttagcatgtccgaaaatggccaaattacaccaagaaaaatttactgcaattattataaattaaaacagtttattatttttattaagaatttactgaaattttattaaattattcagaatttatagtaatcactccgtttcagttattattgccatttttattaccactttttcctaattgaccaaagtgaataacaaattggtttggtttgctatcagtaaaggtaattgatcattatttcaatgggacaaatgggacaaatggttcgttgaggacgatccgcagaattggacaatgtttcttaaaaaaagacaaggataaatccagcagaagaaaagagcggttgaactgatagtgatcactgggaatggatttttagttttttagctattttttctgcggttttatttcgacgagaaatacacgaaatacatttttagctcggaaattcttcgtcttaacgccactatcatcactaggaatcactattttggggctttgccactaaaaaaaaactattttggaagttggccactaaaatagttttttgccactattttgggatttttt

SEQ ID NO: 3368 - DNA, 1746 bp, Heterodera glycines
ccccccccccctccctctctctctctcggttggaccgcttaactctttggccattatccggcaatggagaagagacttttggcgctgtccgccctcaaaaaaagagccgaaatttgttgctacactttgtttttggctttttgttggcttggccaattcaaactgcttgtgctttctcacggccgccgtttgaagtgctgcgcgttcttcaatcagcagtaccaccgttttcccccatcgtcgccaaatgatgcaaaatgttttggacagacgcataaaaaacgcgattggggcgggcacttcgctttgtccgctgtttcggtgggcccattgatcgcccaaagctcaaaaaaacagcaaaatgtagcataaaatggagcggatgttcgttctcggcatcagtgttctctcagcttctcctccgctgtcttttcttctcccattgcttttggctgaaaattgagccaaaatacaaagaattaaaatttcttatacatattttgtttattttaaactgctctttcaatgttggcacattatttagagcacacaattaaaaagtggcatttgattagcaatggcttaatttaatattttcgataatcaaaagcactatggcaaaggagagatttcaatgagctctttcgattttcggatcaaaatcttagcattaatgagtttttaatgaggttcccctggtttaaaaaaatctgatcggaatttcaaagcatttaatgccgatgccatcatacaaattccaagaaatttcagcctgattctccaaatgcgtctttccgttctgcttgcctatttgtttctgctcctccccgggcccggtggcgcccaatttggccaattgccaataggcggcggcgctttacccggcggcgccacactgcgctcaaacccgctgattaatggtaaaaacggcgcggcgaacattgccccgccgggtgatgaacaaatgtgccaacaaccgctccaacagttcgcccttttgcccccctcccaaacgtcggcacggcgagaggagcgatgtgagtgatcggaaagtgattagaaaaggctctaatcaatttttgggttgtcttccgcaaatattgacgccttttaaaaatgacgcaaaatttcaatttaaatttccctgggttttctaaattttctcccattgccttaggctgttgctgttgttgcccccagcaacaaaatcaaatgcctcctccacctcggcctccgtcatgtgaattttggaaatttatcaaagccacaaatatttttgaaagaaaaaaagagagaaaaaagggcattaatcacattcaaaaataatttaaataatgctggtctacccacaaaacaggctgctgtctctgttgttgtcctcagcaacagcaggcgccgcctccgcccccgccgtgctgcgtaatttgctgctgcgaagaggtcgaaatttttcgaaaattttagtttttggattttaaattttcagcaaagaccgccacctccgcctccaccgccgattatccttcagcctttgccgcccccaccgcccccgccgccgcagggtaaatttaattaattttaaattttacttattttttcatttttctaatcataaaaaattcgattttttcttccttctgcttgtacagtacaccgttcccgttattaccattattaccatcatttacagtgtgtctgttgtgctgttgtgagcagcaagcgcctccccctccaccgcctcccatg

SEQ ID NO: 3369 - DNA, 4122 bp, Heterodera glycines
  unsure (1)..(4122): unsure at all n locations
ggaaataaaatgcaaaaatatatttttgtgntccctttctcaaattcattcattggttcgtccgttcgttggggctgtccaaaatgccaatgcaaaggcacgtctttcggcagaacaaaaattgagtggccctgttgatgtcgcaaagtccacctgattaaaaaacatttaaattcttaaggatttttattttatttttaaatttaatttcagctcttccgactttttaaggggaaaataattcggggaatggacagttggaaccatcttccaaatgagtctgtagttgtcaaacaagattcgatgaccttttgcccactcttgacacatgctctcgcccctctcatctgtctccaaggcacagtcaaacacatacggtgtccctaaaatggtgataattactgtaccccgaccttttatggcttggacccatggaaagttgttaattgagaaatgattttaaaaataagagaaaatctgctgccaattccctctttgcccacattttttgctgatcactggtgccgacgttgtccacgggaaaatgtcttaaaaatgacacaaaaacatttcgccaagccaaatttgtctctttccttactgccattatccgctgcagtctctgccgttacaatggaattgtcggcggatggaaaaggcgtcgactcagtggtcaaagttcggtccgacgaaatggcatggttttgaatcagttgaactgcaaaaacaggcaaaaatgactatcaaaatatcaacacacagttggtcaacagatttgttaattgatcggaaattaactagtcgtcgactaattagggctaattaatgataattgccaaatgagcgctaaattccccgtttcaatggtcggcatccaataaattataaataatattaaaatttattattataattcgtacagttctcctcccgcaggtcctccttaagaatttccagtcccccgttctgtgttgttgttgtagttgttgccgttgttgtggatgctaaatttaaattttaaatttgctttcccttggcattgtgccgctttctctctttgcccaccctcttcgatcactttccaattcgctttgaccgtgccgctctcctcatttgccacttctgcttcatgttctccgtccgccactgtttggcgtattgagtcgtccaatttattgtcattgattccattaagggcatttttctccggcttttgctgttgatccttaaaattaataatcgctttttatttttctcttaattacccctaattaccctcaactcagtgacgggaagcaattctggcggctcacctcctccaattccatcaattgatgcagcaaattcagtcgtcacattgtcactgttgctttttaataagcgtaacaaattgcagcaagtatcttctaaattaaattaattaattttataaatttatgtttaattgtccaatttgttccattttacctccattttttgtcttgacaaatttgtccgttttattcttcgggtgttcgtccctctgctgtagcttctcgtctcccaccatattctgcttctcgtttcccatgccctccagcgttttgttgcattccgtcggcgcatcgaaattaatcgcattctgttgctgttcgatttctgtatttgctgctgctgttggtaattcttgtcgttcgattactgtattggccgcttttttaaattctgtttgaaccggtgctgccgttaccgtaccatttccagttgccaattgcaacatttcggccttgttgccactgctgctcagatcgacagcagccggcaaaatggcctccggtacctccgtatatacggtgtccaccaattggggtgccactagtgctacggtactttgctccgcttccttttccgttggcactttgtcgtcggcactttggccctccctttggcactttgttatgtccaaaattagctgctgcctttcagctaatgaaccgttgttttgctttttgctttgattggcttcattgggcgtgaaaaaatcggcttggccaagatggggcggcttcaactccaaatcgaccgccgaccaactttcctcctcccttggcctgttgttgttgttgttgttgttgttggaggaggaggagggcacaattggcaccgacggcggcgcggaattggccaattccgtgcgattgataaagggaagccgagtgaaagctaaaaaagttaacaaatgccaaattgcatgtaattaagccaataaagggaattaaacttgtcaaataaaatcagtaaatctctttttaaaaaataaaaattcgctttaaaaataattttgaaataaaaggattattttcaatttttatcccatgaaaggccattattttcgtgacgggaaaatggatcagtgcaaaataaatttagtgatcattgcttgaaatgaaaggctagtatgatgaatgaattcaaagtttaagcctcaattggtaccgattaaacttacaataaccgaattacagtagttcattttttacggattttggttcatttatctgtccacgataaaaactcactccaatattttggcagatcagtgtcattccgtcctgggctgttttttgcagagattgtcgacgtttcgatggacggcccaaccccttcaaatattcgaatttacaataaaaaatttcatttaaaatgatcatgccatttttatcggtggtgctcaaatcgatgctattattaatgatattcagtgccgacggttgttgcgtttgcgatggcacgtcgaattcgatcaatttgttgttgttcagcaccgactcttcgggaaaagcgaacccgggcgacgagggctcaaagcccgggggtaaagtgccaaaaaccgggtcaaaatgtgctggtggttgttgttgttgttgctttccttggcccacggttggaccatttttaagcgcagcattggacagtgaatggtttgaatttggcgccacggtcgcaacgccaacgtcgccgctgaccccggtgaacttgttgcatggtttcagctgatttctgccaatttcagccgattcttccgctttagatgtccaactctattcaaaagaaaatgacaatttaatttttaattaatttgctcacttctatctgtgccattgttttcgctgccgtttccaattccggncacttccatcggttcgttgctgctgaatttggcattctgtgtctgatcttgcgcttctcctccgctactcctttccgcccctctctgctgttgctgttgttgttggcgttgtgccattccccgttgcctttcgtcgtttaatttttgtgccgtcactgttattgaactgctcgtcgtcgtcatcgtcgtcgttccttctgggatgcttgttctcgttctgctcgtgctgttctcctcagcagcagaaagagcaaccgcggcacgatcaaagggaaatgaattgtcgtcggacttccacgcccattggtttaattgtctttcctgttgctgttgctgcggtggtgaaatgccatttttgtcatccgcataaatttggtttttgatgccaattccaatggttttgtttgtccttgccgctaaaaatcattttgccgtgatcagattttaagaaaagaaacgaaaactattcttgaattcattgagaaattctaaactactttattgaaattaaatttgttctttagtcactatattaaaattataataggaaaattaaaccaataaaaaattcggatgaaatccgaagcaaaaattaaaatatatttaaataaaattggagctttttttcaattttcccacccctttgcgctggccgatgccgtcgctttttgccatgaacgccgtccatgttcagcaacaacagcagctgaagaagacaaatggagaacaagagcaacgaaactgtgaacgatcgcttgtcattcatttttgagacctaattaattaaaaaaaacagaaatttattgaaaaacaaataaatccgattaaaaattgaaacccaatctcgaattatcccacgaagagaacaaagaaaaaaatgaaagcggataagtgaaatcgctttgtcgtcacaatgatcccgtcatccctcgcctcccatccgatccaaaatc

SEQ ID NO: 3370 - DNA, 1732 bp, Heterodera glycines
aaaaatatcattggataatatgtgcatcaccgggcgtcaaagaataattttgtccccggtgctgctcgagagtcttgggggtttttagtgcctaagtgcaaaaattgggcgtcaaatatcagccaaaagtttatctctcgaacaacacatatcaattataaaaattattcaaatcgtaaatcatttttctgacacggcatgactgatgatggcataacacggcacggaatcggcggctcatcgtccccagccccagccgccccatgggcgtctccatccgccgccccagccccaaggacggccccatccgccgccccaaccccacgggcgtccccaaccgccgccccatccgccgccccagcgtttttctctgggatttatggcacttctgaaaagcaaattaaatttacttttaaccaaatttggcatcagttttaataaggattatggactctactcactgctgatcagcgtggatttcgtgctccgaatcggccatcagtggcgcaatgacaaagacaaaaatggcaattgcgaacagaaaatggaggaaaagttggcgatggttggcgagcattatggagaaaaaagtttaatttttgggatggactgtttgttattggattgaatgaatgaatttgtcgcgaattgcgccccaaatttataattggcgtccccccgcctttgttgtctgtttttgatcaaaacgccgccccccccccggcaaaaaaaacaacaaataatcacattcaaaatttatgtattttgtgttgattcgctgaggtggactctgtgctgattgatgatgactgactctgattattgttgtcacttgtagcacattgtgatggcattggttaatgatctggtgcagttttgtgcgcgaataaatgattatttttttaattactaattgtgcgcgaattttgcgcgcattttgcccaactcgacgaattcaaataaaaacaaattcggcaaaattgtgtgtgttgtgccaaattgggacaacaaaaaagaaatatatgtgaattaattaaattaatggaagggaaaggaaaattttgtttcgaaataaaaattgaaaataaaaataatttactgaatttaaattggcactatgatcaaaaaggaatgaatgcaattgtattattggtaattgatcacttgtcccaaagcacagtgacaatgcctttgggcggaattcgcactttgatcacccgctggcgcttctcttcgatcacttccacttttgttgatcggtttagccgggagaggagcacaagcacacgtcgagacgatggtcgaaggaaagcgacaaattcaatgccattcaaatgcgcagaacgccgaccggggcgggtgccaacaaagtctgcaccaattcgaacagatcccggcgggatgaagcggctaagacagtgctgttagcatgcttaaatgtagtggaagctcccaaccctcggaattatgggggatcggggtatcgagggctaggctcggtgaattcgggatcagggtgtcgggaaataataattctggtcagtgaccacctgaaatgagccatcacgtaaaaggtcggctgcttataaaactcgtccgcctttgtgttcacaatcaccggtgagtccacaaaattctgagcccaacttggcccaccgacggtgtccaacctaacggaaagtgccatgtgagtgatatttatgcccaatttgtaactgatcaaaccatcagg

SEQ ID NO: 3371 - DNA, 4726 bp, Heterodera glycines
atgaattacttttatacaaattgggaaaaaattggtatacagtgcaaacttttgatgtggataaaggactttttgagtaataggacttttcgtgttaaaattggggatgctttatcctccagtaacaaagttggctctggcgtcccccagggctctgtcatgggccctttattatttttgatttatattaacgatcttcctgatgctttgccatcaggagtgaaaataaaattatatgctgatgatgttaaattgtatatttgttataaagcaagaaccgaaacagaaattatgcataaagcattgcataatttatcagaatgggcaaataaatggcagatcagaatctcaattaaaaaaacttttgtacttcatttggggaataaaaaccccaaagaaatatataaaattgatggaaatataataaatgttgtggatacaattagggatttaggcataaatattgataataaattgcaattttccaatcatgtcacacaaataataaagaatgcatatttacgtatgcgttctttatttcgggttattaaatcaaagtcttctaggatttggattattttgtacaaaacttatgttagaccgttattggaatatgctcctgaggtttggaatcaatctcttctaaaaaatattaaaaaaattgaaaaatgtcaaaaatatttcaccaaaagagttcttttcaaatgcagccttccacccattccataccaacaaagattagaataccttcaactgccgacacttgaaagcaggcgaaagctgtctgatctgttcatggctcataaaataatttatggccgaacagatcttaatccctttgaaatattcaaaccttctgaacgctttaacattcccttttatagacttaactcgaaatataaattaggcaaaaaatttataccttttgcggggcgggtaactaaaatttggaaccaactcgataaaaggctcattgaaataaactattaaatcaatttaaaaataaaattaaaagtcgaattattaattcattaaacaaaaagtgatttggtcgctatttatttatttgtattgatttcatattatattttattttttggcggcgatctcgtttttaattgttttgcgctttcttgaggacattttaattaatgttttgtcctcaatgtaagcggatttttcccttttgtggactttttctttattgacaataaacaataaacaaaaatatgtacaaaaagtgtcctcatttagtattttaaaaattaatatttggtattttttaggggtacattttcaaaaaatttttagttatttttcacatgaaatttctataaattttaaaaagttctcaaaatatttttaaaaaatgaaaatatttacgaaaaatttgccgaaatattggatttttttgaggattatttccagacccggtccgctcaaaatatgtaaaaaatgaaaaatgttagaaaaaagtccaaaatatgtaccaaataagtataaaacgtcgaaatatgtaaaatatgtaacaaaccccgaatatgtaaataaagtcccaacttttggactcaaacgagagttgaaaattaaatttccgacaaaattctcatttatacaccaaaaaaggtccattttttgtggaaatttccagcttgaaatttcgaagctataaaaagttgcttcgtacataaatatccatctttttttttgtaaaattctgtaatcaaatccgttttatcaccagtcatttttatgaacgattactcacaattaatgaattatttacatgcacataaaatgcaattgaaatggacgaattcgcgagcaaaacaaaggtcaaatacatacaaacaaacaaattataattagtattaatgggccagtcaattttgaaatattcgaactcggtccttttatttgtcttgtcgccatttttttttgatcgtcaacttatcccagagcgtgtccgacggtggccaatgtcccagccgaatgtacgtggacatgggctaccggacgaacccggcacggactgacaccaaagtgccgtcctcgccatattcattaccaagacaagaaaaggcggcagatacgcgaaccaagcgggatcagcagcagcttaagccgaatagagaaaggtgggacatattttatagaattgggaaattttaatcaaatgccaaaaaaactgatcagcgggcgggggagggaatgatcattgctgtcaattgatacgaggatgatcaactgacttttgatctgatcagcggtgaccacgataatcatttgaccattgttgatcaactggcactatcaaaatagtgaccaagatgttcaattggtaccaagatcggtcaattgaatctccgttaacttatcaatctaacacggtcaattggtctgatcatgttttaccaaactgatcagtgggaaggaattatttgtcattttctgatcgtaattttgtatttttttaattccaggataaccgaggaggaagtgcggatgttcggcatggatgtgactgatcagatggacagtggtgatccgacggagagtgatcaggaggggaaagccgagaatttattgcccaaaactggggttgaaaatcatcctaatttggcggtgaataattgcgccattccgtcaatggcattcgatgaatgttcacttttgtaattattgtagtttttttcaaatttttatattgaaataataaattttgaccagcagggcccccatctttccgtccttttcaaaggacgtccttatttgagtgccaaatatttttagaatgatatttcgcgcccttttctctaaataaaaaaagctcggattcgtacttgaaatcgactctcatgcgagaaaattcaaaatttgtctatgttcaagaataactatatatttcgagatttttcttcattaaaaatcgcgattctatagataaccgttgcattgataataaagaattgcgaataaaaaaaacaaagaaaataaatgttttatataattggaacgaaagaattattgtaacaaagcatttctgagagaaattgctgttgcttctcacccaatgggatcatttgcaccccacaaatcaaatcggatattgttcaaattggcatccgaataattggcatgccgtagagcaaatctgatatagttaaaattggcgcccgaattttcgcggtttttccacttaactggcgccgtcgccgtctccccaattgggcaccgttgcaacagccaattataaattatttcgttggataatgcttcgatctcctgtttcagtgtcagcttttctttcgtccgttcgttcaccaattcaaatggttcagttggcattgtgtccacacaaaaaaaaagttgaatattgtaacagacagaagtggtggcacggagaaatgtctaaacaaaattggtaaaataaaaacgaattgacgaaaatatggctagacacacctctttgaagttttgtccaaagcatcgccatcgtcaaagcccaaatgacgaatgtttgtcgcaaaaattggccaaatttcacggataaaaacatcccaaatcggttggacatccgtatcaattgaatgcacaaacactttcaatttggtgccatttctgtcaaagaatcgcttcttggagcggagaaatttgatcacggaatagtcaatgtacctaaagcaagagaaaaatgctttagcgtacacaaaagttaaggatgactgaatttgaaggttcttaaagctgattttgttgggcaacggatggtccggcaatggaaatcccacaaatttgccatagccaccaattaatatagacactttcggttttggtccaatattgtttgcttttggtcctttgtccttgcgaattacgacacttctccaaattgtcaattcgctttttctgtcgaaatgtttgtccaccaaaacatcgaaacggtcggaaagcaatgccattttgagtccgagttgaggacggtcaaaagatggcagaatgtccatccacacgtcgctgcaaagccaactgaaacatggaaaaaatggatgggggaaaatgaaaatttgtaattttaaatgaaaattttgtaatttttcaaaatatttgctgaccggcggttcattttgtggttcaatcagcacaggtctcaccaattttttcaatttaatttgtgtgtcacaaagggcaaaaaaactgtgttaacttaaagcatagacaattaggaaaaatgagagagcgcaaaaagaacacaaaatttagagaaggtacatgaaaagtgaaaaacagtaatttcacattaaaaactttgaaattaccgaaaaggagaaaaaatggcaattttatactaaaatattagcgtacatttgagtaccgataaaatgccaatgatttggtgagatttaagcgggccaggacgtttcgcgtggtcgttttcgcgtgagtgcctgtttacgactgaaattggtcggatatgttccaaacatccatttttcgaatcccgaacccgaattcgaaaattttctttactttttttgtttttttatttcctgaggctggtaccttctttaataatttgtcagcgatataaaaattcaaaaatttaacaaaaataacaaaattgggaacaaactaaggacgcatttggcgctatattaaaagtgaccagttttgaaaattttttcaaaaggggggacccttttgctttgcaaaatttttatgtgat

SEQ ID NO: 3372 - DNA, 2873 bp, Heterodera glycines
cttcttctgctagcggcgacaatggtctaaaattattttcattttttcgacaatcaaaaattgcttttgctgctcacccaatgcaactatttccaccccacaactcaaatcggatattgttcaaattggcacacgcattattgccataccgcggatcaaatctgtaatttagttcaaattggcatccgaattttcgcaattttcccacctaactggcgccgtctccccaattgggcatcgttttaacagccaattatatattatttcgatggatgattcttcggtctcctgtttcagtgtcagcttttctttcgtccgttcgttcaccaattcaaatggttcaattggcattgtgtccacccaaaaataaagttgaatattgtaacagacagaagtggtggcacggcgaaatgtctaaacacaaaaattggtaaaacaaaaggtttcatggcaactcgtacaaaaaaaggtacttgtgtgttatctgtgggcagattttaaaaatttttatgtttttcgctataacttttttctttggcatccaaatccaagattgttggtatcattcgaaagctcttcatatgctctattagccttacaaaaaatgaaatgattttctagcctggaaaaaattttattaagaaaaaacttcataatttcgaccttttcgcaattttcatgtttttcatgtataacttttttggtaattgtttgtacgagttgccattgaaaagcaatgccaatttcgggggggggggggatctggaatcttggaattttctgggtcccaaaattctggattttttaataaattaaaatttcttaaattttttgcttttaatcgttgtttttgtggcgctgttttcctaaaaaaaaggaccgatcatttttgagttacgacgaattggattgatttgatgatactttgttttttgctctttgggcgtacgatataaaagtgagttttgaaaattttgaattttttgttaaattccgaggttcggaaacttaatttttaatttaatttaattagtaaggttttcaataagatattaagtgtacatatgttttattcgaacgaaagaatcaacaaaagcatttcggagagaaaaagagagcatcaaattgagattgatcatttctcaaattaaattatttttcaatgctttcatccgcttcttcttccgctggcagcgacaatggcctaaaattatttatattttttcgacaatcaaaaattgcttttgctgctcacccaatgcaactatttccaccccacaactcaaatcggatattgttcaaattggcacccgaataattgtcatgccaaggatcaaatctgatgatataattaaaattgacatcagaattttcgcggttttcccacttaactggcgccgtctccccaattgggcaccgtttcaacaaccaattatatattatttcgttggatgattcttcggtctcctgtttcagtgtcagcttttctttcgtccgttcgttcaccaattcaaatggttcaattggcattgtgtccacccaaaaataaagttgaatattgtaacagacagaagtggtggcacggcgaaatgtctaaacacaaaaattggtaaaacaaaaggtttcatggcaactcgtacaaaaaaaggtacttgtgtgttatctgtgggcagattttaaaaatttttatgtttttcgctataacttttttctttggcatccaaatccaagattgttggtatcattcgaaagctcttcatatgctctattagccttacaaaaacgaaatgattttctagcctggaaaaaattttattaagaaaaaacttcataatttcgaccttttcgcaattttcatgtttttcatgtataacttttttggtaattgtttgtacgagttgccattgaaaagcaatgccaatttcgggggggggggggggatctggaatcttggaattttctgggtcccaaaattctggattttttaataaattaaaatttcttaaattttttgcttttaatcgttgtttttgtggcgctgttttcctaaaaaaaaggaccgatcatttttgagttacgacgaattggattgatttgatgatactttgttttttgctctttgggcgtacgatataaaagtgagttttgaaaattttgaattttttgttaaattccgaggttcggaaacttaatttttaatttaatttaattagtaaggttttcaataagatattaagtgtacatatgttttattcgaacgaaagaatcaacaaaagcatttcggagagaaaaagagagcatcaaattgagattgatcatttctcaaattaaattatttttcaatgctttcatccgcttcttcttccgctggcagcgacaatggcctaaaattatttatattttttcgacaatcaaaaattgcttttgctgctcacccaatgcaactatttccaccccacaactcaaatcggatattgttcaaattggcacccgaataattctccccccaccccgcccttcaaaattttgaaaaataaataaaataataggagactcagaatttcgaaaattttttataaaaattgatgacaagctaatgtgataaaacaggttatttctcttcctttcagtatccctcgcaaagtttggtgcgcttgtgatcagtttctgaaaaaaaagttaagcctaaactttttggcctgtttaaaaaggaattaaaaatttttaaaaattttattcatctccctttttgatagaaaaagcatcagagtacctaaactaacatgtaaataaaatctggtgcgtttcagaaccctttctgaaaaaatatttaagaattaattatgctaaaaaataaataaaaacgaaagact

SEQ ID NO: 3373 - DNA, 7151 bp, Heterodera glycines
aaatgttgaaatcgcaggaaggaaaacgaaaacaaaaaatgcaaagacagaccaatggaaaaaaggttggcattggcatcatttcctggcaaaaaatttttgaaaaacatttccaatttcaatgaaaataaacgattttggaggaatataaaagccaaaagaaagccatgcgaaaaacataatcgaattattttaatttaattaatttgcttttattatccttcaaaatgcgcgccattctcttcctggccatggtttgcttggtgatggctgttattcttgagacaggtggccacaattaattaaaaaattaaaaatattttattattttagccaactcaaaggcagtgaaaaataagaaaggtataaataaattgataataaatattaattggaatatgcttttaaaggagcaattacaacgccagcaaaaggaaaagcggcgccgaaaggagcagcgaaaggaggtaaagcagaaaagagagagggactaattaatacaaattaattaattaactaattaattaattaaggaattaaaaaagacgcaaaatcaaagggaaaaggaaaaaaggacgccaaaggcaaaaagggtaagaattttaatataaaaagaaatttaaaaagttaatttttgaattttagacaaaaaagctaagccagccaaagggaaagaagtgtctaaaaatggtaattattttaattttaaatgctaattaaaattgaatgaatttagacaaaaaatccccaactgccaaagcaaatgacaaaaagagcccaagtaaataatttaattaaattctaattaatattgtgccaaacattgccaattttaagccaaaccaatggcagcagtgaaagccgtgccaaaggcggcggagaatgctcagaagggaccgtcgagtgcggaagtggtggcggaggaaaacaacttggacactgaggcgatcgacgacttgggggcggaagagtcggactttgaccaattggcagaggacgaactgctcgaggacgacgccatggacggcgaggcggacgaatgggaaggcatgggggaggagacggagatggacagccaaatggcactctgatggccaactaattggacaaatggtaaacggaacaaaacgggacaaatgacacaaaatatcatttttggcatttcattttcagcaaaaataaaatagaattttatttttcattcagtaaacaatggccaattttctgatgggtgtcgatccatgtggagctttttgtttaaaaaacaaaaaacgcatttctatcattttcaaaaactgaggcctttccgccagggctgtgcgaaaatcacaaaaaaactttttcgtatacgaaaacgaaacgaaaaagtgcattcgatacgaaaacgaaacacgaaacgaaaaaaaatattttgaaaaccgaaaacgaaacacgaaacgaaaaaattttgacggacgaaaacgaaacacgaaaacgaaaaaataaccattttcgtacgaaacgaaacgaaaaaaccgaaaattttttgaacttatttcaatcataattaagaaacataaaactttaaaattgtatcctctaactgaaggaatgaagatcctagtaggtggaaaagctaatgtggctctaggataggggtgtgaccaaacaatttttaaaataaagaacatcaatgacaaaaaataaggtttagggtcaaaaaagacaatcttgcaaaattggttcgaatcagttaatatataatttttcgataaaaaatgtattaaaatgttatgtttttcacatcctattatggattttaacaatttttggggaagaaattagcaactgctgaaaaaaaagactttcaaacgtttttttttgcagtgtattttttttacaagttgatgaatgggaagtgggtccggcggcgccgataggcgacgccgggaaaatttttgaaaatttgagtgctattttatagcagattttcaattaaaatcggtaaaaacatgattaaaaaatcggtaaaataaagtgcggtcatgcgggatcgaacattaatgcacagcacaaaacaaacctgctgttttcaccactaaactaaaatactcaattaataaaacttattatttctttccaaaaaagtcattcttaagggtgtaaatattttcgtctttttcgtaaaatattgctctgacgaaaacgaaaacgaaacgaaaatccaaaattttaaaaaccgaaaacgaaacacgaaacgaaaaacaaaattttgaaaaccgaaaccgaaaacgaaacgaaaaaactttagcggacgaaaacgaaacacgaaaacgaaactcaaaaagtaccaaaaatttaggacgaaacgaaaacgacacgaaatttcgtccagccctgattccaacaattaccgttgatgctctgctgctggacgactccccttggtacagtagttgttgcgatgcctttttgcctttggttgattttttcttctaagattttggattattttttggtattcttcactatttctatgcatttttgccctacctaaggccttttttcactatttggtcttttttcaacgttttttattcctttcctaaattttaatttttttatggcctgatttgatgctttttttttgcgttccgaaaatccttcgagaccgattccgagatccaaaaaaaatccaagacttttctcgactctatgccgatgctctcgagtcggtttacccgccaccctttgcccgttctcaccgtgccatcgtgtggctgattttggtggtgttggtctccgtatccttggtcaacaattgggtataaattttgtgggctagcgaatgttggcacaaaaaaggtaaatttgagtaggaaaataagtgaaaaaaatgatgtgtaattaagcatcagcagcagaagatgctgcatttagacagcttaaagcaatcaattaagaagaagaagaagtgatcatttacaattaattaattttaattattcctaaggtttttagctttttcttattcgtctaatttatattattattattattaatgaattaatatgaatgaaattagatgtcaatttttacatagcattcattcactcaatgttttggaaatcaatgggtcgataaaaatattcaaaaataatttaaataatttttattcgagtgaataaaaaagtaatgaaatgagtaaatgcattttgtaatatttgaaggtaggaaatatttataattgcttaaatgttcatatatttaaattccttaaatttttctttctaccaattttcgaacaatactttctctaagacccccattcttacctggtatagaaatctcgtgtcttgtgcaaaaacgacactagacggcctaaaacacgagagaacgagacgagcaaaatcgctgataagtaacagggatgaattctgaggcccaaaaaaataaagcaagtcgaaattctaatcccctaaaagtttcagagtcagaatcattcttagcacaaaaatatcggaagtcgggattctgggtctggtaggaactcagattctgcacctttcctgggaagtagccaactgaataggccccctaaaaagaaccacagcatgttaaattaagtatttaaaaaggttttaacgataaaaaaatgtttatttattcaattttttacaaaatttatgagtctcaaaatggtctaacgtcgcccacatatttttcgttatattctttcttcagcgggcatggccgtatgaattcctggccccgttcgtggatccatttgtttgacacccatttaacgccggtcaacacaggacaagcagcctaaatggattaattaatagtcataaaaacaatccgaaaggaatataatgaggagatttaattaaaaagattttaacacctttttagtttaattttgaaaataattttaaaatatatttttaatttaattgcatgtcttaaatgaaacttggcaaatttaaattacaaagaaaatatcaaaaaatgccgccaccgattttcgcggctttttgccaaaaattttattttttaattattttttttacgtgtctcgtgcgcagatctccgtttccgtcccggtgcaaattgtaccaaaacaacgcgtcgtgcagcgacggcgcaacgcccattttcaggtcagtgtacacagtgaagccccccgttttgggctgggacatctgagaaaaaaacagtgaaaaaaacccgaaatttaattttccggccatacgtaaaagagaacggttgccacgcgattgcctctcgagtcgaattggttcttctcttctcgctaatttgtggtgaaaagattaaaaaatttactgccgattaagaaaaacccccaggaaatttacataccctcgaaaaatcgaagtgcgggtcgtagtgccctccgatgccataattggccacctgcaattcctccgccgtgtccaggttcaggttggtcatgtcctgaaagaaaagttgaaaatttcttaaaatccatttttcagtatgatgagcagttgaaatatagaaaaacccgcatcagataatgaaatagtgaaacgggacaaattcttctcccacaatttcggcattttttggtaaataaattcataaaaaagagtcctataatcaattcaatgaattattttttaatctatgatttataataaggaggttagattttttgtgaaaagcattcgaatgataccaagttttaagaaattggccgactaaaaaaaagttatggccacatcaatttaaaattgtacgagttgccatgacaccccatattcgcactatttcatgtttaaaaatgcagtacatttctaaacccacagtatcactcttatgataactcactccctaccgtacgtctcgtcttacggtaactgcctaataaacactcacactgatgcgtttgttgacccgtgccaccacttcgtgttcttcatccttaagccatgccgatttgctgattcgatatgaggcgaacacgagttgtccagtggccgggtcgtgtacggtggcccgacgaagctaaacatttttttaaacataaattttaattattattttttaatttttacttttggtgttgccaattctttgatcactgaaatttcggcgtccgaaatgacaccacgaaaaagaacgaccaatggttcaaaacggacaatttccactttatggggtgccaacttcagaaaaggctgaaatgattgattttaatagttttaattgagttgctttttaataaaattataaactattaaagataattccgtaaaaatttcgaatttatgataaattaattaattaattttcgaaaaataattaatttctttcataaataatttaaaagtttttgtctttttgttcaacataacaacaccttgtctttcttataataacagttcaattgtgtgacattttctggtggaatttcaaattcgccacggcataaactgaaaaattcaaaaatatatttttaattattttttaaattaatttttaattaattgcctttcaaatgagtctctctccggtatgtctttgtatcgtttgtactcattctgcaattcgggcaaatcagtttggtcatcaaattcttcagcagacattcgctctttgtaccattgcaaattcccttttttatgaaattaatttaattttatagagaataaaaataattttgtttattaatatttcggggtgcaccccaaaatttcgccgggacataatttcgccaaagaaattttctttttaattttcaaattttcaagaaaaaaaacattagaaaatttttttatatgaaaattccaagggaaaaacatttgtaaatttttttagccattttttgaaaaatttcgaaaaaacttattaatttaccataaaatttttttcttaaaatattctaagatgaattttttttaattttcgaggtgaaattttgtccaggcgaaatttcatcggcgaaattttgtcccgttcgatatttaaaaaataatttcaaattaattcttgtagatatttcgataaaattaatttaaaatttaataatgctatttgaaagcattgcaatctttaccatccgccctcggatggttcggtgccaaatatgccaagcgtcgggtgtatgccaacgctctgccggggttcccctgctggtaaagcgcgtaggccaagtactcgatgatgtccacttccaactcgtggctcggctggcgctctaaagcttcttgcatccattgcaaagtgtagaaataattctaaaacaaaatcattagcaaatttaatttaatcagctaaatttcggcactgaattccggcacttgccttttggttgtacgcggcacggccgacctcgaaacagtcgtgcgcattaagcccagtgccgacattttcgccaccaacataaccatttgcgagatcgccgcttttcagctgataggtatcctaaaaaagaaaaagaatcattagcacattagataaattctgagtttaattagtgagcatgttgatcagagggttcgacccggatggccactgggactcggcaccccaaaaactgtgggattccaaattctatattttatatgggaaaaataaataaaatactgatttatacagtcatggtcatatgtttaacaacactcaaaatttctaccaaatttgatttaaattgattataaaatctcaatatgactatattgtgtatataggtatgttttatatttcttgtagcattttttgtgggctttataatgataccattcactgtcccctgtcaaaatgttattattagttacaaaccattttaccaactgcactcccttttggggtggtcatatgtttaacaacactacccatattttttttcatcagcattaaaaatctaaaaaattcaggtaagcataactttggatgctgatcaaaaaaggtagtaacaccaagttgatcagatcactccttcatggtgatctgatcagcccattttggctgggaacgaggggtaaatttcaaaaaaatttctagggggttgggaaaattttctggaaatttttaggcccattttatagagcacaaaatttgctaccgaattgcctttggaatagtgggtctacgatttaggcccgctgagatacgtcgacttt

SEQ ID NO: 3374 - DNA, 3726 bp, Heterodera glycines
  unsure (1)..(3726): unsure at all n locations
ttcatcagcattaaaaaaatctaaaaaaaattcaggtaagcataacttgngatgctgatcaaaaaaggtagcaacaccaagnttgatcagatcactcctttcatggtgatctgatcagcccttttcaatggaacgaatactgtaaaagtgagatttcttggtgctatgacgttactcaaaacccatcnaaaataaaattttttgatataaattagcttatttttaaatgtagccttccgccaattccataccaaaatcgattagaatacctgcaactgccaacacttgagaaaaggcgaaagctgtttgatctgttcatggcgcataaaattgtttatggccgaacagatctgaaactattttctatttttaatccatcagcacgctttaacatccccttttatagatttaacacaaaatacaaactgggcaaaaaattcattccctttgctgggagggtaacaaaattgtggaatcaactagataaagaactaataaaaacaaattctttaaatcaatttaaaataaaacttaaagttcactagggtaatatgtaagaccgggaaagctagaatgtaacaaatttctaagtgatttggtatttcgacctcatttgactttgacctcaatttatttattatttattttcacatatttttgtctttttttaattcctgtgatcatccatatattttgtcacttactctacgacacatttaccggaatagtcgtcagagtaagtggttttcgcccttctgatgacttttttattttttatgaataaacaaaaaaaataaaatgttttctattatcctgcaaaatttaaaaaagtttcgttgagtataaagcaagtttcatgaccaaaaatcttcaagaaaacttgcttttttgagtatctcaggtcataagtttatttaaaacttaacgaaattttttgaaattttgcaggataatagaaaacacttagttagggctatcgtataatttcatcataaaatttgattcattttttctgtcaaaattttttattttgatggttttttgagtaacgactcggcaccgatttcttgattgtgccctttttcgttcaaatcgcaacccttctgctttccaagacaatcagtatttatattaaaaaatttaattgagaattttcaattgcctggagtcttagcagtccttgagcagctccttccaaatcctcagagtccggatattttatctgaatttaattccaaaagcaaattctattattcaattttcatttttagcaccgcattttccattcgttcatcagtgatatttttgatgaacaattcgccttggtttgcgttcatcaaacttttgatgcttttccaatcacgcgccatccgtttgatcagcaaataggcgctgaccggatttgacaccgatgcttcttcctaatattaagaattaatttaaaaaataatttaaaatgttttaaaattaatgccaaaaatggcaaagttttgtttaagcattgcattaacttactttatctttggtcaataaggcttgtttctgttgtttttgttcagataatccccgtgcgtattcttcggcaaggctaaataaagatcaaaataatttaaacatttaaatttgttttttccctaattttaattttttttttttttttttgttttgctcaatttgcccgacttgctcagctgttccagcctgttcttctccgtttggatgtactgctcgagaagttctggtgttcttgccgcttcacttgccaacaaattctccaagtcgaccattgcagtgaaaacgtcaaattttgcacaatgaaaaatgtttagtaaaatgagaagaaaataaaatatctctttcattttgataattcagtcggctaactgaaaaagtcatttaaaaagaacaaaaaaaaattgggggatttatgaaataaattattgaatcaaaaagagatatttttagcagttaagtgaaacagatttgaaaaatcttaaaaattaaattaggctaacaattcttcgggcgggcgcttgtcggggatggggcggtcaatgggcgtgcgagggtcgagggagtggtgacaattaatcccaaattgcttcggatcggagaggtgtattttgatttttgagatttttcatttaaatgttcaactgatatttcggaaatgaccaactcaaaagttcgggcaaaagaggcggcattaacttaattgaatttaaatagggtattacactttaatggggggacactaatcgtaaacattatgttggcatttaattggcaaataaaatgtgcgcatttaaaagttaattaatttgttgccattttataagcaattttttagtgaccaactccaggttcgggaaacaaaaggcgattaacctaattgaatttaaatatttcattattaacggggatgggaacactaatcgtagtcatttttaattaagtggtaaataaagtgtgtgcatttaaaaattaattaatttgttgcctttttataagcaatttttagcttgttgtttaacgtgtcctaaacacttaaaccaacggcgcgagcactgaatgactgggagtgaatgaatgacggagttttgtggtggtgcatttgttcgcccgtggagctgtactttgagcgatgatctcaaattatgggagggggggggggcgggcgggaggagcgcagtgcgcgacttttttggggttttcagcagcagcagctgatcaatgggcagcgcccgcgggggaaagcctaaggcaaagagcgattcgatgggggggggcagagcaattaaaatgtcagtcttcagcaacgatagcagcagcaggtttcacctccgttttgctggatattaatcattcattgtccggtgtgtgtgaatgtgctgctgctgctgttcgttgcgttaacagttattttcattaattaattaattaattactactaattatttttttaaaaaatccagataaatgacagttacaaaattgacgataaattcagaaatagattttctgttgtcttcaagttgtaggaagattattaatgggtcgtttgaacaaggttaaatcgaatacaaaggtttttaatttttaaatggtgtaacgaagaagctgagttttgcccattttcattatagcattaaattaaaaaaatttccttgatttggcacaggcaatgccggattcctttttatttttgtgtaaacaaaacaaatacatattttttgttggcttaaacagtgcgggaatcccattcaagcaatttttgacggaatgtaatctttgtgagaactggaaaacatgggatttccaaacgtattccgtcctgcatttttgaattgcaattcccgctcccgaaaattcgaatgtagttataagcaagaggttaatcctgctgattttcttaaggatgggttttttaaatactaatagcatatttatgttagtcaacattgtatattataataagtagaaaaaatcatttaccaaattctcttacaagtcaaagagtctctccaacctttgtaatactttctgatcagatttttcctcatattggcattttgagccctttttttcatgccgttttgctattctttcttctcccctttttgccatgcttttactgagctgctcgtcctcgccatcttgcacgggcactgcacgcttcctgcacaatccttacaccaatgtgccggtgatgtgccacccgtcctc

SEQ ID NO: 3375 - DNA, 2496 bp, Heterodera glycines
  unsure (1)..(2496): unsure at all n locations
tcggcgatttggtgccttttccgtcaacacccatcgcgccaatggacatcggagagatgactccaccaccgttggtcatcgacgaccgatcagagcgcatcgaacagctggagatggagctcaaggaccgggatgacaccatccaatttctgcgggagcaggtgcgcaaccgtgatgcgctgatcactgccatgcggcgccagcgcatttgaacaccaaattgaggagttccgtggttttctggcccaagaacaacggatgcgcgacttcctatctcagaaaccgaaggcccacttattgctcaatcatttcgtcccatttgctcggcaacattctttcctcggcttgctggacgagcagggtgggcagcaaaaattaattaactcaaattttcaaaaacattaggggatgaggcacttcattcggtttggagaagactggagcaatggtggaaatgcatgccggacgcggaccaaattctacaacaattggagcaccattttgtcagcaattggctcctcgacaccggcagaattgctgagatgaagcaggcgagttttgagtggcgtgggaaggggttaattttcccagaaatcatttgaattttaaacattttagaggctggaagaacaaaaagaagacgacaatttttcggagcattcggatggtgaaaatgatgaagactcggtcatcgatgttattgggtgatcaaatttttgttttttaaatttacttaaaaaatttttagaataatatgacttaattattttttctttattcgttgagaaaaacgtgaaatattgcttaattacatatataactcaggtgggattgaacctgggactccctttttggtggcaaactcacagaccactaagacaaaaaatcaattagtttttgaactggggactcaaaattgactcggtgtgtaaacagtgccttatatgcaatagaattgaaaaatttgaattttccaaaaatattcgggttcggaattggtcgaaatggatgccggattcgtggtcagcgaccccgaagacccctcgaaacatgttttcatgatattgaaatttataaaaatgttcgagttcgggtttggggttcgaaattcgccaaaaaggaggccggattcgtgctcagcgtctcaaaaacacccctagaaacgtgttataaaaactttcagaaaaaaattcaaaaaaattgttcgggaccaatgatcgacgtattgccttattcccgtctccgcggttaacgcatcaaatttataaacatatattgaatcgggagaaataatttgtctttttttgtttcgctgtgcgcccaatggaactcccacgaatgaccccatttatgttcgattgcttttaacacggcggagattcctgagagatcgcgaaacaccgtcgatgggtcacacccattgcgttttcgccatattacccttttccatcatttacaaaactccaatccatttgtagttggaaatttgcaagttcattcaatccaaaacccctttaaaaagccaattatgtaatacttaagtagtaattaagtggtggttttagttgtttttccccagtctctttaatttaaaaagtacaaaaatctgttctaagtgctgcaaatccaacatttttggtcattgtttagattatctgaatgaaattactgaatttatgctcagagtctttggcagattccttctgccatttgtttgccgaatatttgcatttggtgagtcattcaatcatttattattcatttattcttttgccatttgttccaattgctcatttacagcagggctcggatctgttcttatttataagaaatgttctgatttcgggctattgtcctaattttattcttatttcttaaaattcttctcagaaaatttgtaattttatggcgtaatgtcacttagattttcaaaattttccacggcggtacctaacggcaccgccgaatttttttttttttgcaaaaagattatattaggggttttaaatagagtagagcgggaccgggaattttgggcttaaccgggaccgggaccttttcgggctgaaaaaccgggaatttttggctgggaaaaccgggaaaaaacccgggactggtcccagtcccggtcaaaaccgggacctcggtactcagttgtactcagttgtccgtgttttggtcccggtcccgctatactctagttttaaatatcggagaatccttgacctatgtctaaccccgaatccgggttcgaataaaaagtcgaaaaataaaaaactagaaaatagttgctaataatttgaaaactagcttaacaacaaccgaaaaaaacatgtttttttcgtgcatttcaggccacgaggagctcaggaatcgatttttaggggtgtatctttcttttttaagtcgatttttaggggtgtatttttgggtttttttgaatcccgaattatgnggtgtattttacaaaatttttcgcccaaaaattaatatttt

SEQ ID NO: 3376 - DNA, 2997 bp, Heterodera glycines
gggattgtaaaaattgattaaaaatatttaaaaagaaagttttaaaataaaactaactcattacgatttttaaagtcggaaaagttttttacatcaacttgatcagttctttccttcatgggaaaaaatggcttgtagaaaaaatttctaggagtgaaaatttttaagaaagtatacaaaattctcgtttctgaatacggtaatttattgttattttaatttcaataaatttaattcgaaaaattatttttgagaaaaaatttgctccaatattttttaaatgtgattttgttttttttaattcattcattttttttataactttgacagttcgttttctctgcggtcgcttatctcattctcagcgctgcccgtgaacaaattttcaatgcgaattgagaaaaaatacgaaaccaaaaacagaaaaaatatttttggtttttggaataaaagggaaagaacaaacaaaccgcgaaatgactaacaaataactcttgatcattaattgtacgctataaatttataatatttttgttggctccggtttgctgcaatttccaattacgaacaaaaatcggaagacaatgacaaatttggcatttttttcggaatttatcgttacgacgaaattatgccgtttgactaattcgttttgccgttttatccgtcgtttgtcgttcataattttgattggccccggtcgggtcactcccgacgaaggattggagtcgtttaagagtgtcccgtcgtttggtcaattgccttgcagttttaggttttggaaataaaatgtggtttcaaaactaaaaaatcattccttgaacataaagggtacgccaaaagtctgagttttttctattattttttcctgaagcattttacaggaaattatgggtttttttagctttatcttcatcttcagtactgctacaaacatccctgcaaagaatttagacattgttttggcccaagaaaattaggatggtcattgattgggtataagaaaaaattaaaaaaaacaaagttcgatcctctttgctctcggtctcgagtctcaggaaattgtcgatctcgaagaacactactattcatccttcctcggttatagtgtgtgctggatcagaaaaagcacccttttttgtcaaccccgggacaacaccaaaacaattagtatctttggaaaatcctaaagagggtcgttaagtctttcttgagtggtgggccaattttccctgctttatcagtgcccagagatggccacagtattctcctctgatctcaatcctccgatgggtttttttgtctgtgagcaattttggaggaaagggtacggcaaccccccttctcagagaataggacaaaatgttcgttcagaactttgtgtattttcaatttggtattgttgataaaaggagccaaaaatgactgtttgtccgcttatgaaagtgccaaaatcattggataggatttgataaatgtttatttgattaattaatattttattatgtaattgttattatgaaaatgagaggcaaaagaaattggagctaactaaaaaaataaaatattatacaaaaagggagagaaaaagcgaattttgtttgtctttttcttcgtctcctcttcctcctccttgtctctcttcctcctccttttcctcctcttccctttcatccctcaatgtttgtcttcttcttcgtctcctcttcctcctccttgtctctcttcctcctccttttcctcctctttcctttcatccctcaatatttgtctttttcttcgtctcctcttcctcctccttgtctctcttcctcctccttttcctcctcttccctttcatccctcaatgtttgtcttcttcttcgtctcctcttcctcctccttgtctctcttcctcctccttttcctcctctttcctttcatccctcaatatttgtctttttcttcgtctcctcttcctcctccttttcctccttcctcctctttcctttcatccctcaatgtttgtcttcttcttcgtctcctcttcctcctctttgtctctcttcctttttctcctttccctcccattttcttcctcttcccttttctctccttcatttttcaccatcggttgctgaattccaataatttgttgcaaataatgttgcagaaaagcgggtgcattggtagaagattcaaaaactggcgaattaaaaaacgctggcgaaggcacggaaagggccgaggaagaagcggacaaagcggcgggagggggcggaggaacattcgccagcggaggagggggggagggcacgcgcgacggaccaccgcgagaacattcggcgagagaggcaatgtccgaaaagttgaattgcttctgctgaattgcggaaaaggccgatgtgagacagctcattaacaaatgcaattaactaattagtgattcattagctgcccaagaacaacacaaattaagcataaaatgttgcgaaatgtctaaaaaattcttttgtacccccatttttatttttgtttccctaattttctctttattttttcactggttccctctctttctcaacatggcatccccccacctgttgttgttgtttgttttgtgcttctcctccacttcttttgtccttttccgttatttctccttctccgattgaattcgttcgttcgctttcgaatgagtgaaaagggcggaaattggccgaatttggcggtttgtcgtcgttggccatttgagaagtgatgaatttgcgtgagtttgactgattgtgagacggaagcgacgaggacggagaagcgaccggcggagggtcggcatctgaaaaagcatacggtggggcgacggacgaaaagcgcacctccgccagcgaattgctcagctgcggtcgcactttgctgcgtggaagccgcggcggctgcaaaatttgccattgcctcaacggacgacgaactgatcaaattggcaacggaggaacagccagcagcagaggccgagctgag

SEQ ID NO: 3377 - DNA, 1372 bp, Heterodera glycines
  unsure (1)..(1372): unsure at all n locations
caagggaacgtaacgcatgggcaaaaggaaggcaaggaccancttggaaccaaacttggacacgcgcctcggtcagggccactttcgcggccaggtcttctctggaaaagataaggaatgaggaagaggagggagagaaagcgaagagagacaagagaggggataaagggagaaacagcagagagagagatagaggagagagaagcagtagaagagagaagggagaaagagcaaacgagacagggagaggggagaatgaacagatgccatgccgacttttataaaattagaggcaattagagtccaatttccgagccataataatttaatgatgaggtcaacagcaaccatttgaattggcgaatgttccgctcacatacgctcaatcggcccatttggctaattgccgttgcaattgtccaggaaaagcggcgaagggggggggtaaagaaatcggaaaaagaggaagaaggaaaaaggaagaaatggaagaaagaaaaggagaaaagggaaaggaagagagaaagggataaaagaaagaagaaaggaagagagagagagataaaagaaagaagaaagggagagagagagagtgagagagtgggggggggggtaaagaaatcggaaaaagaggaaggaaaaaggaagaaatggaagaaagaaaaggagaaaagggaaaggaagagagaaagagagggagggaaggggggaaggaagaagaaaggaagatgaaaaaagcatccgacataatctctcccatttaattgcctttcccactgttttggctttaattatcgcattattatttttcttattttcgctgtctttgcctttccgctgtgaattaatttgaatttgatttagtaaattcgttctactgaggtcccatactcaaaacatggataaaacacttctataggttttattgggtgatgaaacgacgcaaccaccaaaaaactgcacgacaaagcgtttaaaacgttttagaacgattaaaaactcagaaaagtaaacaaaatcgcgcaattataacccttttgaaaaggtaaaacatggacaaaattggtaccattccagtttttaatgagttctgtgtaaaaacagagaaagaaatcgaaccgacgccatttgagaggtttttaccttaataatgaataatgtcccctccctcctctttttgctcatattcgattaaataatccgataatcaaaattaactaaaacatgcgaagatgaagcaaaaagtgaattgggggagatggagggcgcaggaatcattctgacttataaaatttacttcggatttttgattcgctcaaaacctctcaaatgacgtcggttcgatttctttcacttatttttatacagaact

SEQ ID NO: 3378 - DNA, 2699 bp, Heterodera glycines
tattttttaaaatatttatttttgccaaattaaatccactttggccaagtgtaaaattgattatgaacagtttaaaaaaagcttattaaatttaaaaattattttttttttaattatattataggaatttgtttcaaattatttagttttcatttaattttttgggccaaaaatttcaataatcaactttttcgccaatatttttaagtgttttgattctcagttcttattcaatattttatagtcaatgtagtggacaattctttaaagagtctttaattattaaaatttattactatttaaattaggcggctacatgttctacacatataacatattttttatttttgactccgtaatcttctaaaaatatgttttcgttgagttatgtattttgaacatttcttagaagtcgggttcgggttttggaattttgcaaaacaaaggtcatattcgtaataagatccataaattaccttagaaatgactttttatttgaaatttcaaagtggggtctcaaaatagaaaagtaccaatttattgtgggaccttagaacaatattttccttttgattttaatcaaattaaaatgtcaaatgttttccattgaatttgatttctcgctgtctcttttttgagttttttcgttcatttgtcaattaaaacattttaaaaatgtgcaaaatacgaagacccggcttttccattcgcttttcgcttgtccatccattggatgatggatgggccatggcctcgagaaattttggaggatgatgaggacgggtaattgtgctgatggatggcatggcttcgggacagatttggccaatccacagaaacaatgcattccaaattggattttgtctttgccatatgattgggaggggagggggggggggagcgttttgactccaattaccgtacctctcccacgggtgacttaatttggcgccattaactcagtccgtcggaatactctctccccctgcttaattgcccttcaaaattttggccaatttgctcttccggccaattgttgccgtcaaagagggcgaaagaaggtaaaggtaaccgccaaattgttaatggctaatgcactgtccgtttttatttgctcattttgtccttcattttggagaaatcgaaggagaatggcggaagaaaatagaaaaagaaaataagagagagagaaacatttgaaggcgcaataataatttcccctcaggggaaaagccaatccctgcggaaaagaggtaccctcgggggactgcggaagcgagaaaattggttggataggccaaattaaggaaagatgaaagaaaatgggcgggggcggagagtgaaagacggacagaaaatggacggtgaatttgaacgaacagggattaattgtttttggcccaatcggtgccgaaatgacttacctttggaaacagtccgggtactgagtgacggcgaacatctgaacatgtttgcccgtgttagcagttccccgccgctttggcctgctcaccctctccaattcctccagttgattggcactgaacgtcgttcggtaccgtctctgcttgcccctcttgcagctgtcctcctccccaccgcccccgctgtcctcccctccgccatcgccgccatttccgctgatgccattcaacggcgactgtccgttgccgtaatcggcgatggacggggaaagtgccgacttcgtaaggcgatcgggagagtaaccggaggaagaaacggtggacatgcgccgtaaatgcacttaagtagcaaaatgacattgcatttcttcggcatccctccctcccccgcccccaatgtgccgtgcccactccgtcctcccaatcaacctctttctctttcttccgtatcccctccttcttgggttggcattgcttccaacttgctcatcgccccttcccccctcaatggtgccgtttcgtctccatccattgcgcttttgttcgatgaattcgcagtttcctttccgtctcctccccgtcgttcatttttctccaaaaatgccgtcatttttttctcattgacattttttatctgttgcaattgatcttcaggaatttgtgcacaatttggaagagaattggacgagtaaatcgcggaagagacgggcccaagaagagcggcgtgaggggggaaaagcgcaaaaagcgggggtttggccataagttcgacgggagagggacccgaggacgagccgaggcacgacacgacgcagttcgacagagggggcgaagtgccggcggacgcaccgcccgaggccgagacgaaattggggggaagaccggcgaggagctgctgcatgtgcaaaagcatttgagggatttgttgaggatcctaaaggaaaagccgacaaaaccaatgcgaaagaatggaaatgcaaattaagcaaaaaagggggtgccgaattgacctgttgctgttgggcgagaagcaattggacggtggccatgttcatattggcactggcaaggcactccaaactttggctcactttttgacttggactgtcaaaccgacgggatgccgtcttttgttttgggggaggagggcgctgccgttcactttgctggtcgaggggcttaatttggttggccagattggaacaatgggaaagtccgaattgtgctgaatgaacatattcaaacatggaaaagggaatgaatgatttgatctat

SEQ ID NO: 3379 - DNA, 1759 bp, Heterodera glycines
taaattgaaaaacttgacaatctctacattcgtaacacttaatcgacaaagtttaacccctgaaaatttttgaaggcgaagatctaaaaagtgtcgatttcctcttttgatttttaaggtctgcggagtgaaaattagcatagaaagggagggatggaggtggtcaaattcttttttcttcccacaaattaccaatgggcgaagaaaagcaattaaaaggcattaaaaggcaaatcgaatgattttcccgtaattacggtgctttagccgagtgacttcactgaaagtggaaatttcgatcagaataaaaccaactttatgacagaaataaatggcaaatgaatggactgtttggtccgtcggtcgtaaaaacacttttaataaccaatttttgaaaagcgctgagaaaatcggaaaattaaatgataaagtggaaaataattgtataaataacaaatttaataaaataaataacgaaattaaaaatggaatgtttttgtatcccacttaaggcaaaataaaaccaaaacaaaagtgaaaatggtcggccattgaacgggcaaaatgatggcacaacaattgtcaaacgctcgtccaggaagaaaaggacggatgaataaatgaataagggatggatgatgatgagaaatgaaatggagaacggaggggggaaaggggagagagagtgagggagggagagagagaaagcgggagagagagaaagagagagagggagagagtgagggagggagagagagtaggtagggaaaagggaggagagacaggagagggggggggggggtcattgcgcatgacgcttgaggcaattagcaggaatattgctacgggagcattaaaagacagagtatggaagaacacagcaaagcatcccccttgccccccttctttgccataacaattccccaatttgtttgtttgcccttccccccccccctattcaaatggtcattttcctccccacctgtccatgccctcaggcgaccaaaaaactgctaagagacggagggaaaagcgaaaatgaagtgccgaaatgagaaatggagccattcattgaagcgggaaagatggccttaagcataatttgtcgggggacggcgcaacaccgcgacaggtgtaagacgaacaaatgagaagaacaaagggaaaatgaagcaaaaacaagcgaaatttgggtgaattttgggagaaatgaaaaaataattgcaaaaagagcaatttaaaagcatcgaaatgatcaaagctaacagaattgttgaggtatccaaagaagaatgatttgtgattgacactcaatttcccaattccccccccccccgccgcctttctctgttaattttcacgcttttccgtttgcatcatcggcagattacccttcagaagtcaatctccggggcacccaatccatcggcactttccccgggcggggattattagctcaaatgataagagagcgtatttaagtaaacatcctctcccccccccccccttccgtccctccgttctcttcccaacccaaatgaacgtcacatgcgcccgcccctctctcctctctttttctcattttcatcaacaaattctttttgtcgcgctcttttttccttaatctcttatcgtcacgtctaatctcagcaaattagctcattttttatttcaatgcgtcaaattcatttttttgtgtttataagcaaaagacaattaatgaaatggccaaatagcggcaaataaaatgcaataaagt

SEQ ID NO: 3380 - DNA, 3438 bp, Heterodera glycines
  unsure (1)..(3438): unsure at all n locations
atcggggcacgagggtggtggtggtggcggttgttgcgtgccaaatgccaccgccgcctggacgcgtgctattaccacctccaccagcggcggcacgacgtcgtgcccaccggaccagccgaacgggtgccaccgcccacaagccggtgagcggaagtgccgagtgaatcgaaaaattttgttcgaaaattaattgaaaaatggaaacttgaatttttggaaaattaagaaaaatactttaaaaaaaactttgcatcgaaaggcgaagaaaaatattaatattatgaaagccctaatgatggcaacagcctataaaatttcaaaaattttattaagttccaaaaattgatcaaagtcaataaattaaattttcatagtatcatcattcgaaatgccgaaagagttttgtatgataaattaaattgattggcaaaaaatatgaaaatgcgattatttttcaagtttttccatgactacacattaaattttttaaagattttttttcaaaatttcatgttttgattaccggcaaatgccgcagcacgctgcgcgggtcgaccgcgtccttcacagacggttgtggacaacggttgacgagtttcgcctgctggtgcagttgtgagcggagtacggtagggcaaaatcggaaacggtaattggatttaaaagttatttgaatttattcaatgaaattagatttaatataaaggcagaaacaaaaattgaaagattggaaaaaaccagtataaaaataagtcaaaaattaatgatttttaaaattaaaaaatcgattgtagtgtttgaaaaaatccataaaaaaggacagttcttgtaaataaggactaaattcaggatctctgaccctattatatcacctgtctgttaaacgccagtcttgaccgtttgtccgacaaaatcatatgatgtgaactggaacgacgctttgaacgcttcttttcgcttaaaaaataaaaatatatttaaaaaataaaattttaaatagaaattttcgataaaatgttttaattttatttatgtaaattgatgtattaacccatttttgtgctgattgaaaatgttctgcactgttctgtcaccggaaagaaacacatcatcattgttgtcccgcagaagtgtcgattttctgacagtcacattctgcaaatttattcgaaataaaaaaaaaaaattatatagaattcaaattttgattttatatttgaatgaaaacaaattcaaaataagatgaattaattgaatccagattatgccgcctgatcattacattaagtccctggacaaatgctcagatacttataatacagattaaaaaaaagaaaccttaaaagacaaaaccgaaatgcataattcgaaatcccgaaaaataaaattaagaattcaaataaatcataaaatttcttgaaaatcctcgataaatatttattgctaacatcctttcgtaaaaatccctaacccaaaccaaaactttgaaatttcaatttgtttgaataccaccgacccgatgttagaatttgggttcgggatgtcagattgatgaccaacgatgccaaaaatttgttttatgaaacagatatatatcatctttaaaatttgtaaaccaatggggtgtcttgtctcaccattggtttttcgcctattttcataaatttttgtaacccataattaagtgttaatcccaatcaattaggctaattactgttcacattatcccacccttagctcatcctgggccagntcaatatgtgacgatgttgctcaagttcagctgtcaagcactcattttttttgcgtagctgccgccaaatcggacacaagctgatgaatggttgatttgttctcatacaagatttgctcatatttctgaaaattacaatatnnaattacaaataatcnnnttaaacaatagaaaattctgcgttttaattgaatgataaaaattaataataatnntaaaanttcgnttaatttacaaaaaatttaataatgaaataacaaaattggttcaataaattaatattaaattttaatatttaaaattttaaatattttataataaaatgttcaaaaaaaaaaattaattcgacccatttttacccaatctgtcgcttcaggcgattgttcaattcggaaagccgttgattgtcctgcaatgagaagcgcaacttgtgctgtagcttctcgatcatgccaaactgttgaagaactactaaaaaataaataaatatttagcttgcttatatttgaaaatcatagtttacaagaaattaaattataaaatagttttaaattaaaaaaatgataattactgtgccaataaattaaataaaaaaatgatagataattactgtgccaacaaaagttccaaagtgttccaataaaattaatttttatgttttaggtcacatattcagcaaataaaaactcgtcattaaattttaataattaaagaaaaattaaaaaataattatttaattaaaaaagtttttttacgaccttccggattgatcagattcatattccgctctgaacagatacgtgatgaaagctcaaaaaccgcaagcgtgtctgtatgcaatttatgttccattataattctaaaataaatgctaaaatataggagtgacaaattttttgaaaatgaaatatatataaaaactaggtaatcctgaagaatgtgtgcccctaatttttattattttttaaattttgggtcaaacccagtttttaggggttttcgagggtgccgattatgaacctgaactcggatttgcccaattccgaagctcggatccgaagtgcagcgaatagatgagaacgactcggatgattagatcgtattgattatgattggacaacgtgcttcggatgttagatgaacgacagggcgaatgtcgggtcttcgttatatgatgtaaaaagggatgggagtggcatggacaaaatggtcataataatgaaaaatgattatgtaaaaatctattaaaaataagaatgatgtagcgaacgcggcttttccgattggaatgcttacaaacagaagcatggcaagtcataaggaattggaaaataaacgagataaaaattaagggaaagcatacgcggaccaagaagtggagaacgaacggatgctgacttatttgaggttagctgaaaatactaaattaatttgaaattgaaatacccaatatttatagcgccaaacagttcattgacaaacacaacgaggcgtacaaagagggcaaagtgtccttccgagtgggagagactcatattgccgacctggtcagaaatcccgaactgttgttcgaatttccccctctgtttcagcccttttccgaataccaaaagctgaacggattccgtcgtttgatgggcgacagtttgcgccgcaatgcgtccacttttctggcgccaatg

SEQ ID NO: 3381 - DNA, 2129 bp, Heterodera glycines
tccatcctctcggcacccttggatggaggtggtacatgaagaaacgtgggtccgaggtataaaagaaaaactaaactcaaaatacattggtttgataaagaatgcccgacccgaagtgcaccaggaggaacaagaacacctggaaaacagattttgagtacagagaataagaaagctcaattagggacacccattcttcacgattgcataaggactagagttgagcgggtccggaaaatttgacaaaaaccggcaccggggcagcgaaaaaacccgggaccgggaccaaccgggccttttcccaagtgaaaattttttttgaaaaaaattgaaaatttaagtgcactttgttacgaaaattgccaatattcaaaaatgtaccaataaaattttgtatttacgttttgggggacgagttcgaggaaaatttttaaaaattttgttttcagggggggggggggttcttggaattttctgagtcccaaaattctgtattttttaaaataaatttacaatcttttaaattttttgcttttaaatcgctgtttttgtggcaatgttttttcaaaaaacttttttggaacattgggagggggcggagtccggcggtgccgataggcgccgccggaaaaattttgaaattttgagcgagatttgttaacagaatttgtcaaaaaatgaccaaatatttggttaatttatgggtttttaggctattaaaaatgaaaaaaataataattttaaattaaaatattttttattaattaaattcaattaaaataatggtaaagaaaatataaaaaaattttctgttccatcagggaattgaaccgaagagacaaataatgaaagtaaaaaggtttagccacttgaccacttatgcatatgaacacatgctataaatgaaaataaattttttcaaaaatttctgatccctcaccaattcccttctattttctcacccagcccccattcttaccagtacttatttagtcccgccgggaccgggactggcaaaaccgggacagggatttctgtttttccaaaaaccgggatcgggaccgggacttgaaaaacccgggatttcccgccccggtcccggtccctctcaactctactaaaaactaaaattcattaaaataatgttttttaattgataaaataatattaatctttatttaatatgatttaaagttattttattctttaggaaagttgggtaataattaaataaaggaaaatgaaaaaaaaaaaattaattacacaaaatgctcattttgttggggatggcacggactaaaaatgtgaattgattggtccgttcgttggctggttgtgtgcctgtgacctgacctttctttttgagatgttagggagaatttgttaccaattttttgaatttggcattttagcgggcaaatcaattaatgccataggcaaattaaggaacgccgactaatttttgcaataggcaaatttaaggggggctcggcaacgatttggccaacataaaatttaaaaaagattatataataagggtggggatttatttttgtttttaaaaagatgccaatactggaagctaaggtctataacttgatatagcgccaaaaaaacgcgaaaaatattttggctaaaaattttgatttttaccccaaatgctgattttgaaaattttcagttgagagccctggtttaaatgcatgaattgtttaaatttcaaaaattcataatattcatttgattagatagcccaagggtttctctattattctatctaatttcaaacaattttatttgagttataaaaaaaaaagttaaggtcaaaatttttcagcataattttcgaagaaattttatcaacagaaatctcatacacaaaaaagggatagaaaggtaatataattaattaattttttttttttgattttttttgttgccgaatagaaaaatgatttgtttttggttttcttttaatttagcccgaattgtttcatctacatttgcatgtacatagtttgttactcatcataatgtaagtttttgataaagcaaatgttggctattttcgggaaaatagcataaaattttttggcgctatatgaaaagtggccttttttgaaaatttt

SEQ ID NO: 3382 - DNA, 3508 bp, Heterodera glycines
  unsure (1)..(3508): unsure at all n locations
cagtcatatgatttntacntgcagcaaatatctnctggcatttcatccgccgtattcatctcttttttaacgtttttcatatattctctgacaatttttcgtatcttatcaaaataagctcgtacaattttttctgtaatatattaagcatttaagattaaattaaaataaataaatgcaatttattcatggattttatcgtgttgcgacattttcaccgcacagcaaaaacggacatttgcgccgctcactctttcagaaatatattttaaaatatttttactaattttcaacgaatttcctcaaacaacagcgcaacaacggaaaagcaattaaaagaaatgcaaaaaaaaactaatcgcaacgatagacacctaattttttgtgtgtgcatcagcagcaaaggcaaatttgaggccaaggaaaacaaaataatgaagattttaaataagtgacattaattaatcggtacaccgattataaaacgaataaaaaattatgactgctatgcatagagtttgcacactcaaaaccgtaagtagcaattacaatgacgcggcacgggccccagaacgtggcatttgtgtcgcgtttcaatttcatattgaaattgtgctttttagccaataaaaatataagaccatggttaggaatccgaaacttttttaatattttttaaatttgtacctgttgtcgatacggatgtcagttgttgtatggatggcaatgccggcggggatgacaatggcggcaatcccggcgtttccggtgttggcattattttatggattttagacttactcatttccatttttaaccctttcatatatccagtgacagtgttttttgcatcttccagatgactttttagttctttcatatgtttttctgcatctaatttagcttgtttcatttgaggcggtaattctttcgcatattcgtcaacttcacgtttaatttgtttaaagtaaactttggctaaatataaagaaatgttttaatgtcgaaaaataaattttaaaaatttatattaaatatttttttgttaactgcaagctaatgccgaattgtaagctaacgctaaatgcttcaatcaaatatagagtttgtaccaaaataggacaatttaaaggcacaactttggaaaatttttcatgagtttttaaaattgccggacttaagaattctaacggaaaaaatgcctgaatatggtcctacctaagccaatttaataattaaaatttttatcacgtaccatcttcatcttccgagtctgaggattcattatcagtttcttcatcagatgatttttccactataagaaactcaaaaaataaatttaataattaaaatttttatcacgtaccttcttcatcttccgagtctgaggattcattataaattttgagcttggcaaattttaaaaatttttcaatagtattttcaaattttttttaggcagatacttaacatgactaattaactcactatgcattggaaatgtcgacgttgtcggcagcatttccggcattctcggcatggatggcattgtcagtggcattctcggcatggatgtcattgtcggcatcgatggcattgtcggcaaggatggcaatgacggcaaggatggaagtgatgacaaggaaggcaatgacggcaaggatagaaatgatggcattgaccgcatcgatggcattttaagaaaattactctgtgcaggttcattgggcacaaaaatatggtaaccatcatcaccttaaatttaaattatcattaaatggaatccctataaattattcactatgtgttggaaatgccggcggcattatcggctggatcgatgggatatattcttcatcttccgagtctggggcttcattttcaggctcttcatccgatgatatttccactgtaagaaaaagggatgaataaattttgaattcaaaaataatgcactacattaaggcaataattggttgttttcattttcaataaaaaaaatttgagcattttccttaaaatttttttcgtaattttttaagagagttagttgttttttaaaatttaaatttttgtaaatttatgtatataactaatttaaattgatcattttttgatcgtcaattaattgtttacatagccattgatggattttttaaatgcataattttgaattcgtttgcgtcattaaataaagaaatttaatattttgaaaaatataaaaaataattatttaggcacaatcttaaaaacttttagaataatttttaaaaatatttttaaacaaatatatttaaaaaattaatatttagttcactgtttgctagagacgtcgatgttgtcggatgcgtgggtggcatttcggaaacattgccctgtgccggttcatcgggcacaaaaatatagtacccatcaccagctgaattgcatttatgattttttgatattcaattaaagagatatgaaaacttttcatttcgtaacaattaatttaaatacatttgttaattaaccagggcaaaattttcaggactaacacaaattttatagtgtttttagcgcgtactttgatcattttcggaggcttgcacatacacataagtcccaggatttccttaattaaacatatttaacttttatttgggtatttttgtaaaattaattgcgccaaactttcttcgtcctctgactctgagagtgaaaaataagtctcatcatctgaacatgttccagcttcttcagtattttttgatgatgatgctttatttaatgattgctgttgtttcagacgattcgcatcttaaagtattaaataattttatatatttttatttataaaatataaatattttgttgaaaagggccaacaaaagagccaaaatggaaaaatagaaatataaagatattaaaatttgcgctggcgataaaaaacttattattattttttgatagaaattaaatcatttttggtaatttttaaaatatttagttacaaatacttttggcaattaaatatttataaaaaattactttcttcattttccaagtctgtcgctctgctgccaattcgcttcatcggtggcggatgattttcataatatttcctgttgatgtacaaattacttcctcggaatgaaaaatgcgtggcgtgttgacccgaagtcacataatctcggccatctatgcgtactgtgtatacggtaggtggttgttgcgcatttcctacaataccgatttaaaatcaaaaattttttatacatttattttaccattgtgccaaaagcagaccaaaactatccaaactagggcggaaaagagaaatgtgtgcatcatacaatataattaggaacggaaaaatattaaatgaattaaattatgctgaatgtatagcgcttttatgttggcattcgaatcgataatttcaaattttcgcgttaaaaaatattacatggaagatgctcaataaaattagatattatatcgcaatgaagagagatggaagagaaaa

SEQ ID NO: 3383 - DNA, 1549 bp, Heterodera glycines
  unsure (1)..(1549): unsure at all n locations
aaaaaaatttgagcattttctttaaaatttttttcgtattttttaagagagttagtgttttttaaaatttaaatttttgtaaatttatgtatataacaaatttaaattgatcattttttgatcgtcaattaattgtttacatagccattgatggattttttaaatgcataattttgaattcgtttgcgtcattaaataaagaaatntaatattttgaaaaatataaaaaataattatataggcacaatcttaaaaacttttagaataattttttaaaaatatttttaaacaaatatatttaaaaaattaatatttagttcactgtttgctagagacgtcgatgttgtcggatgcgtgggtggcatttcggaaacattgccctgtgccggttcatcgggcacaaaaatatagtacccatcaccagctgaattacatttatgattttttgatattcaattaaagagatatgtaaaactatttcatttcgtaacaattaatttaaatacatttgttaattaaccagggcaaattttcaggactaacacaaattttatagtgttttttcgcgcgtactttgatcattttcggaggcttgcacatacacataagtcccaggatttccttaattaaacatatttaattatattttatttggatattttagtaaaattaattgccaaactttcttcgtcctctgactctgatgagagtgaaaaataactttcatcatctgaacaaactccagctgcttcagtattttttgaggatgatgctttatttagggattgctgctctttcaaacgattttcaccttaaagaattaaataatattttctaataaaatttatcaaataaataattattgttaaatattacattacgtaaatataatttaaaaatatatttgttataaccagggcaaaatttgcatgactttaattaaaataaaaaagcaaagaatcataaagaaataaatgatgaattaatttgtctcgcgttgtttttgttttttaaaatatttttattattttaaaatatgtaggatttagtcaaataattattgttaaaaattactttctttattttccaagtctgtcgctgtgctgacaattcgcttcatcggcgtcggatgattttcataatatttcccgttgatgtacaaattacttcctcggaatgaaaaatgcgtggcgtgttgacccgaagtcacgtaatctcggccatctatgcgtactgtgtatacggtaggtggttgttgcgcatttcctacaacaccgatttaaaaaaaaaaattattttataaatttattttaccattgtgcaaaaagcagaccaaaactatccaaactagggcggaaaagagaaatgtgtgcatcatacaatataattaggaacggaaaaatattaaatgaattaaattatgctgaatgtatagcgcttttatgttggcattcgaatcgataatttcaaattttcgcgttaaaaaatattacatggaagataaaaacaaaattagatatatcgcaatgaagagagatggaagagaaaa

SEQ ID NO: 3384 - DNA, 2424 bp, Heterodera glycines
  unsure (1)..(2424): unsure at all n locations
aaaataataataaactgaagcattcgttttaaaaatttatttccaaaattattcattcttaggggtggaactttcacattttgcgccaaaaagcgaaatgtgaaacgccaaaaaaaatgcgaaaaggcgaaatgcgaaaagtgaaacgcattttttaatctcaaaaccgtgttgaaattcaatttcatttaccgtaataatcgaacctttataatgctgccaaaggtgatcatactacataaaaactcggcacatttcaaatgaccaaactctcaaataagcagatccacccgaaaaatgcttcaatagcataacctttcaacgaaaaaaagggctatctaagatttatatatttttatatggtgcggatttttagtggcgaaaattcgcaaaagaattttaatatctcgggtttcaattgcagacaaaaaaaattcaaaaaatttttaaacttttaaatttgttaatacgaaattgaaagttgaccattcaaaaaacattcattagcaaaaaaaaagaaaaaagaagctgaaatggaataaagaaaataaaatgaaaaaattgatttgttttaattgagatagtcataacaaatattaaatatcaaaatgttttaaacgaaaattctttaatgtatttacaataaaaaattaattttgaataacaccataatcatttgttcaaagaattttcattttctgaaaaacctgccaacaaaaacatgaattctgtttaatacataaatacatatttttattttattaaaaaacaaataatatttttttaattttttaaaattaatttcttgtattatttcgaaaaagtaaccaatattcggaagcataatgttcaattgccatgttggcaaacaacgaatatgtacaatatgtttatataaaaaatttttccataattttgattttattatttattcatttgaaaattttttattcgtcaattttgcataaaatttacatataaataaaaaaatgaaaggaataattttggtttgcctgttaattgtcctaattgaattcggtaattttaaattaaaatattatctttatttaatttgaaaattttgtattcttaattaataatatgaaaaatgctaatagagtttttttgctatgaaaattctttggttgtgattttataatgccgaaaatgacaaaactagtcccaaaaactgtgcgctattgctaattgtttttcttgataattataaattttgtattacataattaggcaattcaatgcctatcgatgaaggaaatgatgatcaaactaaacctgctgtagacgttgaaaaatcagttggacgcaagcgaaagaagaactttgaagatgcaattaattttgtaaataaaattaaggtgctcctaattaaagacagagaaaatgttaatccgccaattcaaattcttcacttaattaattgctccccaaatttatgaatcatagcattttatttttattttacaacatttctaataggctgtcagccggtccaggtccccgatgttttaagtggctctaattcctatatccagaaatagtttagtctagaaatctgagagactcggctataaaaattttcgtaaaagccgaaaatttcttgaattttcgatttttatttagaaatctcataaatattatatttattttgttcataaatgatccatcattattttattttaaaccaatttcagcaacgattcattgaccatgaagatgtgttcaaaaattttctgaacgtttggaacaattatcgacgaggcaatttaaaaaacaaaaacccaaatgaagttttttggcaagttgccacactttttcatggccacgatgacctggtcaaagaatttgaagactttttgcccgagcaaacaattcgacgtaaattgaacgcttaaaatgacgcccaatttaaatgtcagagaaagttggacagatgacattgaaatagagataaaatgatataatggccattaaaatctattcattttaaattgttaattaaaattgtagaatatatcttttttctaggatttcattggatacttaaggcattttttagaaatcaaagtacaaaaagtttataggttcttgaaaaaaggacacatggtccaataatttatcgttaaaaaattaattttagacgctaatttatattactttcttatattcggcttaaacctacaaaattggcatattatggcatttaactgaaaataggcattttttgaatattttattttttaatagtactataaaatagtattgaatttggcggcataataataaaaataatttanatttattaatcagataaatttttagtattccctcaatttgttttcattaattctatncattattttaactttctttcaaagtaatanagatatgtacaattttttttta

SEQ ID NO: 3385 - DNA, 5461 bp, Heterodera glycines
  unsure (1)..(5461): unsure at all n locations
tatatacagtagaattacagtactagtaaaatcatatcaagnttggcaatgaatcgacctgaatgtatcgacgtattgacgagggcggcagatgcgctcatacaaagtactttgaaagacggatgtgtcacattngagcatcctccacgtntattgggtcaccaatcgatttcncaatgagtcgttgaaatatcgacgctgaagcgttgtgatgttgcctttaggacaggtgtttcggagcatgtcaagaaggatcaaacgggcgggagacttctcattctcttcaggcaaaatcaccttcgaaagagaattaccatttaattctgcaaatattgtttttacttctgcaatttcacaaagactaagccgaattctcaccagtgtgtaggaattggtatccacgaattggcatagagtgagttcagaatagcgaatgtccattgcggccatgcctatgcaaaaagaaatttccaaaccacacatcgacgataaacgcaccaatttgcccacgattattgccctttccttcaatgatggcttaaattttgttcataatccatgatgaaaacaaaagctgcttaccaaccaaggtagagcaattaacggagattgaagtaagatttcttccacttctcgttaaggagatgcttttatttattgttaaagacatgcttctactgtatgtaaaaaataaaaacaaatgattcttatattgttgaaatgggtcggggtcacttcggcgcggaccatttcggcgccgcaaattttgaaatgctataacttttttatttgtcagttagctttagccaatctggcatcatttgaaagctctatgtgtgctctatatttacatgtaaaaatagaaatgaatgattcaaaaataagaaagttatgccacgcggaaagccaagaaaaagttaatttttgaggttttttggccataacttttttgtaaactgacgaaattttttgaagttttacaggctaatagagaatctgaagagctatcgaatgataacaaacatttttaatttggttgatcaggaaaaaagttgttagcaacggcgccgaaaaggccggcgccgaagtgggcggttcccgttgaaatgacgattgtaagaagacactatgggtcactccactgtgcagagaaaagcctagtactatctcgtcgtttctctttttctttgtaatttctctcgctgatcacgaatccgggctcagatcagcgctaccattcactacatgagctgtcagggacaaagacttgataggcttcctgtaccaataataccctcatgagcaaggtgccaatgaagatatcatccatacaaattgtctaattttttttgtttgagttcgtgtcagggattcgaaattggcaaaaaagggtgctgtattcgtgatcagcgacccgaaaaaccctttaaaacttattttcgttaattataaaatacatttataggcatctaaaatgtatggaaatctgccccttaaacttgaagagtaccaaaagttgagttatttagaaaacaagacaatgtattagcttaacaggacctataaattatggaatttctcctattttttatgatcctttgtcccgaaactaaattaatacaaaaatttgatttttttattgtctcttacacatacataataaaattgggtaaaaagcatatttttattttctttctcggctcctctcccatcatccaaacacaagcacagtgattgatggttttttgtcaaacggccagatcagtcaatacactgaaatttgaaaaatgctaaaaaaacacccgaatttgcccactttttcaaagtgtcccattcgcttggccgtgcattgtacatgctctcatggacatcaaaaatgtgtacagcgcctgactcatctccggccacaatttgttgccctttaattttacaaaaacaatttgtttagtcaaaaaatttgccgtaaaacaaaaaacttgccgttgtgactccactgaaatttggtgcccggctcaccaagcgcaactgaagtgattggcttctccgtgttcatgttgatgttccacagattgagctacaggggagaaagcatattttacgtcaaatttttggaagaatttgaagggaaaaaaagaatttttagaaaaaatgcattccgattccctaaaaagttcttacaaatgaattgtgggcccccataaaaaatgtgaaattccgaaacccacaaaaatcgatgtcagggaattgcgtttcatcactggtacgaaaatacgccatctttttcaacaacaaaaaaaacacttgccattccttccgcggaaagtgacgcaaacactgcgggatggacgggcgaccactggacatcggtcacgtaaaacttgtgcttgcggtccaatgtcaacaggggagccgacttttgactctgtaatgagacaaaaatgaagggcataattaaaaatcaatttaaaaaacaattaatgatataagaaaaaatgtgcaagaattttccatcaaacgataaatatctcttataataaaaattacgggaatatgtaaaattaattattctgattggtgggttagtctcaccttgatattccacagtttgatgccaaaatccatggagcaagtcaaacacagtgagctgaagtcaatggcacccaacgcgcgatgtgtgtccagcgcagtgatcggcaattggtgggctgtgcaagaaatggccattttatgaaatcaaaagagatgagaaaatgccgggatgagagagtctgattgggaaaatgctgtttttggatttgcaattcatgaaagtaatatgtcatttttgaaaattgttttataaaataatatggcattaaaaagcatcatcaccacccaccagcaatgcttctactcgactcgccgctggccgcgtgtcggtcgccaatgtacagctcgccctcctcagtgcccagcacgtaattgttgatgctgttgtgtaggaatgccatgctaagtgcacaaatctgaaacattggaaaggagagacaattttcatttcattgatatgcaaagcgaaaaaaataatcaccggcttttttgtcctgttacatgtcaattcggtggcttcaatgggcgactgcaagttgtcaatgctccatgaacacattcgaccgtccgtcgaaatggtgaccaagtcgtgcgcatttgctgtgccgaccatacgcatgcacaaaaggggctgtgtgtgtgctttggcggtcaacggagtctgagagggggaaaaattaaataaatgataaaagattttgtatattcatgtttgattatctcaagaaaaggttacaaattttgataaataaattgaaatataaattttgaaacacaaaaaaaaaaagtttttttgaaaattttttgaaaataggtagtaattcttcataaaatttcgaaaatagctaagaaaaatttggtagataactaaaactaaaacggttcactgctcaccttacacacaggcatccgtttgttcacccgcgtgtcccaaatgcaaatttgacccgaataacatgcaccgaagatgatgttcgcgttgaacatgtcccatgtcatgctcatcacgcgtgatgagctggtgaatgtcatcctggaaaacaaatgaatttgtgtgcaattgtttatttgtttattcggtaaaaaaaaatcacataaccgcaaactggacgataaaacttctcctcaattgttgcggtacacccccaggattatttatttgaagtttaacacgacaacttagtcggccaattattaccctttttgaaaaattaaaaaaattaattttttttttaaaattccaagattttttttgtaaaatttaaaaaaactttccgggggtggagcaacgacggggggaatgatgctcccccacccttgccaaggacaatcatcatcattatataacaacaacaccaacacactgacgcactcgggcgatgccgttttgaagcgtgtgttccacacattgatcacactgtcgggtgccaacggctcgtccttgtcccggtcatggcacaccgccaccaattcggggaaaatggtggaaaattcaatggcacagacggggcgaccaccgccggcagtgattgtgccgttgctggtcagctgttgttgttgttgttgatgctgttgaagcgctttgtgttgttggccaagaatgccaatggaagcggcggcaacaattttcctgtccaacttgagcagctcgcgcttgttgtcgtccattgtgtcgttgcgggtgccatcattcacataatcgacgaacacatccgactaatggttgaaaaaaaaggaatgaaaaaaccatgatttttcgaaattttttttttttgttgcatgttttgtgagaaaaaattcccctaaaaattggcaattagtgaaagccataaataatctaattgtttttcaaattgccaaaaaatcaaattgagaaaattgatttttccttaaaaaattgccaatttgtgagtgttttttgagtccgtttttgttagttatttaatattttttttgaaacgaactgctcgaaccccaccccctcctccaattaaatggttattacaagttccctctgctgctcacttcttccacaattgccctttcgatgacgcgcgacgcgtgctgaaaatagcgcgtgaacgcggcactgccgagaattttgcgcttctcctcatcactgagcggcggaattttgacatgcgtttgtgcttggtggtcatcgcatgacacatctttctgtgtctaaatgaatggttttatacattcaaactcgaacagtgtctaaaattcttaggtttgtatccgaattttggaatcgggttaggcattcggtattgacccaaatgaaatattcagattcgtgagcactgataaaggtgctcgaaaccccttcggggtacgttttccctgagtttttatgggaaaaagtatttctgcaatccgaaagaagggtcctttgccggatttcccccgcctaaaatttaaaaaaatttcgtgtaaaaattttactgtgattttttcaaaattttttgagtatatttgtatgttaccaagatcgcacaactgttaccaaccgaatggctgctgtagtgatgaaaatggaggttcttcaactgtttgcgcacttccattgtcggcgattcctccatggtgccctcaatttgcccggccgccgcttcctcgtcaatggacagctcgtcaaacgcgaactcctgcgagcccatgctgaactcgccgtgcgagtgccgtccccgctcctcatccgtctgtgttgttttgcagtaggaaatctatgtgtgatgcaaaattaaatgcaatttngggggttgtgtgtttgtgagtcaaataaagatgggacgggaccgggattttctcgtggtcccgtgngattatattcgagaagccgactttggaatacatccctagtctt

SEQ ID NO: 3386 - DNA, 4377 bp, Heterodera glycines
gaaaaacgtgagtggcacgacggtacacccaattctttttaccaagccaccgttgcattcgcgggcgcttgaatgggcactgctcgggtcgctgggcgcctcctcccgatttgtgcgcggctgaatgcccaagtcggccatcatcgcgtccagctcggccggtgtcatggtcgagcgtgaggttactccaattgaaaataaacacactaaccccctcataaaattttcggaaattccaaccattttcaatccgtttgccgtgcattcgttcgcccttatgtctcagtttggccgctttcatctcggctaatttgcgctttttctcctccaattcccgttgccgttccctctggtcatagtcttgttccgacattaaatttttatgtgtaaaataatatgcccttaatgcaagaaaatatattgaatgagtaaaatttatgaaacgtttttcaaccaacttttggctatataaaatatctccattttcgaaagaaatgataaaattagaattaaaatcaaaatatttagaaaaactgctctcaaaaacaaataagttataaaaaaagattaaggaggtgaggcttaatccaagaggcgggcgtttaaatttcgcaattttcaaatttatggtagagaaagataaatgggaaatttaaatttaaccacatggttccaattaaaagaaaaatgaatactgatgtatgtagaggaaaagaaaaactggcaaaaattttagaaacctggcaaataatgcccagtgcttcggcactaaaaacagttttgatgccataaaaattcagcaaaatcccattcgaagtatgtatgagcaaataacaaaaaaaaaagaaaattgataattgttaaacgatacaataaaccacagagaggggagatatgtatgtatgtatgtacacatgatggttggaggaaactttcttcagtttttgtgtggggagaataggcgaagagaaaggggaggggggcggaaaaatcatgacatgtttatcttttagattccctttatccaattcaggacgtttaaaaaatcatgacgggcggaggggagagacggctttattaagttttagacgtccaatcgacttttagatatccgtccaacaaacaatgattttgctcagtttcttgggccgtaacttttttttaatttgtcaatgaaagcttaatgtctcgggaatttacaaatgcaagaaaagagtaaatattgcaaaaattacagaaaacagggtaaaacaaattatggtctaagaatgaggatagtcactactaattagtgattaggcgcctaaaagtcgattgggcgcctgaaagttcaatagagccggaggagaccacactcgtcaaaacctttctccagtgaacaaaaaaccaaaagcatgtgcaccacctccaccaccaccagcatcattaactaatttctttcgcatttcctttccccccccattttttttgcctttttctcattatttgtcattgtcactctctctgttcatcattatcatcatcatcgttgtcgtcaaatgatggaggaagttttcccgtttccttttctctttttgctgtgtgtgtgtgtctattctttgggcagacgccgtccgccacacactcatcaactaatcaacaaaaaagcggcggtgctttccaaatgcacaaaattattgccagaggatggcaaaaatttccaatcaaaatgtacaagaagagacaaaattgcttgagacatacatagggtacattcggaaaaaatcctatggaatttgaaaatcaatgacccccccctccacccgaaaacccatacaaagttaggttggatctccatgttggcgtgcaatttgtcgggttgaggctttgtcagggtgtagtccccgaaaatggtcagttgagataaagtcgaagatccaatccgttcatgtgttaaattaaaaagccgatggattttgtttgatctcgtttattcgaatgatcaaatttcaattcatattctttgtttttgtcatctatctgccattaaatcagccaatcaattaattgtattgcatttcaaactctccataatggggtcattaacaaatcgatttgatgggcatggcacatactttaaaacatgcacaaaatcgagcgcattcctttcaatcaacagttgctgcagggatgaatgacctaatcaactaaagcaaatctttctctctctgatttcacgggactgatataatgtataaatatgcccaaaaagcaaaatgggggcattaggaggggggaggggaataaaataaccccgaaaagcgaagcgatttgttagcggaaattgttgtacaacaatgatgatgatgatcaccaggaacagcaagttgttaatagtgctgttagagactaaaagcttgtgaccttgggagcctaaaaacccccgagacctctttcgctcgtctcgagcctgacattctcgaacagcactaatgagcggaactcagcgatccacaattcgagggaccaggtcgtttcagcgcccacgtttcggcgccaagccagacatttaacaaataagaaaaaacacacgcaaaggccatctattcacaattttagaaatccggtacttgtgcagtttacaggggcaatttcacatagattttcagatcccaataaatgtgttttagaaattaatgaaaataagctttaaggggttttcgaggtcgctgatcacgaatccgggctcagaccagcgctaccgttcgctgcatgatttattggcatctgaaaatgtatgtgaaattgctcctgttagctgcacaagtaccaaaaatcctataaaagaaaaaagtgtctaacaaaaagtcgaaatttcaaaattctcttttatgttcgtatctgtacagaatacccatttttttgaggttacaatgatttttaactaaattaagcttttttggtgaatttaggaacaaaaataagaattgaaaaattttgagttttcggctttttgttagaattcgggtccgggattcgaaactggccaaaatgaatgtcagattgatcagcgaccctggcgccgaaacgtcggcgccgaaacgaccctggcgccgaaacgtcggcgccgaaacgatacggaccccaattcgagaccgcggtaatttgaatccgcgatgcgcgagcagcgattcacggcagtttgatgcgtggtccgtgaccgtggtaatttgaatcaacgactcgactcgtctggtttttctgcccgcgtcccagccctggcaaggtgcccacttttgcgcctcatagcctgccattggccatgacttttcttgctttatcaaaatctccatggacagacggacaagctctccaaaactttcaaattgctcttttgtcaattccaatttctgctgctctttatgcttcccatgaatttctccaactgttttgcacaaaatttgatcagcatcagtcacaatttttgtaagcgagaagagagagggtgacggacggagtttgcacaccgatcatttgccaccgcctctccccgacacgcggaggtaattgccgccgccccgccggcatcagtcagtcagcaatcatcagcagcagcagccggcgctgccgaggtgaaaataattgccaccggcgcgccaaatggggaaaacatggaaaaatgaatgtgtgggtttgacgcagcgagaagaagcacgcacacacaatgagctgcagaagaagttgaactgctgctgggtggtgcagcaccaccagcagcagcagcaggtggtctgcgaagcaaaacaaattattggttggaggagaaaatatatggatattttaggataattgtgaggggggggggggggggaggggcaagggatgtggtgtgattagtaaatttgtcctccatgtctgccagggatgtgtttcggaatgccggttgccgaaattgttgagccgacggaattccgatttccgatttacgaaaattttttttgtacgtcggaattccgattgccgaaatttttgagaagtcaaatgccgatttccgaaaaggattaggaattggtcttattcctaaaatatttacaacagaaattgccaggaaaatcccgagtgggatttttcagggtttcgtttccaatttgctgggaccaagtctcgattatcgtggaattttccgtcttgcgcatcactttaaaacttcgtcctaaaattatcccggctcaattctgcatgtaattatttcaatcaaaatataaaaaattttccagagaatgtgccgccttccacctctttcttagggctgctgattttgtggggtcgtcggcgtcggatttgagtcgtcgcccatttatccgccattatccctcaaaatggtcgtcggcttatccc

SEQ ID NO: 3387 - DNA, 1600 bp, Heterodera glycines
gaattgcgttgcccccttcccccacaaatttcccgttggtcggtgccttgtggtgatgattggtaccaccatcaccgcccccggcccgcccgggggctccttttcctcaaagcaaagcgcaacctcccccaaatccaaagatagtgatggtggatgactggaggagggatgtgatgtgagtgagtgaatgtgcagcgatccctccttcccccccccccggcccttcgtcctttgacagaccaacaatttgagggaggacaggggggggggggggggaggagtccaccaacctcaacaccaaacacaacatcaacctcaaaatcagcatcatcatcagcaaaatttacggggtggggggggagagaatcggaggaccaaaaacgacggggggaagagatttccattatccgatccgactccacctttgtaggattttagaagaatgatgatgaaaatttaagaggaggttgagtgtttgtttgttggtcgttgtgtcataggttggtggctgcatggttttcaccacataaatgtatttcaatgacggaaattcaataatccgtaattacggagtttttctaaagttatacagacatctgataatccgtaattacgtgccaccttgtccttccgaacaaggaggaactgctggctgatcagttcactttagggcaaattctcggctcgagaatttctcgacgcggttttttctggtttaggcgctttgaaaagttgacaaactctgatcacagcgccagttgaattacattgatcagattttgttgatcacttaatgataataccttttcttatcattaattttttatttttttccaaaattctgagttttccattattttaattttttgcaaaattaattcataaattttttcaagtagaatgatcagaagcgcaccagattttgcaggataacagctgagaacaataccttatttataattaattttccatcccatatagtttcgttaaaaattttttggttttccaatttaaaaaaaaaatttctccaacataatttttcaccaggtgatcagaagctcgccaaactttgcagggatattaaaaggaagataatcaacctattttaatcattataatcccatttcctgaaaatatttcaacgcttattcgttttaattttttttttaaattctgagttttccattattttattttttattgaagctgatctgttttatacaatgttcaaagaaaaatttcatgaaatttttttatttatttggcacaaattataaattgcaccaatttcaacaaatttctggacaaatcactcattcattcttcaacatgtggatcacccatcacaaccttatactccaccgatctgactttttgatcattccaccaacaaaaggcactcactcattgcgccgtccgtcgaaaagtttgacttttggcgcggcggtggcgttgaggtgacctcccccaacccctcgggggtgattttgaggtgactttctttggggggggggggcagggggcacagctccgtcgaccgattggacaggcgcaaattgtgaatgaatggaaattggatgggctccgggggaaggggggg

SEQ ID NO: 3388 - DNA, 2696 bp, Heterodera glycines
aatagaaattttggcgctagtgaaaaagttggtgtttttgaaaatttttttcacttttttttggtcaatttttttttgtttgtttaaaaagtcctgaaaccaagtaccctggagttttagaggtcgctgatcatgaatatgacaattatttgggcctgttaagcaaatttggcgctagttataaatagagaccggatttttatgtttttacatattttttttgcggcttagttatggcgagagaagcccaaaaatagcattatctccgaacaatttttgatttagagcgacttataaaaacataaaaacacatattttggcgttttgtcacataaaatatgttagcacatattttggggtttggcacatattttgcacatattttggcatttttgagaaaaattgcaataaaaatacaagaaaattgaaaaatacacccctaaaaatcgacttttttcataattattaacataattttcaaattaaaaaattttttcttcgattgtagaaactaatgaaatctcgaattcattaattcgtcattggatttcgaagttctctgctggaactttcaatttatagaaatgatttatcaaaaaaagacaattttaccccaaacacttcgaaatgtatttgatttgcgttgtatgggctaaaaatgataaagaatgagatttttgggaatttttatgcaaaaacacacttattttttcaatttttaacacatattagcacatattttggcatttttgggggtttttagcacatatttcagcattttttagcacatattttattacatatttcaggatttttagcacataaaaatccggtctctagttataaagtgatagattgtgaattttatcaaaaaccatagggggacctttttgttttgtaaaaatttttttggttaaaaatcgtgaaatactttttattcaccataattgtgctattaatacttaatattcatcattagggacgcgatttctagtgaaaaaactttttttttgctcgattgatttgatgaaaggagctcaaaaaacgcatttctgcattaaaatttttcatttggacgtcatttttcgtcactagaaaccactatttttgcatttcgtcacttaaaatagtgaaaattcacttttttggcgttttgtcactatttttcactttttcgacattttttggaaaattccttaacagaattgcaataaaaccaaaaaatacacccctaagaatcgacctaaaaaatttcaaaatgtacacccctaataatcgacctaaaaaattttttggaaaattttctcaaaaattcatcgaccaaatctttttttcttgacaaaaatttttatttaaaaagttaagaaatgtacacttcatttgcaacagcaatcagtgaataaaaattatttttgctcaatgtttggctgaaaattatgtcactattcgtcactatttcgaacttttttcactattttgtcacttttttggcacttattcgtcactattttagttaactattttgggatttttcgtcactaaaagtcgcgaccctattcatcattatgtgtaaaaaaattttttaaaaattagaccaaaaaaaagtgaaaaattttttcaaaaacaccaactttttcactagcgccgaaattttccgagaaaaaattattgaaaaaaatatttgcattgagacgcattaaccaaatatttgaacttttataattttttttggcgccgaaacgtgagcgccgaaacgagcgcgccgaaacgtgggcgccgaaacgtgatgcgattctgagaactaccaggggcttatctagggcgctgatcacgaatctgacatcagatttatcattagggctgtgaattttaggttttaattaaattttttgctcgattgatttgaagaaaggagctcaaaaaacgcatttctgcattaaaaattttcgatttggatctcactatcgatcactagaaatcactattttggcgacttagtcactaaaatagttaaaaatcactattttggcgttttgtcactatttttcactatttcgacattttttggaaaattccttaacaaaaatgcaataaaaccaaaaaatacacccctaagaatcgaccttaaaaaattttcaaaaaatacaccccctaagaatcgagctaaaatttttcaaaatatactcctatgaaatgaaaaaaatttttctcaaaactttatttcttggcaaaaatttttaattttaaaaattttttttaggtaactattttgggttttttggtcttaaaaatcccagtcctactcatttgcaactgcaatcagtgaataaaaattatttttgctcaatttttggctgaaaatttgtcactattcgtcactatttcggactttttgtcactatttcttcactattttggcatttttactcactattttagttaactattttgggatttttcgtcactaaaattcacagccctatttatcatatgacatttaatctatgattttatgtaatgtctatgatttttcatcaagtaatttgttcaccaatccgtaaatcatgcacacaattttgttgatcctctcaccggccggagtaggacaaaacgtcgtcagccgaaacgtcgtcgaacgaatttttcgaccataacttttttctttctcagctcaattaaacattcttggtattatt

SEQ ID NO: 3389 - DNA, 3735 bp, Heterodera glycines
  unsure (1)..(3735): unsure at all n locations
tacatttttgagctaatgaattctattggtcttttgtcatagcaacncggtgaaaaaacgcaaaattgaagttggggaaagcgatggcaatgagcagcggagtgttgcggtccgtctcttctcggaggacggcaaagagattggccaggcacccgtcgttgtgcgtctttttaatatttaaaatttatttccaatttttgcttctcgtcctttagcttcttgcttccaccactgctgaacagctccaagtgctttaccaccaattgttgcgcagtgaaaaacagcaaaacggcgaatgcggcgacgacggagactttgacgaagggacggcgcccgtccaatttcggaccgtcgcagacgaaaaaagtggcggaaaagggacggaaattgtcgattctttgctcgactcactgccctcagaacgcctcttcttggaaaaggttattattttcacgctttagcataaagcaactggacatttattacgctgtgacaaaaagccattacataattagggcattcgatcaaaaatacagaaaaataggtataaattaccaaaaacggaatatatttgcaaaacgtgggaattttatcaaattcgtttcatatttatatgatgaggttgacagcctagtgaagtgtaactgttttaaagtgtttcatttccaattgactttcagcccctcgagttggtctgtctgccacaggccgtgttccgagttcggcccgtcactcggtgcaccgcttcgttgcccggccatggcgaacccgtcctttccgtacagttcagtcccgacggaaggtgtgcctttttcatttttgtctcactccccccaccccctctttaagctgtttggccagtggttctggtgaccggacagtgcgtttgtgggatttgcacacgaatctgcccaaacagacgttgaccggtcacaacgattgggtgctgtgcatcggctggtcgccggacggtcgcgcgttagcatccgcgtgcaaaagcggcgtcatccgcgtgtgggacgcgcgcagcggggcgcagcgacgcgtgctgaacggccatcagaaatgggtgaatgcactcgcatggcagccgctgcatgaggcgaccagcgacgcgcagtgcaggccgtgttttcttcgaacgagcaattattaagcgttggttggctttttaggttgttggccagtgccggatgggacaaaaccattcgaatttgggacattcttttgggtggcactgtccgcgtgctcagcggtcacaccgcatcggtcggtaattgggcaaagagttactatcaattggtcaatttatttggattgattgtctcattgtcaggtgacagcagttcggtggggcggttgcggactgatttattcggggtcacaggtcggctgaacatttttaatttggctttttacaatatttgtcccctttcttgttttcaaagaagccaagttttacaagcaattgtcattttacaacacaaaaaagaatgaaatataattacttaaagccctaaattaaattcgaatttttcattttaaaattgtgagcacctttttcgttttttatttcatttttattagtatttttgaaaatactgaaaacgaattttaacctaaaaattccatctcttattggctctgtgctcttttgggcccggatttgaatttcgaaaaaattaacgaactacccattcccaaaacaggaaattctcctcttatttttgtttttaattgtttaatttcaaccttttgtgtttgaggatcggaccgtaaaagtgtggcgcgcggaggacggcactttgtgccgcactttgaccggacatggccattggatcaacactttgtcgctgagctgcgattacgtgctcagagtgggctatttctcggccgaggcgcaaagcaaaggccaaccgacgctcagtccgttctccgacggaatttccacggaaaaagtgttccatttttgcaaattcattagttatcagtgcccagtgattccattttttctctttcacagattgtaaacgatgccaaacagcgctatttgagggcactcggccaaccgtcgctggaacggctcgtgtcgggctcggacgacttcacaatgtttttgtgggagccgggcgaaaagaagcagccaattgcgcggatgaccggccaccaacagttggtcaatcaggtgggccaactcaaccaaaacacggagagacgaaatgccaaacaactgttgaatgttcgaatttgaacaggtccaatttgcgcccgacacgcggaccatcgcctccgcctcttttgacaagtcaattaaactgtgggacggacgcaccggcgcattcgtcgccactctgcgcggccacgtgggccccgtgtaccaaattggctggtcctctgacagccgactgctcgtctccggctctgccgactcgacactgaaagtgagagaaatgaccaaaccgcggattggcacccattttaaacctctttttttgttgttctttttaggtttggaacattcggaccaccaaattaatgttggatttgccgggccatggggacgaagtgttcgccgtggattggtagatttatgacgaacatttttgcagcttcttgaaaaagcgtaacagtttctccctttttaggagtccaaatggtgaaacagtggccagcggaggaaaggacagaattctcaaattgtggaaaagataacacaaaattgcctatcctttttgttattgttgttttaatttgtccaatataaattacataattanattctgattttttccaattatgaattggatgaatccttttaaattggctaatcattcgtcttttggtcttcggtctgttgccattggcaacacttccgccggtcgctgttttgcctgaattttttattttaggactaattatttttcgtattttaatttaatttcgtcgctttcaatggatggcattgactcattgccaatcttttatgacatcgatggcgacgtcgaacagctccaattttggtgataaacacaattgtccccccgggggggggggacaattggtcgacactccgccgaattccgtcgcgaaaattaaaaaataaaggcccgggatcagcctttctatgctgtggtcttcaaatttaatttcgctgatttcattttagcatttctctgttttctgtcgaccaatccgtcggcacttttttggctgcaaaaagtgaaattggcgcacaaaattttgttggcgaatcgtccggcagcgaattattgtcaaatgcaaaatttggagaagaacgattggaagagcaaaggcattttggatggatggaaaaagtgccgaaaccgacggttggcacgccgaaattggcacaaaaggggggaccaaagggaagtgacggggcaccggtggaacaagaggaggagcagaagctggaggaggaagagaaacaaaaagaagtggaggaaagggagcgaaaacaaccgccgacggagggacgacaacggcggaggtggggaggggggggggagggaaggagagtacttgaacccacctgtgcggctcaaatgtttgaaaatgttttagatttttcttttttagcccggccaaatttatgctagtttttggaaattaaaaactcacttcacagtgggcacaatgttcgtgggataatgcttaaaataaacaaaatcgggagggttgaatttccatacatatgtaattttgcgatttttc

SEQ ID NO: 3390 - DNA, 4008 bp, Heterodera glycines
caccctttgcgattcggaagcaacgctaatatgtgctaaccaagcgcaaaatgagaagcaaatcccggacaaaaagaaaagtgggccaaaaagggtgaattaaaaaaagatgacaaatgaaatcaaaacttaccaaaaatagaacgttttcatcgactctgaacaattcaattcaatttttgtcttctgaactgcgaagccaaaaccgttcaatcgtcggaagtgaacaaagaatgcaaattgtggcatatttgggcagcgatcagtgagggaaaggacggcacaattcaaaaaataaaataaaatgcaaatcaaaagctttcttcagcatctacgacccgtcggaggagtatttgctgtggaatttgcgagtggcgaacggtcgccgattggtcaccgattgggccattgacagaacacgcggcgtacaatctgccaaaacagggaaagtgttcagggcacggctgacagtcaaagagccgacactttcggacgaaattggggagaaaggacagcaaaaaggggccgaagaagcggaagaaaaacggataattgaggaagaagtggaggaggcggaagactttgaaatgccggaacgcagcgaagcgtattgggcgcattggacggtggaaattggcatgtccagcggagggggggggggggagtaccccaattaaacgccctttttgcccaagggaggggcgtcggctttttgcgagacaatttgcgcgtggaatgggcgttggaaatgccccaaaattgccaatgtttgtcgtctgcacatccgccaatggggggaggcggtggcagcgatcaacagcagcacaaagacggacagcggaagattaacggaatgacacagcgatgcgcggtgaaaagcgtgggaagggtttgtgttctgcgggggaggaataaaatgccaacatttgtgccaaaagtgaaggacgacgtggcacacttcggctatcccatggaattcacgctgaattacgacggcccaccggcaaacatttccgaagaagcggagacaaagcccaacaatgtttggccaagaatgaccttcacggtgacagcggaagacagctggggaaggattttcgtggaaggtgttggcatagtgccaatttttgggtatttatcagcgcgaaaacagtgccaaaaaccgtccgataaacggcaagcggacaaaatcccgactaagcaaaatctcaacttaattaattgatttaaaaaactctcgacttccaaacctcggcttactgccttttttcacatgatttgtgttttgtccattttttgtgtgttgtcctttgtcaactcatatacagacattccaccatttgaaaatgcctttgccatttgtccctcaaaagggtttgccgtctttcctctgcccatttcatttggcccttcgcccgttcacttttggctcaattgcgtccgcccaatttcgcctctgtccaaagtgtggacacttcgccaaactcacattggccaagcggaggaattggcacagctcagaacaatgggcgaacaaatggtaaaaattgttctttattcgtaatttaatttaaaaaacaaaacaatcaaatcgcagttttgtcaagagggaatggccacggaattgggcggaaaattggaactcacagtgcgaactgtgcaccaaagccgacaatacatctccagtgacattttacaatcgcttaaatacaacgcaatgatgcgacggattgggtgggaattggcggggaaagatgaaaggataattaatcacactaattaacttaattaattaatttcccaatcaaaaagcgaagcaaacggaaaagcaatttccaggatcagtgagcaattgcagtgtcgcattgccaaagtgttggaggagttcgatcgggtgaagcgacagctgatcaaagtgcggaagggtcgaagcattgccaacgcataaaaaaggaaatttattttaaattttgctattaaataaataatttttttttaaaattagcattttaagaacttttaattttattcaaattacgcacaaaaatacattaattaattctacaaagaaaaatagcattaaaaatgcaaaaaagagaaaattcacaaataaaaatatttaacaaagttgaagccgtgtttgaaactgctcaaaatgcaacggacagagctcatcagaaaaaaaagtttaaaaacatttcgtggagggaaataaaagagagaaattaaaattaaaaaaaaaactatcagtgacttttcaaatgattgtcaattggaattctgccgcttgtgggattgattggttacaaaatattgccattttgccgtttctttcctctcattcatccgttttcccattttccattccgtgccgccctcgccgtgccgttttcttcgtcgtcacttgcggtcgctttcgcttccctgtcaaaccacgtccagtgccgcctccctctcgtccaattcttccgtgccgccgccgttgttgttgttttcgcccgtcgcttcgtcgccatgtgcttcgtcgatagccaccgctaacgcagaggcggcggcgccgcatgccgtgcccgtctccgcatcggcagtgccgctgctgctcgcgctgctgtccgtccctccgccaatttcgtcgccgctttcctccacgcggtcgccagcatggtaaagtatatgcgatgcagcagaatgatcagcaacattgaggaggtggtgatgctgagacggggagtcgaacgcgtgccggtcggaggcggtgccattgcccgcgtcgctccccgcgcctgcggcgctgccctccgcgccgtcatcgtcgcccaccaaatgcacgccggtccccgccccggccaatccatccaaatagctgtgcagtgtgctcagctcattgccttgaggtttgcacgacgctaaaggcaaaaattaagcgaaataacgcggcggatttgacagtgcattcattcgttaaaataaaaataaaaattcaatttcaatttaaaatatattaaattcatttatttctcactgtttttccaatgcgtccgaagtccgctgggactaaagcaaaaagaaaaagggcatttattttgatggcattcagcagaagagtccattcactcaccttatgtaatttttgccgcaagttcgacacgcaaacggacgttcctaaaaattagaaattccaattgaaaaaatttattaattgaagtaaatttgcacatttgaatgaattcggacgtgcaatttgagatggacgagttgggtgaaggagagattgcacctgaaagaagaaaagcgaaactaatgaaggagctaatttacgaaaaagcatgggcccgaacttggcttcatgtttgactctgacaagtaaatgttgatttttttgaaaggcttgccaaggcccgggcccaggccgcctgacctaattcctttgaaattgctttaaaaagcaattaaaggttgaaaaaatctaataagtgtttaaaaataaaaaaaatatttaaacaaaataataatttttaatctatttaatcaatctttgatagcaagaaataaaacagtgggttcttcaaataaataaatttcaaaatattacccagaaatcgggttttcgtacttaacttggactgggcttttgtaggaaaatcagaatgacaaaaatgaccatgacattgacccaggaaaagcccgacccgaacccaggcctaggccaagccgtagaaggctctttaattattgatatcaaatgaattttgcttttttatctccaccacctgtcgcagctgtacgggcgttgtccgttgtgcagtcggaggtgcgtcttcaaattgctggtggaggagaagcgcttctcgcacaccttggacgaagaaaacgattaaattaaattttgcacggcaatttaagtttctttccggttaatttccttgcctaattaattccttaattaattccctaattaattccctcccatttcgtttatttctgtgctctctttgtcccaccacctga

SEQ ID NO: 3391 - DNA, 5567 bp, Heterodera glycines
  unsure (1)..(5567): unsure at all n locations
ttccaaaaaactttttgggaagaaaggggtccggcggtgcagttaggcgccgccggggaaaaattttgaaaatttgagtgagatttgtttacgaatttcaacaaaaaggctggttttttggactactgggctcaatttgtatggattttctttaaaaaattataaaatatgcgcaattaaaaaaaagtatgaggaagcatagcttgtcgatatgtaggaactagagtccggtaaaaaaaaatttccgggagcgggatcgggagttcaaaattttccgggacgggagtcccgaacgggaatcccgtaaaaatcccgctcccgttaaaaatcccgttcaccgaaaaaagcgggagtcgggagcgggaatcccgtaaaatcccgcgggagtcccgatcccgccggactctagtaggaacccatgaacaaaaagaaaatcaaaatatttgaatttctgcagagtgattgaaccaagggaaagaagtggaaaatcaagaggattccatattcgtgatcattgatcagcgacctcggaaacccccggcggatacttgttttctgaactttttaaaccaaaaaaagaatttgaaaaaatgttgaccaaaaatgtggatacaaactcctgtagtaccatttttataattagataacaaagcggaaaacaatgaaaacaaaatttgagaagctcgaaaaacacagaaaaagggaacgcaacagaagagaggaggaccaccaaagagaatattttgcaaaattatgaccatttgccgggcgttttaccttatccccccacccacaaatcaatcgatcaaataatcaattggacggatagaggaaaaggatgaaaatagcattggggaaggaggagagacggaagagaaagagaggaaaaggaaaaattcgaagcaaggagggggagaaagaggaggaaaaggatgaaaatagcattggggaaggaggagagacggaagagaaagagaggaaaaggaaaaattcgaagcaaggagggggagaaagaggaggaaaaggatgaaaatagcattggggaaggaggagagacggaagagaaagagaggaaaaggaaaaattcgaagcaaggagggggagaaagaggaggaaaaggatgaaaatagcattggggaaggaggagagacggaagagaaagagaggaaaaggaaaaattcgaagcaaggagggggagaaagaggaggaaaaggatgaaaatagcattggggaaggaggagagacggaagagaaagagaggaaaaggaaaaattcgacggaagaaggagggggagaaagaggaggaaaaggatgaaaatagcagtggggaaggaggagagacggaagagaaagagaggaaaaggaaaaattcgacggaaggaagaggaggagagaatgaagcagaaaagagagaggaacagcagcaaattgacactttttaaaattttgccggtcctaattgctaatggatgtcgtaaatccacgtcaaaatcctaaaaaatacacaattttcgaaagaaaaatgcattcattcgattacataggcaaaaaattttgtgttgtggcgtgggtttgcaggagcacagcttgttccccaaatcccattaacgatttaaaaaaaaatcatgaatttctcagggaatttcgggcaaatttcaaacaatttattacaaatagagctaaaatttttagaccccctaagaatagaccccaaaaattttcagaaaatttttttaaaaggcatttgatcactgatttaattatgatcggtcggtcatttcttaattaattcatttcttcttcagctgatcactgtttttgttcgtttgtccctcactcatttcgcccttttgtgatgctttgtcccgcttcttctgccggtggcggagacaaaggccttaattaagcgcaaaattcaaattggataaaaatcaaatgctttttattgctcacccaatgcaattagtgccactaaaaagccaaatgaacacattgttacaattgttgttccaattttcatctttcttctgctgtagcttaaccgccgtggtctccgcaattttatggacataaaatagcaaaaatatggacataaattctccgaattgaggggtaaattttcaaaaatattcttcaaattcattaaattctattagaatacatctaaaatggctaaatacggtataagaactcgttttaaaagaaaaaaagctatttttaatgaaaaccaacaaaaaaaaaccgaaattttcctttttgcttatttttgacataaataaccaatttctaagaaaatttaaatttaatcaattttttcgacaaaattttgttaaaaaatgtctttttcggaaaattttccagtctttggggtcaaaacggccaatttagctgacgagggccgttctaataggggttttgtagaaaaatgccaaaatatggacataaatcgcgaaatatggaaaaatatggatatagaaatccatcctagaagcttcaaaccaagctaaaaacatgtttttcttgcgtgtccagaaaaaaaatatggatttccatataattggaagccctagtgatcagtgatcccggaaatccctgcctgaaaagtcaatttttgttgattaatggggaaagcgtaagtggtgaatgtttgccgaaaaaatccattttccaatggcacgaccaccgccagcagcattatcaggcagaaaagcggtgccaatttcgtttgtgttcggctccagcacaccccgcgagatctcccaccatgtcaacgaatgtgccaagaaggggctgaaggccaagttggaccagggcggtggggacacggcgaagcgccggggtgacatcatctactacatgaggcaggcaaagtccactgacgcgaaaggtccagcagagcaggcaaatttcaaatggagtggagtcatttttgtgctccgtaaatacgggtacatccctaaatctcgccactcgaaagctcgccgagacaaaatctggctgacttgaatatttttttttataaaattgaaaatcccggactgctaatttgaaattacatggtttttggagctccgtaattacggattacggcttccgtgtcgaaaaatagctgtaattacggcttcgcgtaattggaaaatccagttacgtacagccctggataggacaaccatttttggcactgtgtgccaatggtcgagagcagaaaattattggcattgaccagggctcccagatcaaaattttcaaaagcctcatttggcaggcaaaaaagcctcatttttataaaaggtattctaaacacgcttaaaatgttcaaattttatatttttgattgcccatgatcaatttgagcaattttttgttcgaaataaacattttgtgaaattctaagcatgaaaaaccgaagttgatttttttgcggcgcttttttcaaaaaacttttggggaataatgggggccggcggtgcagataggcgccgccgggaaaaattttgtaattttcaatgcgatttgttaacagatttgtcgacaaatatggccaaaaacattatgccattttatcaaaattaatcaaaatttaaaaaatctgacgaattttccccaaaaatcttcaaaatttctcaaaaaaccacaaaaagcctcaaaatttctcaaaaaccacaaaaagcctcaaagcctcattttgaaaatttagcctcattgacctatcaaaaaaccacaaaatgaggctaaagcctcgcatctgggagccctggcattgaccaggccagaactaagaaccttccccaccgaatctctggcttagagaattggacaattttacatggacacgagagagggttgaaattggattttttggcataatgccattgggccgaaggtgcgaggttttaaattggaggattttaggtaagaatttcttggcacggtgccagggttcaagttccgccgatccgaattgccgatttaatattttttgccgtttgcctaaatatccatggggaccgaacggtgtggcacagattttctgctttgtccttccttacttggccctcaactagttttgccgggatttgagtcccgacaccgaaattcgagtcccagttttgtcggaatctcgatcctcccgttttccaatagaaaaaacggatcggcgtctcgggaaatcctaatgggatcccgatcccttcccgtttatagtctcgaattttcggaggtcaatctcggtccgagtcttgccgagtctcaaattttccatgcctaattttctgggcctcaatgcgcggctggccagcagcagcccttttccaaaacagtggtgccaagtcttagcattcagaggtgccaattctttcataaatccaccaattatatcgaatttttcgacaaaacatgggataactttgcttaaatgcaataaaattgtatattcttggtatcattcgatagccgagctttttcactattagcccgcaaaataaaaataaaaattggtcaactttagaaaaagttgtatgaaaataagtactatttctgccataacttatgttaaatttggtaacttttttgaaattttccaagctaatagagaaaaagctgggctatcgaatggtaccaagaattaaaatttgattgactttaagcaaagttatgccatgttttgtcgaaaaatttgctaaaattggcggatttatgaaacgatctggcacggcattcggagataaaagaaatattttaaaatgggataatgcatttttaagagcgatggatcactgctggcggcggcggtggtcgctccatttcgacagagtcacgaaatgaggaagatgaagctgcttccgagccggacattttgcaggacagaatgatcgacttcatgcggcacaaaaaggaaagcacaacaacaccaacaacagcaacaacgaaaatggaggacggcggcggcagcaggggaagggtactgtagcttgggatgggtttttgtaacaataatatactgtagctagttggcatacagtaagcggtggaaaatggatcggcgtctcgggaaatcctaatgggatcccgatcccttcccgtttatagtctcgaattttcggaggtcaatctcggtccgagtcttgccgagtctcaaattttccatgcctaattttctgggcctcaatgcgcggctggccagcagcagcccttttccaaaacagtggtgccaaatcttagcattcatcagaggtgccaggtcgtttcataaatccgccaattttaacgaatttttcgacaaatcatggcataactttgcttaaatgcaataaaattgtatattcttggtatcattcgatagccaagctttttctctatttgcctgcaaaattgcaaaaaatttggtcaactttagaaaaagttgtatgaaaataagtactatttctaccataactactgttaaatttggtaactttttttgcaattttgcaggctaatagagaaaaagcttnnctatcgaatggtaccaagaatgtaaaatcttggtaagtgcctttaaacaaagttatgccatgttttgtcgaaaa

SEQ ID NO: 3392 - DNA, 2255 bp, Heterodera glycines
ataaattaaaagtaaatgcccacctccaaatgccgtccttcggcatccaaaatgcgtggcacaatgccaaagaatggcagcgtggcagcgcccggttttgttggcgttgccccaggcattggcgtcagcacatgaccacccttaaattaaaaattaaaaatgattttaattgaaaatatcttgattaaagggaaaaattaaagtgaagcaataattaaaaattaataataaataaagaaaagaaaaaataatttttttttaaataaaaggataaaaaattattatttaattttaaaataataaagaaaaattatataaaaaataataataaagaaaaataattaaaaaataaatacgaatcaatgattttttaaatattattataaattaaaataaattagaaatgtattaaatacagagtaacacaaaatattacagtctccgtttgccaataagtgtccacaatggcacaccgttcttctcccactacggtgtacaaccatttccaagctgaaggatttattggctgaaattaaaaaaaagcaaaaattaattttgtaataattcaattaaaaaagttaccacctcgccaaccgagccgatcacttgaagcgatgaacggtcatgttttgtgaccatttcgtctgaaaatgccatcagcgcacgcacagcggttggcgcagtgtacagcttggtgatctgtatggaaaaaattaaaaaaacaaaaaaaaaataaaggaaaataaaaatgttaaaatctttttaaataattttcaaaaaataatatggattatgttagatttttatatttttacacattttatttttgtagataaacatttttatgagtgaagcatgaaaaacttaaaaaatttctcagaaaaaattttcaaattctagacgatatcacgaaaatttaatttttatttagacttgttttactaaattttttaaaaaattgttatttataaaaattgtcaaaaaaaaatatagcataaaaataaattgttataattcttttggtgttttagcatttttttttgaaggttttttagcaaaggtatataatgtatatatttatttaaaaaattcaaaaccaggcctaataaatcaatatttaattgattttccaccttatatttctcgacaatggcccacattcgggatgtgtctggatagctgggcaccccttcaaagatcaccgatgtcagcccgttcagcaacggtccatagaccacatatgagtgacccgtgatccagcctgtgatttgtgagaatgattttaattctttcccgcaaaattttttctagtaattgtttcaaattttttcaaaaccgggattccggtcgaaaattccaggttcatcgaccaattctaattaaaattttaaaaaattgaccacaatcagcggtacaccaataaacatcatggtcagcatgtgcatcaaacgagcatttggtggtcatgtacacatagcacatgtaactgaaaatacattcagtcacaacatattttaaaattttttgcgagaatttctagtgaaattctatcataaaagcaaaaagtaaatttaatttttttggacaaggtgagtaatgatacggaaaaaaagtcattgctgagaaatttcttacttttaaaatttaccaaaacttaagactttttttttggggggaggggaactagatttttatcaacgaaattttttctatctgcgccaaaaaatccaaaaaattttgaaaacaaataaaaattgttaagacaagaaaatttttaaaaacttaccaaatttatgaggcttttcaaaagtttattaaatttttttagtctaggttttggttttggtaaatttttttaaaatttcctcgccggaaggggtacgacggaggaatcaagaccatcaaaatcccgacaataatttgaatacatattccctacccggccgtggtgtgcaaaatgcccttgggcaccccggtggagccggacgtgtacaggatgaacagcgggtgttccgcgtccacccactcgaccggagcagccgcgccatgcgctccactatgcttttccgctgccattgccgcgtcccagctcacatccctcgcggcatcccattgtgatgttgttgttgcttgcgccgatgtgccgttgccattcccgttgccgttgtcagccgccgaatgccgtggcacgctcactttgcacaaatgttccacgacgatcatgtgctccaccgggtggcccttctccgcacaca

SEQ ID NO: 3393 - DNA, 1759 bp, Heterodera glycines
cgcaggccaacattgccaccggcaattcgataaccatgggcaaatagatggacactacgtcaccagcgcgaacgcctcgggcgcgcaatacggcagcgaacgtgaccacctgtgcagcaaaataaagacccgtgaaagaagcatccggagccaaaaaaatttggattttaaaagaaattcattaaaatttttgaaatttaagaccaaaaattcttaaaaagtggcaactataaaaaaatgaaagcggacctattaaacttttaaaaccttttaatcttttctataaaaaaaattagaatgatttattttttctaaaaaaattttaaaaattctaattttttttaatttgaaataacgaaaaaattagcagaaatttttcgtgtttcctagaaaaacaaaaaaataattttaattctttttgagaaagaaattctaggttttaattgaaaattaaaaatgtacgaaactccattgtacaaactaactgcccattgtacgaaaagccatcaaccctttttaagccaggtaacatggcataattctgagaaaattatttcccattatctacaataggctcaatcatcattttttgccattgaaaacaccacctgatcaagcagttgttggtaagtgattgtccgctcgtcgcctggttcgtttccctcccagcggtaggccacccgatcaccaatcccggctttaatgttacgttcctgaattaaatttttgggggggtataaataatgatcattgaccaaatgggtgtactacatccattcccccaccgtttcccgtccctctccctaacaaaaagaaaaattcaaacataaattttaaaattcaagaaaacaaaattttcgaaaaaaattttccaacgatttttcaaggtttatgatgaaatactacttttttctttaaattttcttataaaaaattctaaaaaaaattttttgaaaattttctaagtagaaatcaatcagatccatacaaatcagtctcacaatcaggcattaggtatacgtcagcatttttgacgcccgatttgtcgcccataccctcctctcggtggttcgctgtgtaatggcacaatttgtgccattcttgagtaaagagagactttcgaggccttaccaagtcaatcatgcaaaaaaataataatttctcaccaagcaattgtacgcaatgtttgtccgagaaccgaccatgaagtgcacaaaaacttcgcctttacgatgatcaaaattccattccagcccgttgttcgaaaacacttcaaagtgaagctgttcagcaacagaatgccaaaactttttcgggtcgtccaaagaatggcgatacatgtcctgacaaaattggcaaaacattcaattttggcatgataaaagtcgagggttttggcaacggattttttgttgaaattcaacaagggattttggccgagcactgatcaacaggagttggagatgaatttgtaaaacagtgatcaaagaaaaacctttagaaattctatcctcgaaatgccaagactagtggaaaaagtctgttaatccattagagaccggcaggacaggagcatgagagatcctgtgcaggattttcccaagatcctgactggaccaggtccggactcctgtctgggtccatcttggaaacccccggcccccaggtccagatcctagttcgctttttttcaaaaattccgggttctattaatcaccacatatgttgccatgccattaacatgggcaccggctaacag

SEQ ID NO: 3394 - DNA, 1446 bp, Heterodera glycines
tgggaaaatttgcaaaaaataaataaaaatgaaaaaaataaaatagtttggctagaaaagatataagaaataacgtttaaataaaagagagtggaaaggaaaaattggaaacgggaaagaggaaatccaagaaaatagtgcatgaatgggagagagtgggaaaaagaatgagcatatgcgtttagaatgcatgaaaaatgtaggaaaagaaagaaagaaaaaaagaaaggaaaatggaaataattttttattatgaaaattttctttaatttgataaaataaataatagtgttgaattatgagagtgggaaaattaagaaaggaaaatggaaatatttttttttaataaaaattttctttaaatgtatgtaggctttttaattttaaaagaaaataatttaaatttatgttttaagaaagtgaagacagttttaaaatggtaaatggatgagataataatctcaaaaaattaataatgcgggacgggagggagggagagaatggtttagccaaagcacgattttcagcaggatttcttaattagccttaattggtttatctgatcatgctcatttatgtgaatgtcagatgatccggttaaaaaatgcacacacaaaaaatgcacacacacacaaataccgattttttggagttttggcaaaatgtgcaaatgtcgtcgatgccgtagctgttgtgacgctgtagcaacaacttgaactcgttgttgccaagcatcggtaactgggagaacaacaatgaaacgacgtgcatttgtcgacaaattacgggacatattttatttaattatttattggtataatttttaccaaaaatttttggactatttgtatttagcgcgctaattaggtaattaatgatgaaagagaaaaatgatttaagagtaggcagtcggtcggtcgctgtttttatttgtttgtacgttcattttaaaatgtcgaaagtgtgtgctgacgagaaaagtgtgggtattgagcgatttttgaatgaacatacagcagagagagcaacagcagcaggtgttgtgagattataatcataattatgatttattgatatggcctagagctatttaaacagaaccataatttcgaaatgaaaaatttcagatttttagaatggatttttccaaatgtagactaggttccgataaaattaagtatctttatagcgctaaaaaaattagataataatattctgctcattattagtttggtcggtgtaataaaaggatcaaattaaatcgactgatcatttatttcctctgggagcaattaagatcaattagaagtgaacatggtcagatagatttgtgcttcaatattttgtaattatttgagaaatttctcaaaattataaaatcatatatagacggaaaaatgtttgtaaaaaaatgagaattcaaaagaaaatgttaatagttatgat

SEQ ID NO: 3395 - DNA, 930 bp, Heterodera glycines
caacatattaattttaaattccaacgccaaattacaagaaacattttgctggcggccaggggcggagcaaaagccgtcaaaatagctaaatttcaaaatccattgtgtaaacgatggaaaaaatcgaagaattttcaaaaatacacccctaagaatcgggcgaaaaattttaaaaaatacacccctaagaattgacttttcggatcggtaccccccccccccccccaagcccaaatcctggatacgtccctggttatgatgatcacttgcgtgaccaattttaattagtaagcaattaaagaaatattgaaagggtttaactttttttttttgcaaattggaaagaccgattcacaacactatgaattaaaaataataaaatagtaatagtaattgttagtaaaaatcggttttaaaacttgtttgtcaagatttgttaattgtgaatgagagtgaaaaacaacaaaagggcgaggcggaagaaattaaaaaagatttcgataatttgatcaaattaaaattgaagttttaacttttatgtgaaattttaaataaatctttctaagaaaaaattaatttaatttgagtataaaaaatattttaagatttagaattataaacaattaaatgaattctaaaaacttgcactggtaagaaagggaattcgagcatgaaattattcatgaaaatttggtaaaagggaaaggaatatgctccaaattttcgtcaattttagaaaaaattctttccttttattttattcttgacctattgtaaatttatagtcgttttttgttgacaaatacatataatgtaagtaaaaataataaacaacataggtggaatggacacatgttttcatttctataaaaatttcatttttcctcaaaacatccttttgtttaggtatttaaattattttattaaaaa

SEQ ID NO: 3396 - DNA, 2355 bp, Heterodera glycines
ttataaatcttttctgatttcgacaaaaaaagagcaattcggcatccgaatcgatatacctaacaaaaattgaaattgttaattaactgatagtgtggaatgatagtggagtcgattcaaattttaaaattcagcaaaatttggatgtagattaaacaatgaatgcatatttgaggtgtactttgattcattcagcattcaattaattttctcaattttaaattcgcgccaatttaaaaaattttaaattaaaaacgattctactgttcagtattaggtatttgaaataattttgagccaatgagataatgattaagcaacaagcttattgatttggattaattcatttaaaaaagaaactcacgcggtggcggatgaagaacagcgaaggttaagcccattttggttaactgctgtttttcaatttttttttcatataatataatttccaatttatcgtttgcttactcaatcgatgtgttttggataaagcaaaattcgttgccatatgaatttttaatatggctgaagtgtgcgtaaggcattaagacggacgtcaatttaattaatccctccaaaaacaaggaaaaccactaatccctttagggagttcaaaaaatattaaaaaaaaccgggtacttgtacagtttggatcacatacatagaagatttttaatgctaaaaatgtgtttttaggggtattcggggtcgctgatcacgaatataacattaatttcgaccaatttcgaacccgtgacttgaattcgaaccaaagtcgaaaaaaatcaccaaaatccgccattattatccaaaatcgattcaaatcaaattttattcctttaattcgaatatttttcatttttcagatactttagtactatttccaattgataactctcctctacaaattacacacaacaaatatggttgttgacatttcaaagatggagcctttttcaccaccagtatgctttttttttataaaagaaactgaaaacaagatacctaaatgaactttattttgcccgacatcgttcgggtgtactttttcgaaatccctgtccttgacatttgcgccttagaacttgattttgaacataggagcaatgtccaaggcgcaaaccagggatggggcgcggacagtaaaataccgcagtcgcggattcaagttgccgcggtcgcggatctcgtcaaaaaaatcccgcgtcaaattgccgtgttcgcgtcccaccccaggcgcaaatgtcggagaacataaaaatcaaaaaatttcattcttttgaatccattttctggttagaaaaattttggtttcgtattcattccggtctctaatggtttaaatataattgcccgaaaatttgggttgtctgtgtacaaaattattttataatcattgtccatttttaggtgagtcacgcgttgttcccccatttgaccactgttttgctttccatcgggctcatcttcaccgcgtggttttttgtgcatggggtaagaaaaaaatggatacattttgaagctatgcaattttttcaaatttcgctgaaattaaaaaaaaaccagatacctgtcggaacggccggaccctgattttctaaggttttcaaaaagccaaaacccatacatttggctatatttaatctcgaaaaaaacttcggaccgaaaaacaaaacaggaaaaaatccatggttttttagagtgggtattaaattgtcgacccctcaaccccaaaacttacgataaaatcgaacaaaacggaaattttctaaaatcactaatatgctttattctacacaaaaaattcactgcatattaatgcaaataaagagtgtcacaataaatttcaactttttttgaaaaatttttgtggggtgggggcgaactgctctcgttcaaattccattcctttttgcaggtgaccagtacgaagaaaacgcgaaaccttgtcaaggagttgttcatcggcacattggcgtccctttttcttggcttcggcaccctttttctgatgctttgggtcggcatttatgtttagagttgaaaggaggaagaacacagggatttttgtcttatttttggggactttttttttctaatttatttgtattttttttattcctctgctaattgttattgagtgagtctgcccttttttgtttgtttcttcccaatttggaaactgttgaatgttgtgtaattgtttgtccctttaatatttttattttaaaataaatggaaaacttgggggtgcaactgtacccgtcttgcggcgccttctctgcgatatcagcaatttaattctggcccacaaacaaaactccttaaaatagttataaattgaggggggggggg

SEQ ID NO: 3397 - DNA, 3032 bp, Heterodera glycines
  unsure (1)..(3032): unsure at all n locations
gatgatgcttcaataagaattattttttacatgaaaaatggttaaagcgcattcnngaaacatccctatttatcatgggtgttattgggtccggagcttaatgaacncggtatagtgaaaaagtttggcatttcactgactcgnccatgacacaatgacacagagacccatgctggttccttgattttgaaactagtttccttcctgacccggacgcgataaaaatttttgtaaaattttctagccgatcaccgatttttccctccatgaaatgtcttgggaggaacactattttttaaaaaagaattaaccattccataaattacgtgcaatccactgttgcaagttgaatatactgtactcgctaattataaaattttgtaacttcctgtaggattaataaatggttgctaaaaaatatcaactcactaaaattatatcaacaagctcaggccattccttatccaaaaaattctcatcccagcttggaaagacgagacgcttttcattattagccaattcttttggtttggcatttgattcggctgcctccgcaacttctccagcttgagcatttggtgcggatgcctccgcatctttaccagttggcacatccaaagcaatttcttcataaattggctctattgaggcatctaatatggaattagccaggaatagaattttaaagaaaaattaatttttgtggcattttttaagagcgtgtacacaaattttgaattgggcgatttagtcccgttagccatattcgaccaatcaatcgaaaagtcgcggtctcgttaattttgaacggtcgagcggaaaagattttcgagcttgtttaccatgaccccgtgctccgcacaaaccgtttttgtgatgctcgcaccattcaatcacttctcgcatcaccgtactacttacatttgaaaccggaaatttctaaaaaactataaataatcgtcaagcactctatttataggaaatttattaaaaaagatttttattttatcgaaaattatggcaaaattcattataaaatttctatttagacatgaataatagtagtaatctaattttttttgaacttttaatctaagagcaaaaaatgctcttcaaattccctcatttgtcagattttttccagaggtacaagcctggtttgtgccttcagcagtgtacattccaagatctaggaaataaaaaattagttttttttttaaataattgcatcgaagaaatatgtatttaccttccatcattgtgtcaagcgtagtagaaaaacgaaaaatattacgatcgagctctacttccacttccacgttgtccgcacatttgaggaatatggttggagctggaatttaaatttgtactttttatttatttttaaaataagtttcaaaaatagagaaattaaaaaagcatttaaaattttgaaaaactagctcaaaaatcacgattattaaaatatgttagtttctaaaaaatattttttgcaataaatttttcacactccatgaaaatttgtctttttttgcaaacctattacgaaaactcaggggggggacacatattataggggaagtattgtagagtagccattttttttacaaaaaagaaaattgcatattattcttacaccataaaaacacgtcagtccgaaaaaaacgagagatgaaccaacaggtaaatagagattgtgagagaaatacgcgacaaaatgaaatgccaaaggtttgttaatgatcatttacgcggcggcggcggattggggtgatgcacatattggaaaatggaggacgaatttgcgggatttcggcccttggcacgctgctgctgttcatgaaacgccatctcataggcacgactcttctgaccctggggaaaagtagagaaaagatagaaaaaattgctctttacgcaacctttgcagagcgtatttttcaaaatcaaaaatcggggaaggaagggcctggcagtgcagataggcgccacattgaaaaattgaagaatntagggccatatttttaaacccgcgccaaaaatgataattttgtggttttttggaaaaattagtatggaaaagagacctccattagaaccactgttttacaaaaaaaattttggctgccgaagaaaacaattcaactcaaaattgattattaacaaaaatttcgttgttcacctgctccctctgtttgctggcatctgcacgcgcacctaagggtgatgaggtccctgtttgcctgttcacatgaggcaaaatcaatgaataaaaccgaaatttgaacaaaaaaaaaaaacactaaataggtactccacttttctaaaactttgcttaaattaaaaaaaaaaagttaatttttggcttaattttttgaaaatttttctgatgttagtacagataagttttccttagaaattttaaataataagtgctcttgagccagaaattttttcttgtcagccacactaaagcccccccgccccctccggcttcgttacaacaatttttttttgtacctgctcgaagtggttgatttaagagatgtggaaattggactggcaaaattgacacgattgttccggctactggccccatcttaaaaaatctattattaaagaaaaatttgcttttttttaaagtaaaaaaattcaactgcggctgtcatcacggcctaacggcgaaagtaaagacatttttggtcagaaattagcgcctatattttttgaaaaaattacactggaaaaattaggggcctaaaaaaggttgggttcctccccttcatcctttcggatttttttttctgtttacaggcctgttttaaaactaacagtaaaaaaaatcatgagaaaattttaaggtttttttttctagctaatccacaattttttgacaaattacaaagtttttcaaaaaattttccaccccacttgtttgttgcttcaaaattggctgcttcggtggtgctggcggtggtgttggaggtgatgactgtctcgtaaggctactgctgctgtgacggctccgctcc

SEQ ID NO: 3398 - DNA, 1310 bp, Heterodera glycines
ccccccccccctctctctctcttctctctgtgagtgtctttcgtctctctctctctctcgcttctctctctgtgtgtccctcttatttcgccacctgaatcatttgcggttcgtccattatttgacgaagggcgagacgaaccccgtaaagtttggcagcaaagtcttgttcagattcacattcgcatgattccgccctaaacgcttggaaaattttgaaaacaataatcaaaaattatcaaaattaagtgaacatagtccaatttgcccggcttaatatgccatcaaatctaaggttttagtcggaccaacctgctcttacgaaaccgcacttccccttgttgcaccatctcaagtcctcgcttgtatagacccattgcactttgttcagtgcccattgttgtcagcgacggctgaggctcgtcgccctgcggcggtacttgggatacggcgacctaaaaaggaggaagcaaaatttaaaaaatgttcctttggaaagatccaaaattttgggtacaagctaaattcggcaaaggcgtttgctgtgattagtatgttaacagtagaagcatagccattcccatgcccacccatgaaatgaaaaaaaaaaacttaaaatgggaaatttttagaaaatttaaagcaattcttaacaaagggcattaaaattccaaaaatattcacgtcaacgctacaataccgcccccattttatgcaaaaagcagttttttatcaagattatcagctcggtttgttgtactgatcatgatcattacctggttctgttcgaagccgtccatttcggtcaaaggttggttgatggtttggttggcatgcggagaaatggcatcgtttgcccgttttgagcccaccgagtcaaaattacaaaaattcctggtcatcatgcgtcgtatgtgtccatcaaattttgcgaagtattcctttagccctttgctttcccaattggatgtcgacgggaaatcagaggaagttttgaagtgggaatacccaatggatatgctgaaaatctcaaggattattacaagtccaaataatttaacatacgcaaatgctgcagttccaatggcaccaaatcgaaataatcgcagggaaagaggacggaaacgcatctttaaaacaaaagaaataaaatgcacaaatgttttgtaagtaatagagacagagattttcaaatcagtcggaccatcgagaaaggaagacttaagagaaacctgaaaaggaaaaaaagaaaaggggaaaaagaaaagaggaaaaagaatagagatgaatgaagggtcacagagaaaaaa

SEQ ID NO: 3399 - DNA, 2021 bp, Heterodera glycines
  unsure (1)..(2021): unsure at all n locations
ggaaaaagaaaagaggaaaagaatagagatgaatgaggtcacccagagaaannaagggaaaaaggaaaaaggggagaganaagcggaaaaagaaaagaggaaaaagaaaggggaaaagaaaaagaggaaaaagaaaaggggaaaagaaaaagaggaaaaagaaaaggggaaatcgtgatcagcgaccccgaanaattttgaacgacttgttaaattttgaaaatttccgccaaaaataggggtaacatcttaactattaccatttgttcatatttttgtttgttttgcggatagaaatctgtcttttaagcggagttgtggtgttgagttttccgttttccggagaaattaagggccataaggcttaaatcgcctctaacattagctaaccgaatcaacctgactgcaaccaacactaaaataatgtacagacattccttaagcattttctgttcactttatacaagaaaaaattcattaaacaaaaaatttttgtgggtgaaaaaatgtgaaaatctgggtaaattcgtaaaaaaatttctagggggttggtaaaaaatttccgtattgaaccaaacgcgcctcagcggatgcgcggcgtagagccctcatccaaaggccattttgtagagaattttattctctttcatatgccttaatttgatcaatttgttctcgccaaaatgcttgcgccatataaactcggggaaataagtttcaaatgtgtttgcagtgtttccgctacgtggtcggaaaacccgcgtaattgttcaatagccattagggggtgaggaataggtctaatgccagggatttggccaaatggaatgggttgtggagcacccctccccccgccccttactcccattaacaaaaagacgttcgctgacagacacaaaagctgttcaaaatgcagctgcaattaacaaagaggtcgtcgaccagccgatttaaatttggagaatttttttttaatcctttcgtgcattataatcgattttgggcaataaatgttaattttggtgaaaaataaattttcgacttttgttcgaatttgggtctggggtcgaaattggtcgaaatagatgtcagattcgtgatcagcgtccccgaaaacccctaaaaacatgttttaatcgaaaaaaaaaatttgaaattttttttcaaaaaagggaggggacaaactacagtattacccaaatgacttttttgatcaatactaaaaactaagcttaaatgagttttttcagattttttaatgctcaattcaaaaagtaacagcattctgaaaaaagtgtccttatattaatgttacaccccattttggaaaaaaaaattcgtaaaaatgtttccgtcattatttcgggttctcaattttagaatcttaatattttcagaattgctacgtagttaaaatttcaactcgatcggttcatgggaagtggtcaaactaacaaaaaatagggcgtccttatattaatgttacagtgtatgagaaggcacgaagaaatcctactgggtcatgactgttgcagcattttgctgcgactcgtttttgaatcgttaaaccgaagaaagaaacagttaaagtgccaaaattatttgcaaccgaaatttattaaatatttcgaatgaagaatatttattcgacccaagtattgaaatgaattagaaaacagaaagtaacaacgtttttcacttccttcttctccgttccaaattactcttccgtctttttagcgccgttcgcttccactgcctttccgcttcccttgacatttgttcctccgcccacttcctcctcctcctcagcttcatctttgaacacagtcctcttaaggtcaaaaattgactttgtcttcttttcccagctgccctccgtcccttccaaccttcgcctttctgccctcttcgtcctgtttctgttcgtgtcccctttttctgtttcgtctcgcctgttgttgctggtcaaacttcccacttttgccctttgctttgccctgcttcatccgctgctgctt

SEQ ID NO: 3400 - DNA, 2710 bp, Heterodera glycines
  unsure (1)..(2710): unsure at all n locations
gttatttcgggcccaactaagccggtattcaggtataagtccaaacagaaactagcacacgtttaattatacgtttaaacaaccgtaagaattgattaaataataagattgccaggttcccatacataaattttttgattttcaagaacatataaattttaagaaaaaagggttgctaaaatttactaaattttaatgatttatataacattttatttatttattttgttttatttttttgaaatcccccctctggtgcccaaacttcccggtgcccaaatttctggtgcccaaacttcctggtgcccaaacttcccggtgcccaaacttcatgtcgcctttgaaattaggtagcaaatcaaaatgccaaaaatcaaatttataaaaatttttctatcttggtatgcaattcgcaaaatttttcgtaaaatctctgacagaaaattccgacttcttgttcgaattcgagtccagaagtcgaagttggtcaagatgaaggttctattcgtgatattctgaaaaccacctcacacatgtttttgtgacattaaagcagaaaaattctttctaaaaaagggaactataggcagtattaccagtttcttgattcaaggtctttagtatttttcttttgaaatcgtataatggtcgagaggcgcaaggaatcgcctaagcgtcgccgccgttcgtcaagttcttcgagttctggaagctcttccagtactggttctagctcatcaggttcatcttcgtcctcttccaccactgcttctcgttcaccttccccaaagaaacaaagagcagctgctcgtccttctgctcgtgacgatcgtactacacgtcgttctccaagaaggttaacctgttagggactctaattggctaagctaaccaatgtttctgctccctccatttcgatgtatacacttattcgcaaatcttttattttaggacggggggacggttaacccactcgtattcttttcgtttaataggtcgcgttctccccatcgtgtccaaccgaaaacagagaaaagcactgtcagctctcgccgttcaccgtctccccgtcgtcgtcgtccgtcgcctcccagccgcggcccgcgtcgccgttcgcgctcgcctcgtcatgaacgcgcggctccatcaccaccaccagtgaaaagggaacgtactccggaaccaccgccacgccgactttgtgttcggtaatttttgttgtaatttattgaaatacaaatgaattgttcagaaatctaagcagaaatatcacaaaagcgcacatggaggaaatcttcgctctgtttggggctctaaagtcctgtgagttgccaatggaccgtgtgcatgtgcatttgccccggggatacggctatgtggagtatgaaaaggcggaggatgcggagaaggctctgaaacatatggacggaggtcaaattgacggactggaaattcagtgcgaaatgacttttcctttcaaagggaccggcggaggttagagcacatggggagtgttttcttcggtttacttattgcttcgtttaggtcgtggtcattcgcccgtcgggattaattctatgggcattgggatcaagcgcgagcggagccgttcccctgcgcgtcgttttgccgctcgtttgtcgcctccgcgtcgcggccgtcgctcgcgctcgccgcctccgatgcgcgcgtctggcgcaaatcaaattcctttggggaacaacggccgttttagaagtcgatctcctcgtcgttgatgactgatgaccatcttttgcaatgaagcgatttcgaataatacccacgtaaaattgtttgatcaaatgaaaacgaaaagtgttctcgcccctcgttattttgttctcgttttcgaaatcgatcaatatatatggtcattctgtcccaatttatttaaaaaaattaatgtttttacattaattggctagcttttgttagaaatgcacttcagaaatatttaccagattgtttggttttattgcatcttgtttagaattttattgttataaacgatttgcagatgtcaatttttcgtagctttttctctgctacagacgatgctcaatcggacgatgcaactaatgcagaaatagtcgatcgccttgtcgaacgattggaaaccgggagcagtatcgaagacaggagggatgcgctcaaagcacttaggtcgttggcgcgggtaaggcgcctgttccaccatttttcttaaggttacaacctttgattgcagaatcttcgtcttcatgtcgcgactcgtggcatgagcgcttacatggacattcttgaaaaggaggccaacctgcaagatttggttgccctcacattagacattttggacatagtgctcaacgacagtgccaacggtggtgagcaagacgcaacgacagtggctgagaacgaggacgaagtgggcgatcgccttgctgaagtgtttctgcaaaagcccacatttatggtctcgctgatcaaactgcttgagtgttatgacttcgccgtgcgcaggcaaaaaatgatatactttttcaacgagtttacgtattcagaaatgccattaaacttttgacttcgctgcttcggcataggcccagtgccgtgcagcaggcggtgattagtcaagcagtcggaatttcccacattgtcgaccttctccatgacaaggtgngacttacaattatgatcttttataggccta

SEQ ID NO: 3401 - DNA, 1762 bp, Heterodera glycines
tcagaattttacatacgagcggcccaacgcccttcagccgttggcaaaaggcccttccgatttgttgttggattatcaattcaccaaattcttcaaattaatggagggtttgttttctgttcattttttctcactttgaactgcatctttaagggcatttgcttaagtttttccgtccaaacggtgaactttcttcttctgtaaatacacagcttgaaggtgcgcttgtgccttacaaaaagttgatcaaaaaacaggacgaaaccattgccgagcttaccagggaactgaaagagttgaaagttgcgcagaagcaacaaaagacggacaatgagcagcaaaaagagcataccaactgcaatggagtgggtttttctttatactagtactagtacacctcattatttagtttctcaaggttattccaactgaagagtttgcttcaacgactgtccaagcggatgcctcagcaaatggcgagcaattggcactgctgagggcggaattggcagagaaaaatgcactgaacgaacggagggcagacgcagagacgaaactgcagcagctgacagtgtccggaggcggatttcccatgaaatatcgaccaatttcaattttagccttgcacaacaatggcaaatcgaagctgatcgatacaagggatgggctttgcaatggcagtcctaccaaatatcgcaggttttcgtcaattaccgaaaaaaaactatttattttttaactcacaataagttgcctaacccaactgatacggtaatccaacaattggagcagcaaaaaacagagcttgaactacaaatccaatatggatggcaggcctttgaagcgcaaagtgctcaattaggcgaattagtacgaatttcggaagcaaatgcgaacaaactgaaccaggtggagcgtgaattgtccgaagttagcagtgagcgagaaactttgcggcagcaattagaggtcttacatttactctcccagaagtgcatcgaatcaatcgacaaatgtttagagccagcaaaatgtcccgcagggatcagccgttgccacacacagcgaggagttgacactgctgaagcgtgaacacgaggacttgttgctactgttggcagagcaggacaggaaaatacatgactaccgtcggcggttggcctcccatggagaagcattaagtgacgcggacgaagagccatgaacctgcccagaagaagaagaacacgagctcttcccagtcttaatgaggcctacaaaatttgatgctgacaaagaaattctttggttccttttcctgttgtgaatcttgattcgtttttttcttttaaatcgactaacaaaaagctggactgtttataatttattgtttccccttgttgcgaattgccttgagtttggttgtgttattacggtttcaactgaataagagacaactttgtataggcgaatcatgtctgtgattgtttatttaattttgataaagcaaatatgtgtttgtttttcattttctataatggcaattttcccatctgtcataaactaaaaattcaaaaacttaatgcttttcattgtttgctttgcttgctaaaaacgtgcgatggtaattgccacaccgcccgctacgatggaagagggtcgcattttgctggtcggcaatgaaagcgatattttgcactcggctttttgttttccactgaacgaaggcggtaaaaggtcagagagaatggcatttgccattgaatttatatttctgattgtg

SEQ ID NO: 3402 - DNA, 5054 bp, Heterodera glycines
  unsure (1)..(5054): unsure at all n locations
ctaatagttatttctacttctgctctgacatcatttctctttatcatttggtcaacttcggtagggtctatccgtttgtccgacttcaccaacacttcccggcgaagtttgacgaattgacgtcctccggtctgtgttttggctttggtcactgcttcaggattttcttcaaaaacgcagtgaacggtggcccggatttgggcgggatcagtgatttgccacaactgacgctgatcgatcagctgaataggaaaaacaaaataatataattaacacccgtggagcccacttcttccattgactgctgagtttgttttctgcccaattccttcatcaattgaatgcaaaccaatttggtgagtcgtttttgttggttaaatgcaatgagatcagcgaaatgacgaataaaaaacggacttaaattgcaaatgtaatttcacttgacttcaagcggaaaagcaccaactcagtgggaggaaagtcggcagaaagccaatcgcaaatatgtctgagttcttcgagccacggaaaaaagcaatcattagggatcattttgccagaagaggtgtaatggcgaataaaagtctccattttggcatcattctgaaacaaaattgccataaaaggcagtgccatccgtcgatgaattaattaagcaaaaaaaggctgacacaaatgttccttttttggtaccccccccccttatcgctgggtctgttcttcacccgttcgtccaatccatcggtccgtccctctcaccataatttcgatggcgaacgacggagggtagccgaactcgacaacgcattgatggaaaaacagttccctttttacgcttcgcttcgcatctttcacccaatccgagtcgatgttgaggcggggcaaattgggctcgggcataaatcggtagtccattttagaacccttcgctcgggatgtcgtcgtggtcttcctgttcacttttttttaatctgaatttgtacccaatgacagaccctttcacgtccactgccctcgtttcctcttctatttggcccccgtctctcagaatggacatttggcgtctcaattctattccaatggcggcgcttaaaaggctcaaactactcaggttcttcaactcggtccgttttcccggagtctctcccttcgacacggagacattcacgtccactctgaaatggccctctgaaaatggaaaacaaatcagagtttcaatccagtcaatatgaccatgaaaatggccggtacaaatgtcgttgtgcatcaacaaacggcgcaactgctcgacaaaaagggtcgcctcgaaggcattggccaagtcgggcgccgtcacaatttccactaggccaacgccggcccggttcaggtcgacgaggtcattctcatctgctcgcagagttttcccgctgtccatttccaattgaagctgctcaattttgatggacttctcganaaaatcctgcaaaattccatttatgaggaattaaaaaacgataatatgaagcaatacggtagaatttttgtcattttgcgagtacaaattgaagtgaccgttccgggcattggacaacttttctgcgtaatttggtagcctaaaatttagaatagcttaattatcaaaaaatgcccacccaatggaaggtccggataaaaataatgcttccgatcaaacggcaaacatccgcaatttcacagttcaacaggactgcggcgagaaggcatttctgttaaggtaaaaatacaaaatacatatcatcaaattgtcgctgcattggctggcgaaatcacctcaacgcacttccgattcaaagttggcaaagtgccgggagttgccaaatcctaaaaatgtgttggcttagtttgagaatttaagtggataaataaagtaatgggcgctcacaaatgcggagacgacactgttactggtcaaagatgaagaagcgggtgaaatggcatccgaaaaaagtttggaggacgaattgatttgtgcgtgaatctgagaaaaacggaagctaatgaagagaggaaagacaagagatgttcgatcgttttacttccaatccaatttgaggcttaaagccttcaaaatcgttgttggaaaaagagacaaatcggcgaacgggaaaaagcgcagatttgtgaaagagagaataattatttattcgaattgccatgattgagctgtattcaactaaaagaaaacgctaaagacgaaaaaattatgaggaaatttgtttttattaggtggggggtcaacaaaatcgttatgcttatttcctattatttaatttaccatccagacaaataggtatttggaatttccgctcatttaataatgtatttttcaaggatttatagagaagaggtcatgtcattcagattttacaattaacaatatcaataagaaatggcatccctgaatataatcaagaacaattgaaaaacccatgatgacaatcaatagcaaggctttatagcaaggacgagaagctaaatgtccattttagtgaataaaacaatacatttaatgaaatagatttgttcctactaatatttttgttaaaacaaagtcttaaggccttctaataaattaacgaataaggtcgaggaaattcttggccggcgtctcaccgctgcaaactttgtgaatcgccacaaagaacggaaacctgaaggataagtaaattcaataaagcaaaaataggagtatttcatcttctcatatcgtttccccacccaaaaaaaaataataattttttttgggggagaaacatagtgcaacccaaattaaacgatcaccgttgatcattcttatttacatattttgttcgactcactctttggtcagattcttcgcttgcagcacttcgaacacttctttcgctgtcaatggcccctgcgcactctgtccattcagcaattccttctccacctctgccaaaggctaaaagaaacaaataaattcttattttgacggattattcgcataccttgtttgatttgacgaatgcctcgcacactcttcggttccgtccgcctatacacgtggtcaaaagatcagcgaatccgcacgactcgaaaaaggtcttcaagttggcgccgggatagaacagttcgatgaactttatcatgtccatgagaccgattcggatgatggccgcctgttgaaaggttaaaaatgattcgctgtttctccttcacccccaaccattgtgttgtcgccataaccgagcccaactgagaatccggcgccgcatgccacgatgtttttaagagcaccgcacaactcaacctaaaataggcatttccgcgaaaaaaagaagcaattcatttaccgttgccgcgtcttcgaccacatttattcggaaattgtcggtgtgaaacaacttcttcaattcatttccatgctgtgggtttttggttcctacaggcaaaataaataaaatgaattttaccaacaagaattaaatgtttaccaatagttgcttcacaaaactaaaaataataaatgatttataaaacaatggaggaaagaatttacgtggtcttctgccacttcgttcgcgagattagcacccattagcacggaagtgtcaatgccaagagaggtcgcgatttcattagagatcagtcgcagcccaatgtctttttcgtgaaaagtggccaagccctaaaaataattttcaaaaataactcactgctttatttaatcgttttcaccttaatcagcgaaattgcgattgcgctctttttgatgtttcctttgagctgttcgcaaactttgtgcaagaattggtgagggatgatgaaaatgagaacatccgcgttttttgaagcctcaacaacatcagtgacagcgataacattagtgggaagtttctgaattccaataaaagttggaaagacaatgacaaattcaaagtttcggcacctttccgggcaaatatttcacattttcgtgtttctcgttgataatttcgctaagtttgcgtccttcaaccacctaaacgaatttaaaaaaaagaatatttcgttttgggtgtttttcacctcttcaaagacccacattttgaccgccgagtcatcaaattctgagttatgcatttgcaccgttttgcccacaattcgagcaattgccgtgccccaatttccagaaccaacgatggtgacttgtttcttcgtcattttaaaattaagacaactcaaatactgaatctaatgaaactgaaaaaagatttaaatgaggtgaaagagggggaaagcaaacaaaaggaaaaaaatgaatgaatgaatggtcggtctgttaacaaaagtacacaaatcaaaagaaagaaagaggcgggaggggaatttaacaggaaaagtaaaacaaatggggagagcgaaatgcttttaaagaacacaaaatccatcataaaaaggtaataaaaatcgtttagaaaaaagttgtgttgttgtccttttatttatggtcgtgaaaactgcaatagcgccggtcatcagaatgagtgaatggtttgactaattaataattgccgcttaaatacgaatactcccaaaaaataaaagatcattaaaaatgatgcttatctattttcgtcctcgaccccccccccccccaccgccccaacgatctttacgctccgtcgaacgactattttcgttcccattcctacgcccataagtttttcaatgatcactataatacctcttaattatcatgaaacacaaagtgtccacgtgaaatacataataatcactatttattaatggccgacggttggtgtgggctgggcggtctttccacaaggtaatttattatatggagtagccaattgaagggagaaaaaaaggggaggaagaacaaacacactttatatttggaacattttattaaagccaaaaatttatgagcacattcgactagtaaccgtattctaaaacaaaaatacaaaatatgccaaaaatatattgaaaaatcgacccagcaaaggaagaatataaatgagcaagggacgagacaatcaatataagtattgcaagatcaatta

SEQ ID NO: 3403 - DNA, 6192 bp, Heterodera glycines
tcagacacactgaaatagcctttgtcgttggtgcaacggaacaaccgcgtgtattccatgaagtccgcgtcccggtcgtacttctttttgccccccaatgccttccaaaatagcaatggttcatttccttcctcaattctttgaacagcaaagtcagaatctcgaccaatcaattcactcgcaacctgataaaaggagggcataaacataaatataatcaaaaaccacctcttccgccaatttgtggaagtaagggtcactcttggaaccaatccacacaaaaacgtttccaatgccctcttcatccgtttgaaggtcagaaggaggaactcgaagaataaaacagaaggcggaattcagtcttgtcgcattacagtccacttggatggtccgtgtgcaaattgaagtgccattggctcgcatatggaataactctggcaccgcttggctcaaattgtgcgacggatttcttttgccataacggatgaccaatttgcatttgaaatgtgacaggaatttgtgattctcttgctgctgattcattcgcaccacctccagcttgtctttgaacaagctttcaaactttttctgaaacggaattatcattccgttggcatgacagtccaacttggagtgaaaatgtgaagtgtaaccatcccatgttgctggcatctcggccctgccagaagtaaacgacgcatttgaagtcgcttggttttcccgaggcagaattctttggctaaaggtggcagtaaaaatgataacaaagtgaatattcacacctctttaattggaccaccctcgtcattctcatccgacacatcgtttgcctctttttcatcttcggctccctcctcctcttcatcgtcgtcatcgataaaataacgacacaaaaacacataacagtccattgaatgaaaaatgccaaattcattctgaggaaggcggacaaattttttcccttccttaaacgcggcatttatttgatgttttatagtaagtgaaatctcaccagcacaaatgattcgatcacttccaaatccatgttgaaatcctcaatgattttctccgtgtcgctgtgtggcattgcaggcagacggtcgaggaacaaagcgaccaaatccgtcttcaatttgtctctctccataataacctgaaatattgataggagttattggtaatatgccagaaaaatctcacttttatgtccgctccgcgtctttgcacagtgtccgctgtcattgtgaaatcgaatggcacaatgtcatcccacgccgcgaatttggaacgaaatatcgttgattcttcatcttcgttttctcggcaaatcacacagaagtcaggccgttcgatcattcgatggatttcagatgcgattttctagcaaaaaaaaaacaattcacttccaaagctgtgttcacaattcaaaacctgtcccgccattttcgtaagacgattagcatttttgccgacccacaagaataattctgaagtgcaatccaacagaaacactcctttcggcttcagcagttctttatgcaacacgccatttctcagctccacctgaggcaactccaaaaatcccatgccaagttggacttcgtagagacgtttcctttctggtttacgatcttccaaaatgtgttcaaagatgggctcatccggccttttagatgatcctaattttactttattttcattttcattcattttttaccagtgagcgcaagccaaaattcttccggcgtttttagctggttacaagactcaatctcggcttttcccttcttatcccttttgttcattttcaccgcgaaaagtcgcactttattggcaatcgttacctaaaaaattaaattgaaatgaaaagtgttgttatgaataccctcgaccgagctccactccaaatccaaataactttgtcacaatcaagcaaaaagacgaagcgtgggtccaacgactcggcattcaacggaaccgcctccatttcgacggacggtccgttgacaaatgctcgatagagtttgtttgagaaagcgactttttccacagcataaaagcccgattgagtgcgggccccgtcatagtaaacgatttcctcactgaacatctccagaaactcgtccgtttcctcattcatttcttcacgaattgtccgacaagatgctcccaaatgatttcgcaaattgactgcgtgtaccgccgcgcacatggccttgtccaggctggtcttttcaccaatccaataataaatggcatgtgtcagtgctccgtttgtctcccgagttgttttaaggaccaaataacagtcagcttcatagaattgaccatgaaaacccgagtcgacaagcacaggataaaagttctcaatctcccaaacccaaagaccagcatccgctccagcgacagcgtcgaatacgtccgaatagtccaatcgcggtttgtgctgctccattttctctttccagccaataactgggcgtaaattggcgtcgttttctttctccacggattgattcatttcatgtgcatcttgtgccattttggacattccttggatgactttagaggccctgtcttgatctgcttgacaccttcggcgccgtataaagtcctttttgcgttgcatgtagtctttttgttgacttttgttaggactaagcgagtccactgaagaaccgggactttgtccagccaaacgaagctgaaatcgggcattgattgaacaatggaaagtggaaaaacccaacctgattggacagggaaaagtcaatgttgtagaaagccatagctagtaaaggaatcacaatcagaatgaatgaaagtccctcgggttttacctttttctttgtcggagggtttaggcggcatcacgaggtcgggattacaaaaacagaataatcattgaaagggaataagaatttgcaaattacttgtgcaggtcgagttccttcaagtcgggcagtaaatatatcccatcgggaagggttattaagcgattgttgtccaatttgattttacgaagtttcacacaacggccaatgccttcgggaattaattccaagtcattgtccgacaagaacaaaacttgtaattgcagaagttgtccaaaactggcaggcaagcctaaattgtttaaaataaaaatcccaagtaataaaattataaattccgaccttcaaatttcagtttgttgtaactcgcatataaccgctgcaatttttgacaattcacaattttggcaggaagagaagtcaaattgttgcccgacacattcaatgtttctaactgagtaaaaacggaggaaggaaattcaattttcgatattttgttgaaactgaggtccaatttgcgcaattgtttgagtgcataaagtgaatcgggcaacgattggagctcattcatcgaaagatccaattccttaaacaaagtgcaaattcaaattagcaatatttatgttgttttaatttacctgcaaattcaaaacatcctcaaatgagtaaggaatatttgacaaagtcctatgtgtgtttctcagaattaaaacacgaagctttttagaactaaatggataataagtacacgtgaattaaaggtaggaaataagcgacactcacccggggagttgtttaagttgtaagtgagtgagcggattattggacagcttcaacacttgcaagttggtcagccgcttcagttgtgggggcaccacttccaaccgattattgctcaggtcaagatatatcaagtcgattaaattggaaaaaatctgaaacagtgaattgacaactaaaaaattaagtgaatatgacctggtttggtacattttcaatattattcccgctcaggttcaacacgatggcacattttgcatattccaagttagaaggcacatccctcaacaaattgttactgaaatcaatgatggtcaaatccttcattcgaaaaatgtctgttggtattgctgatgtttttatcttaaaccgaaagattaaaataaataaatctaattcgtctgataaatacctggttgtatcggacgatgattgagcgaaggagcggaaggtcggacaattcgccatgcacattctgtataacaaggaaatagagaaaaagcaggacaagatagggaattcgatggattgcgtacaaatagacgaatcctcccaagttttatttaatcatttcggtctttacttgtacagtacctgcaatttattacgcgccatttgcaggtgttctaagtgtttaagattagaaagaacatcgggcagtcgctccatctgagcacggtttagcttcaaccaagtggcttgagtcatctcaataacttcgtccgggaagcgatcagcggaaaaatcgtttcgagaaaaatcaacacccttcagaaagcaaagcacacccgtggacccatttgataaggccattttcaatacacttccttcattatttgtaaaaaacgcttaaaaataaacaagaataaagtagagatcagaaaccaaaattaacaaattaaaaataaaaacacatgaagaactgcacaggtttaattgagataaaagaaactgatataaaaaagatcaataaagggctgtccaattcaaatctaaaacgacaaaacactatttcttcgcctttttgttttgttcagcaggagttgcacgaggaggcgtaaccggacgattctgtccagccccagtgtatgaaaatttgcctttcttgtcggacggcttcagaatctaaaaccgaaatacaatcacattcacaaggaattcatttacctgaaaagaacacatcaatgtctcatcaacggtcatcattgacccggcattgtcaaactctccacagtaatttggagcggaaaacagtgtaaccaattgacgctttgcaaagaattcatagccatcttcgaccaccttttaaaccaataaatttcaaatgattattattgactaacttgatgagcacgacaaatcaaatctaggtcatgtttgtgcaagaatttagagacgacttcaggtccaaaagtaaaagacacaccacgatcattttcaccccaaccggtcacatcctttaaaaaattatatgttgattatgtctaaaattgttgatcaagtaaataccttgtctgggtcagaccaaagcagatcgcaaagaagcccctgatccggaacgtcagttggtcgcatgagccgacgaatttgttccatggattggaggtcgggagaaagaccaccatgacagcaaaaaatcttctcatcaataattgcggcaacaggcaaacaattaaagcagtcggtaaaagtcttccacagttttatgttgtagcgccgcttgcctgaaatacagatgcttataaacaatcataaactgaaattaatagtgaagaaagatcaaacattcgtcataaaacccgtaaattcggttgatggaagcacactcgtgattcccacgcaacaaaaagaagttctcggggtacttaatcttgtatgcaagaagcaaacaaattgtttcaagtgattgttttccttaatttgtaaaattgcatccatttacaaaataaattatacctctatccacataatcacccaaaaacaagtaattcgactcaggcggaaaccctccatactcaaacaaccgcaacaaatcataatactgcccatgcacatcaccttaaataatttgtaattaaaaaattttttgtttttttaccgcagattttcagaggagcctccagttcaagaagtacaggttgactcagaaagatctctctggacttcatacaaagaccctttatctcattttccgtaagctggacattctttcccggtttagaaccacgcactaaatttaaaaagtacttcgttactaaatttgaaaaacaaccttcaagaagccttgaaattatattgtccaggtttattttatcagcatctgtcattgttggcttgaataatggaaaatttactagataacaaaaaaatatttggtaaccagagaagagatcagcttaaattaaataaaaaaattaaaaaacagcaaatttgtaaaataaaaaaaggtcaatcggatcattaatggtctgctgaaacatacaatttaaagggaaggaaggaacttttaattcactttattgtcaagcaatattaaaatagagagggaaattttaatcttagatttcattcaaacgaa

SEQ ID NO: 3404 - DNA, 4056 bp, Heterodera glycines
  unsure (1)..(4056): unsure at all n locations
tttttagctaaaaaataaaaatgatttattatatttatatcttaaaacatcaaatttttcaattaaaattattttcacccgcgtaaagtacggcgattgcatcgtctccgtttaattcactcaaatcttccgcgtagatgaagctcaacagcactttgaatgctgctgcttcaacatcgggcagctcaacagggtctgacagttcggcggaaatggctaaatttaacgaaaaaatccaatggaaataataatttttaattttcattttgcctttatcagttggatttttctcgtcaatacgaaaaatcgcttcgaacacatcagaagccaacatcagaatatgtttatgtgctcgaaaaagctaaaataaaattaaaatgaatgattttttagctttttcaattttaaactcgcctgcttttcctctcccaccaaaaagtgaatgtccgccccattggccgtgctcaacaacactttcatccgatccactagtttttccggctttggcaaattctttctggggatttcatctgttgaataatgtaatttttcattggattttgtttggccaaagttcgaaattaatggcgaatcagtggcactttgacaacagagtcacgcagaatttacgaatttgtcctctctgattccgatttttcccaaataattgtgtggtggagaggggtaaagtgccaccattatatacagtaagtaagtagcacgactaattttttaaaccgtttcctttttgtgcaggcatttccagaattcgttcccgttgttcaattattcttctcgaacgccgcaattgctcgaattttaaaaaattttcagatatgcctgaaattaattaatttcaaaaccatagcctataagtattttaatactcttttcattttgttaaccaatttaattttggattttcaatttttaatataactctgaataatattaataattttcaggtggtaacaaaagagttagtacagtactcttttctattttaccatggtcagctgtaaattcatcatctgttgaagcggatgaaaaagacatatgtaggtaaagttagtgattataccgaaaatgtttaagacaactaaaaaggataaatttaaatccaagaaaaataattaaaccagaaataagatattaaaaataaattccataaattcaaaatgtttttgcaaatccctttatgattataggtaagtttaaattttcaattttctaaattttcacttaattttctcgttgcttgtgttacttagtgttcgttagcttaaaaaagttggaattcattttttaaatgggcagaataaatacacaatggcacacaaataacaaaaataattagattttttcgaaattcattttataaaatgtttcaattaaaataatcaaaaatcaacttaatggaaaaggacaattagaatgactaaatgaagatgattctgtgctgctgattcccatatttatgaagagggttggagtggagcataaaaaacggcaaaataatgacctgaaaatgggtgggaatgtgatgagtagagcgtaaaattataaggataaaattgcgaaatataaacattgaatttaaaaaatatggacataaactttcccaaattaatggataaatttttcaaaatttattaatattattaaattttaatagaactaatgcgatattaaaaatcatttaaatagaaaaaaaacaaataaacgaaaatttattaatttttagtgaaaattttgcttattttgcacactttaccaatttttctgaaaaatatcgttttacttaaaattgaaaacttacccaactccttggacttaacaaatctcactgaaatttggtatgacatgccaaatgccatttcaaattttgatttttcttagcaaattaaatcccaacgagcgcttgggcgctgcttcgcggcgccaaccgctctgttttcagaatttaaaaatttcactaattaattaaaatttttaaatttatttttttcacaacttatattcttatttattaattttatttctcttctctttatttctcttgtcatactcttctttctctatttgtctcactttctctctctatttcgatttcttttctctctttcactttctctctctcatctcctctctttccccacctcactcattctttctatctccatctccctttgtcattctttgtttgttgctttctctctctctctgcattgctctctctttctcgctttctttctcatccatatctctcgctttntcttctctctgtctttatctcgcgttctctcctctctgtcttgcattccctctctcttgcattttttctttctctctctcagttcctcctttccctcactttcccttcttcatttctctccctttctttctttctatttctctgtactttctccctctcactctcttcttgtctcatatctctctttctctctctctctctattgctctctctttctatctttctttcctttccactctctctctcacttttccattttcactctttctttatctctctaatcctctctctcttatctctttctttctcttatttcctcttttttctctgtcgctttactctctctccctcctctctttctttccctctctttttctctctctctctcgctttttctctcgctccctcgaattttctctgtttctcctctctctctctttctccctcttctctctctccctctcttttttctttgctctcttctccttctttcctctcctcacttttatcttctctccctctctttcgtttgctctcttcgttcatctcctcactctctctctcacttcctctcctctctctctctctcacttcctctcctctctctctctctcacttcctttcctctctctcatcaatctcctttccccccttctatcctcgcctgactctctctctctctcttgcttgcttcacttctcctcactctctctcttcccatttttctatcttctttcctcgccacactatctctcatccctctctcgcttcctctcttgtctctcctcgctttatctctatcctttcctctctccttaacttattctctttctttcttctttcctctctctcctcattttctcactcctttcttctccttctcacatcactctttctttcttcgtttctcgcttcctttctcttctctcctcactttgtctcgtttcccccttttctttcttctctgctctcttcactctctcgcttgctctctctcttaaaaaacaaaaaaaacgaaaacaaaattgaataaacaacccttttttggctgtagtatgtgttacatcacttttcctctttttctctttctttaatatatagtaagggattgtcctcacttttttcatccattatttcttctctaatccctggtccattaattatttttattgctttgataaataagtaaaggtcatttgaacttctccttttttctgccgttggctgattcgcataatttttgaaggaattttacggcaaaattatgacctaacaatgggtggtgaagggaatgtgttgtttgattgtcagtaagaaaacttctttaataaataaacaattcaaaattataaaattaaagcagtaaattgtccattgaaatgcataatcactggaaaatttttaagaaaaaggaaaaaagtttgaaaaaattggctgatagacattttccggcaataatgggggcgtttcttgggtagttttaggcgctaacaaagaatctggtgccaaaaagcctaaaataaagtttctatgaatttatctgtaagtttttgtcttcgatttatcaaaaaccaaaaaaaatgtctctataggatataagcgcgaggacgtggaagtgagcaagcggcgctctctccacctgttggccccgtaaaagggtgtgcggctttttgcaacattaaagcagattttgttaatatcttcctgaattcaccgtgcccctaaataataggaaaagcgacgcaatctccgaagcgcttttttcattataatttaactaa

SEQ ID NO: 3405 - DNA, 1284 bp, Heterodera glycines
ttttaaataaatgcaattattttatactttcctggtcgcttaagtgtttcgaaagccttcgcggccaatgaaattgtgccggacgttgtgtccaaagcaccagaaaagcttgtaactgttgaatacgctgtcggagtgtgcgcgaagctaggcaacgaattggcacccaaaaatttaaccaatgcaccgaagctttcgtgggacgcggatatgggcaaaaagtacacagtggcgatggtcgacccggacgcgccttcacgggatgacccgaatattcggtggcattttattaagagacccatccacaaggcaggagctgataaccctcccgaatttgccacacacctatactcaacaaaattgtaggcattctccggatttgttttaattgaattcagccagcggaagatttaaacgcttgagcagaggcatattcataaagggaaaagactgtgggattgtctgggacctcaatttccgtcatatcactgatatgacgtcatatatttgaccattttgatttttaacattggcgaactttttacagaatggacgaagtttgaaaattttgatatcattcgatacccccaaatgtcctctatttcaatgccaaaaatcaagaagttttattcagctacaaaaaaagttatggccagataaacacaaaaaaaaaccaacttagcaaacatttagggccatccttttttgtagctgaataaaaattcttgatttttagcatgaaaatagaggacatttagggatatcgaatgatctcaagattttcaaattttgtccattctgtaaaaagacgagatagggttcgattccctcccaggtctaccattttcccaacctttaataaactttaatagtcatgctaaataataaatttccaatggaaaggttagcttgcacaattttgtgactttcttttcctaatacaactgatcaaattaatttttctttttgttttggtgaataaaaattataaatttttagcgagtggctccactggttgatcgtcaacgtgtcgggcactgatctcgcgaagggagacaaactcattgattatatggggccggcaccgccccaggggacgggttggcacaaataattaaaatgaggagattcatattttattcattcttgggtttgttgaaaaaatgaaaacgagttttgaggccttcaccgctatacgttcctggtttatgcgcagaaagaggggacggtggtgaatggcactcaaaagccaggtaatcagtgttgagagactgaaaaatgctt

SEQ ID NO: 3406 - DNA, 3839 bp, Heterodera glycines
ctgcttttccccgctttggcgttttgtttttaacactgctccttgtttcggcttgagacggcgtggagtcgaattttcaccttttatattataaatattgttgttataaagatgaataaaaaagtttcaaattaccgatgtgaaggttcttgaaatctttccgaatgcctaaaattggtttcaaaattaatttttaaacttaacccaaatctggcactaatgattatttatttgcatttttctgttattcatttactcatcttcagtgctttctaagttggcctcatttgaattttgattggcctaatttttttacttttttgaataaattttgtcattttacacccctaaaaatgaaggtttttagtgcctattttccattttttggagcctatttttggggtttttagagcctaaagcctacctattttggcagtttttagcgcctaaaaatatcatccctaataataataaacatttaaagtctttaaaatgcaattgagctaatttaatttatatattcgatagccctaagaattctctatttacctttaaaattttagaaaatttcattgagttttaaaaaagttctgaacaaaaaatgctgacataagatttttgaaatgttatgacaataattttttttatacttatttaaaaaaattttgaaaaatcatattctgaaagagaacaattaaagctattgaatgataaaataaaaattaatttggttgaatttgagccaagatatgaatttttatgtgttacccattttttgttttcgaccccattggcggatttaagaaacgcgcatgggtggcgggcggaatttaagaaacgtgccagcacgaaaaaaatacaaaaaataacagcctgtatcgggattcgaacccgagtcgccggctccggaggccgacgccttatccactaggccatacaggcgctgaccgttggaacttaaaatagattttcttaaattaataaaacataacgattagggatttgaaaacaaatattgactcctaaaaaatgagaaatagaaaaatattctaacaaaaaatgccattcaccaaaaaactgtgctcactgagccaaaaaattatgatggcttaaataagagttgttaactcttaaatctgaaatcttcatttgacctaaaatcctaattattaacaaaacgtacgtattttaccatttttaaatccgcaaatttaaggcctatttcaaaaatcccgcattccaagtttgatatcgcaattttaaatgattgtctgagacggtattgctacgcaacgagaaaaagtacgggattcagccgggacggtcaaataatctttttttgagaattgatgatccggtaacgcttttatttcaaagtgacttcggcccgagattttctcgaactgagacggagactttttcaaagaatttcttgtacatttaaaaaaggcaaaattaaccaaacatttcattcaccggttgcaatataaatcagtagggctgctaatatgtaaatacatatttttttcctggcttctccatggtctaaatagtaggaaaaacactttcttttctttgtttgcaaacaaaaatcgggacttttatttacatattttgggatttttctacatattacatatgtaaatattttatacatattttgactttttagtacatatttagcaattttttcgtacatatttatttttttttacatattttgggaatttttgagaatttataaaatttcttaagaaaattttgataattttttttgaaaatgtacctgaaatagtatatttttagtatttaaatttgtcatttttaaggtttttttattttatttgaagaatttattttttgggtaaatattaaaaaatcgggtttttccaaaaatcagatatcaaaaattaatttttaaaatactaaaaagtgattctaagcctattttggtcctttttatggcattttgtgattagttcactttttacgaaaaattttttccaaaaaaataaccattaaaaaaaaaaaatttatttacatgttttagtacatatttgggggcttttgtacatatttcatacatattttagcatttttatacatattttatttacataattcgcaaattttcttaaataaaattagcagccctaataattggataaacaacaatttatgccacatttttcagcagagcgtgcgaacttccacatcagagaatttgccaaggaaattaacgccgggtcgcctctggcagggaatttcttcaacgcgcaatacgacggctgaaatcagacccaattttgagtgggaaggattaaaccaatgatttctgctgctgaatggaattggttgagataaaacaagcaaatttcttctttataaattcgtaaatttctgtcgcattattagtttttccgtaattatttcatgcactttgtaaattccttcttatgtaaatgtgaatttcggaggctggggtgaaatttgaatattaaacccgggccttacttactaattttcgggcccctggaagccctacaaagcgctttgaaatcgattgaagttcggaaaaaaaaattttcgatccaatttaggagtccggagaccggataaagctggtaaaatagacgtttctttttgttagaagtatttggtcatttattatttttacattatcttggcaaaaagggagaaaacatgacaaaccgtaatctaatgccaaggggtgagtttgaggaaaataaaatttgaagaatttgttgacaaaaacgagaattaaaatattttcaagatttatttttttccggaaattatgcgtattaaatcgtttattgtaggaatatcaaatttgaattatatttaaaatttgtgatatttaaattatttgaagttttattatttagtcaaattaatgcacaaaatgatgattaatgaaaaatgactgtttcttcagtcgttccattatttgctgtaaatgcgcgcttatgagatcataaattgcgtatgcccccgaggaaaagcattcgggtgattggtctagtggtatgattctcgctttgggtgcgagaggtcctgggttcaattcccagatcaccccaaaatttttaggtaaattttcaaaaaattgaacatctaataaggaaaaaaaaaattattttctcactatccattaattatttttgttcctcaattttgttaaattttttgcacgtcgtgttcagcgtataaaattaccattaaaatatttaaattttcagcggggggggggacaaaaagtaaaagtaccgtttatttaattttcttttattttaaaacgaagaattcataaatatttttaaaaattttagtccaaaaatgctgatctatcgatttgccattccatatttatcttcctcaatttgtgtcgcttgtagtttttggttttgcttaacaatattcaaaaattttctttaaatattcctccagttttttccagctatacatcggttgccgcgtcaaatttcaattgtttcaattagggttgatccccgttcccgagccacgtaattaaaaagccaaaatttgaatccaatttttgccccccgaggggtcgggaagcaatcctagtttcattgcgccaaattctttttgtgccataagtgaattggttatacatatatatatatatatatatatatatatatatatatatatatatatatatattctgtgattttttgaatatagatttataaggatacgtgattaatagataatttacgtaaaaagaaatgaaaaattgaaataaaacagtaagacagattagcataaatgcgaaaaaacaaagcatatgg

SEQ ID NO: 3407 - DNA, 2739 bp, Heterodera glycines
  unsure (1)..(2739): unsure at all n locations
agttgataatgaattagaagcttttaccctgaaaaaactattcttgattaaaaaaacccaatttttttttgttcgaattcgggtccggagttcggaattgggcaaacccgagttaagatccgttatcagcaccctcaaaaacgcctaaaaactggttttgagcacaaaatttaaaaaaatgaaaattagggacaaccattcttcaggattgccgcctgggtaaaaagaggacactacattaagttaaataaatggtttcattttggatttatattataggtccgtctcattttgtcttctttcttcactattaatagggctcggatttttaggtgctaaatatccctaaataggtactaaaataggtgctaaaaaagtgcaaaataggtgctaaaaacccccaaaaaggccaaaataggtgcgaaaataggtgttaaaaattgaaaaaatctagaaataggtaaaaacctaaaaatccgactcctaactattaataatcatacacaataggcgatagataatgaatgcattcattaaatttaaaaaatataactacctaattaaatttttctctttaaatttcatcaatatttttttaaattaatttattattttttatattcattttattatatttaatttgatattttaaattttggcgatatgatatagtcgtaaatggtcattgtcgaaacggcattgtcgaaaaggtattgtcgaaacggtcattggcgaaacggtcattgtcgaaatgtccagccaccgtgtctttaacctctggttttttgaaaaatgcgtcgtaaaaagtgctaagaaaaaagtcttttcgtgtccagcttcgggattggaattcaaatttttttgcgtgacgggatcccgcgggattaatcccgcaatcccgcatttaaaatttgcgtgatcccgtgcgggattgcgggattttggaaatttcgaaaaaaaaataaataaataacgcaaaaaaaaaacaactaaatgattttgagcacgaaagatgtttaaaattgttggtcttgaattttaaaaagcaaaaaaaaaaaacagaatgaaaatgttgcaactctcggaagttctaaagtgaaattttttcaataaaatttttctgtgggtaaaaattgagtaatttttttattcttaattttattgttctcctgaaaaccttgcatttagatgagaacagtaaaaaaccgaaaagcatttatttgccgcagtattttttccaacgcctttgatggggaaggcgggccggcggtgcctgcataaaggcgcctttgcatcaaaaatggtcaaatttatgcaaccaaaattttttaattcacccgactttttttgctccgcattttttaaagatttagccaatcattaggggtgtattttttactttgaaaactcggtctttaggggtgtatttttcccgaaacttcgcgtaaattacccgaagttcgaagcccaaaaacgcgaagttttcgaagcacgaagctcgaagtttcgcccatcccaggtgccgataagcgccgccggtgaaaaaatttggcatgatttgctattttaattgcactaaaaatgtcacttttttgatttttaggttaaattttgtgggtttgttttttatctttaaaaaatgaactaaaaaatattgtcaaattaatccacagaatttacaagtaatttaaattagctcaattaagaaaatttttctttttacttaagaataggccatttagacattcattacattgctaacgctttaaagcaaatattattttttttattcgtttttaaatggttcattctaaaaatgaatgttaaaatatataagaaaaaaattttactaattgaaatggaacaaaaagaaaacttttttattttgctgttcattctccggttggggttaccgaaattcctttttcactgattagaccaaaagataggaagcataaattttacatttaaaataaaatttaaattaaagtttttaattactatttcctgcgctttttgcaatttgaccatttaatgtgttaacggaccgtgaatttataccaccaatttatgaacatgtcaaactttaaaaatccattgcgttttcagtgaatgttctcatttcattttctcttttcttcctttctcttttcttcctttctcttctctgtgttgctcctcatcacttccttttgctcatttctgaaattgaattcggtttaaaaattgtttcgttaatgaaaaattttcaatatgatttattaatttatagtgtccacttttaatatttaattggaagctatttaagacttttaaataaacttaaatagcactaattatgtaacaataaactaattaattatttccttaatttatcaatccacttgcattgcatcttctctcgcaaagagccttagaaacgaaacggtttccgttcccgcctcttcctttgtaaaagaatacctgtaaaagttggggaaacgaagcatttaaaattatttgacttttgaatttaaaaaaatagagacacaaaaggcgtcgaggcaaataacacccacattttgcttctgtttcttcttcgtatttgtaaacaatgcatttttttgaggggcaaaaatgtcaattaaaaggcaaaaagactaataattttaatggcggttaacaaaattaaaattaccaaaatatcggaatttgattataaaagcttggnngtttttttgtcattgtcccccccccccg

SEQ ID NO: 3408 - DNA, 1745 bp, Heterodera glycines
aaatctcagatttttcgggattttcacgacgccaagatttcacgttacctttacaaaatacaatgatcataatcagagaaacacgatctgacactacagatttgacataaatgatttttcaccaaaattcaaaattcgttgaacaaatctaaaattttaaaaacatttttattcaaaatttatttcattgcgaatggcattttgtaaataatctatttcagatgattcacaatattatattcttcatgggtcagggtcagcgttcaaatccgccgcccatgcccatgcgtccatcaaagcccatccatgcccattccgccgtcaattagactcttctgccgccgtagccgtagccatagccatagccataacgcttttaacgaagagggtgaaattagaaattccggcgccaaaaagtgccgcaattggtcatgcacaaccattaggagaaaaatggagtgccaaaaattaaaaaaatgatacctatcaatttcatattaatagatttttaaggcaaataattgccaataaataattaatctaaactgtttattgttgaaatatacagaacattaacaatttttaaataatgcattttttagatttatatttacaaacccaaaatttttctaattccgaaattgcccattataatataataagaataaatgtgaaaaatcgcgaaatagaaaaacaaatttctaaggaggttaatttaaattgaaaataataatttttaaatatttgcatttttagattcaaaattttgtgtcacccaaaattaatccgattaaaaaagaagcaataaatcagttaaaacaaaatatcaaaacatcagtagagaagtgggcagctcaatttacagcaattagtaataattattaattaaaattaactaattgatatttcaatttattatttgttttagaacctcgattgcttgttggtggctctcttttaatgaatggttttgtgataatcattaaaaagtaattaatttaaattaaatttacatatacttatactactcggcctggacccagcaaaaacccaggactggatcaactcaacaactaattgattaggcatttttctcgcagttattttttaattttaattagtttttgtgggtcctttctcattgggttcttgtcggtgtgagtcctttgtcaggtgatcaggtgggttatttgtccgtagatcctttgtcggtgtcctttgtcaggtgggttatttttcgttggatcctttgtcgctatgattcttttttctgtggtccattgtccttgggttctttgtcggtgtgagtcctttgtcagttggttatttgtccttgatctgttgtcgatgtgagtcttttttttgtggtcctttgtccttgtgtcctttgtcggtgtgaatcctttgtcagttggttatttgtccttgatccgttgtcgatgtgagtcttttgtccgtgggttcttgagaggacacccttatgctcttttcgctatgagatctacttaacttgacattgatcaagcgcaaacttttaattgacataaatcgtgaatttttttttgaatgcaataaaaaattttaaaattctttcaccatctaataatttctaacatttattattatttttattccattatctttttattgacaatccgattattggtgcaattaatttcacggatcagcgtccaaatcccatgcccattccgctgcccatgcccatgcccattccgccgcccatg

SEQ ID NO: 3409 - DNA, 1630 bp, Heterodera glycines
cacagccattagggagataaattgaatgccaaaatcaaaataaaataatacctatcaatttcattgaccgctgctggcatggcaattgttaatgaacagcagcagatggcaattaccagcagaacaacaaaaatggtggacgaagaagacattttcagtgtgaaatttggtgctacaaaaatattcgaatgatttccaattaaacacaatcatttgcttttaaatggaaaatatttgcccacatttaattactaattaattagtggtaaaagaacccaattcgacgaattgaaggataaaaatttggtttttgaatgaaaattcagcaaattacgttatattctttgtgcacaaaaaaaaattgttcgctgaatacaaaaattattttcaattttttctaaatttcctaattttgttttataatttattattcaaagaatttcataaaaaaacagcagaaagtaagaaatgagaagcataaaataaaatgttgcatcacggaaattaaagtttattattttaataaaagaattaaaattttgcaatttcgaataacaatttaattacattcattagtaattaattaaaagttgctcaagaacaaaattaaatgacgcgtaattcgttctggttaattgagcgtctatttttctaatgaaattattacgttccggttttgttgcccatccatccagcatcagcagaccatttggtttttgtttttaaatttcatcgggtgttggtgtgaatctgatattagttctcgcaaattacaaaacctcattttagtaaaattcgaaacaaataattatcggtaagcacatgttaattaattgattaaaaccaaagttaattaattattttttaaatggataatgaaaattcaaaaaaattgataaaaactaataataattgatggaaaaagtaaaaaaaattcaaaattaattaaaaaactatttttcacattatattttattggttttaagtttggttttttactttttccttcaataatttttttgtaatatttgttccattatatttttattgaccatttgattatttttactgtatattaccattaatttattcaaataaattaattataaaaaaaatgtgcttttacataatataaatattatggtcacaaatattctaatttcattttgttttcttttgatccatttagttagtcgaaaaatcctcccattggcattccgccaacaaatcccatgcccatgccgctgcccattccaaagccactgcccattccaccgccaaatccactgccaaatccgccgcccattccaccgccgtagccccaacgcttttctcgtttcagttgctcgctgataaatttgaaaaaaattaaaattaaattttttgaattttgctaggaacagaaaatcgcttaaaaggtactaaaaagcacaaattccctaaaatatacactaaaagaaataatattagccacttttagccaaaattacatagaaaagccaatttgaaaaatatttttattgtaaacatctaaattttttttataaatataaaaatttagaaaattcaaaattttagtccaagacaaataaacctttactgaaaccaagggcgtaggcaaggggggggg

SEQ ID NO: 3410 - DNA, 1030 bp, Heterodera glycines
agaaacaatcattaatttttattcaaaataaattaattagaactaaaagaaatattttttatatcattgaaaatattatcatcgctaatattccaatttcattttttttgttttcttttgatccatttaattagcagaggaaaatgttggatcattttaaataatctatttatgatcatttcacgcatcagcggcgtccaaatcccatgcccattccgctgcccatgcctccaccaaagcccatgccgctgcccatcccaaagccattgcccattccaccgccaaatccactgccaaatccgccgcccattccaccgccgtagccccaacgcttttgtcgtatcagttgcatgctgacaaattaaaaaaataaataaattaattaaatttttttataattttgctatgaattgaaattgtttaaaaaggcagttaaaaaagcaaaaatcctcaaatatatacatataatgaaaaatattagacatttaagccaaattttcttattaaaaaaattctttaattataaacatcgaaattttatttttatataaattaaactttgaaaattaaaattgtttaagtcaggccaaataaatgtgtattgaaaaggcataaaatacttttcagcttctgctacgggcatggcaactgccaacgaaaggagcacaatgccaagaatgagcagaatgatggacactttcatagcagtcatattttgggcaattaaattttcgaagacaaaataattaaactgaataaaataaatgaattggcgctttcttctgaccattttcattgctttttaaagggtacaaattgttgcacgaacaattaattaattaattaattgaggcataaatggtctcccgttatgctgcaaaaatcgaattcgacgaattgggacaattcacaaaaatagtttttaatcgaaattgtccaaattgccctacacaaaatgtctttactgatcaacgcaaattttcgcttaataaaaataattatttcgcgaataaatttgtcctccaatttt

SEQ ID NO: 3411 - DNA, 2002 bp, Heterodera glycines
agggatgtcgtaaatgatttttcacaaaaattcaaaattgaaagttaatgcgaaaatggaggacaaaattaattcgagaaataattattgtattaagcgaaaatttgcgttgatcagtaaagacattttgtgtagggcaatttggacaatttcgattaaaaactatttttgtgaattgtcccaattcgtcaaattcgatttttgcagcataacgggagaccatttatgcctcaattaattaattgtttgtgcaacaatttgtaccctttaaaaagcaagtgaaaatggtcagaagaaagcgccaattcatttattttattcagtttaattattttgtcttcgaaaatttaattgcccaaaatatgactgctatgaaagtgtccatcattctgctcattcttggcattgtgctcctttcgttggcagttgccatgcccgtagcagaagctgaaaagtattttatgcctttaaaataaacaattttaattttccaaattcttatttattttcaaataaaatttcgcttctgcattgcagaattcaaaaaatgtattttaattatatttttaaaaaatttgtcagcatgcaattgatacgacaaaagcgttggggctacggcggtggaatgggcggcggatttggcagtggatttggcggtggaatgggcagtggctttggaatgggcagcggcatgggcatgggatttggtggcggaatgccaatgggaggatttttcggctaatgaaatggatcaaaagaaaaaatgaagtagtatatttgcgaccatatattttttattatgtaaaagtacatttgcttttttaaaaaaaaaattggaaatcattggtcaatgtcaatttcaagggcattgttaaaaactacaaagaaaatacacagattttcaaataaaaaaatcaccttatcttttcacaaaacttcaaataaaaaaatgaccgacagacaaatgactcacatcgacaaaggacccaaatcgacaaaagacccacggacaaatgacacacacacacacctataaaggacccacggacaaagaaccaacaaataactgagaaagatgtttagttaccaaaaattaactcaattaaaaagagctcatcactttcactccttggcatttgatttgataaattcgactggggatggccctggtatatcttggctttatttattattagaatcaaattggatatcctgatatcctattcattagggcttatattttatttagaaaaacctggggtaccttccgggttttaagagtcggtgccggtttttggcgattttttctaggtggcagtacacttaacttctaatcattctaacactcattatttttaattattttagaattttttcaagattacgcgtcatttaatatatgttcttgagcaactttttaattaattattgacgaaggtaaataaaaaataattgattgatttttaattaaaattgcaaaattttcatatttttttttactaaaataataaattttcatttccatgaagggagttttattctatgttgtaattaattatttagaatgaagcaaccaattctatctttagccttgttcgtccaattagcgctaattagcactcagtgccggcttttggcgtttttcgaggttgcagtacacttaacactaatcatctaacacttatttatttattttttattaatttggaatttttgaccttttccatcaattattattattttttttatcaattttcttgaattttcataatccatttaaaaaaataataattaaattttttgttttaaaataatgaattaacagatggttatcagtaaatatttattttgattttacaaaatgaggtttggaatttgctaaaaatttatgagaagcccaattaaccggaaataattacgcgccattaatatttgagaattttttataattattaacgaatgaaataaaaaaatattatttgtatttgaatttgcaaaattt

SEQ ID NO: 3412 - DNA, 4509 bp, Heterodera glycines
cgaaaatgcgaaaagcgaaatgcgaaaagcgaaattttttctacaactttttaatagttaaaatcataaagcaaaaatcattttttaaaattttattacaaatttaaaaatcaataaaacgcttttttgaggcgcgctttttccaaaaaaactttttgggaagagggggcaggcgccgccgggaaaatttttgaaaatttgattaaaatttgttgacagattttcaccaaaaaatcatcaaattttgtgatttttgtatcatttttctaatgagaaataagagttttggcgcgccgctgagaacagtttttcatcaaattaccaaattttgcgattttgggccattttctaagaaaaaataggagttttgggggcgcggcggtgccgataggcgccgccggggaaaaaattggaaattttgatcatttataaacagtttttcactgaaaattagccaatttataggtaaaattttgaaaaattttatgggaatttaatccaattcttaggggtgtaaaagtcgcttttcgcgccaaaaagcgaaatgcgaaaagcgaaatgcgaaacgccaaaaaatgcgaataatgcgaaaggcgaaatgcgaaaagcgaaacctcggcccatccctgatgtttagttaccaaaaattaactcaattaaaaagagctcatcactttcactccttggcatttgatttgataaattcgactggggatggccctggtatatcttggctttatttattattagaatcaaattggatatcctgatatcctattcattagggcttatattttatttggaaaaacctggggtaccttccgggttttaagagtcggtgccggtttttggcgattttttctaggtggcagtacacttaacttctaatcattctaacactcattatttttaattattttagaattttttcaagattacgcgtcatttaatatatgttcttgagcaactttttaattaattattgacgaaggtaaataaaaaataattgattgatttgtaattaaaattgcaaaattttcatattttttttactaaaataataaatttcatttgaatgaagggggtttattctatgttgtaattaattatttagaatgaagcaaccaatcctatctttagccttgttcgtccaattagcgctaattagcactcagtgccggcttttggcgtttttcgaggttgcagtacacttaacactaatcatctaacacttatttatttatttttttattaatttggaatttttgactttttccatcaattattattatttttttatcaattttcttgaattttcataatccatttaaaaaaataataattaaatttttgttttaaaataatgaattaacagatggttatcagtaaatatttattcgaattttaccaaaatgaggtttgtaatttgctaaaaatttatgagacgcccaattaaccggaataaattacgcgtcatttaatatttgagcaatttttaattaattattaatgaatgtaattaaacagataattatttgttatttgaaattgcaaaattttcattttttactaaaataataaacttgaatttccgtgatggaaggtttttattttatcctgtaattaattattctcatcataaaattgaataatgaaataagaaacaaaatttcgttgtgctgatcaacgtataggaatgtaatttgttgaattgggttaaaaaattaaattttttatccattcattttgtccatttggcttttttgctctaattaattagtagttaattggccgcaaatctttctatttaaaagcaaatgattgtgtttaattgggaatctttcaaatatttttttagcagcaaatttcacactgaaaatgtcttctttgtccaccattcttgttcttctgctgataatttccatttgcttgtcattaacaattgccatgccagcagtggacaatcaaattgaaaggtataaattttattttttatttttggcattccatttttctttctaatggctgtgccagaccaattacggcactttttgacaccggaattaaattccgccaatcaattaaattttaagtgttgcacttcgtcaaaagcgttatgactatggctatggctatggctacggctacggcggcagaagagtctaattgacggcggaatgggcatggatgggctttgatggacgcatgggcatgggcagcggatttgaacgctgaccctgacccatgaagaatataatattgtgaatcatctgaaatagattatttacaaaatgccattcgcaatgaaataaattttgaataaaaatgtttttaaaattttagatttgttcaacgaattttgaattttggtgaaaaatcatttatgtcaatctgttagtgtcagatcgtgttttctctgatttatgatcattgatattttgtaaaggttaacgtgaaaatcttggcgtcgtgaaaaatcccgaaaaaatctgagattttctaatcaaagaatagcattttaataaatgacccactgacaaatgacctacgtaaaaagaaaccacagacaaaggacccatggacagtagaaataatttaaaattaaaaaacaactaactatgtatgtgaaaaatacttgatgaccaagcacatcactttaactgcttggcattttaattttataaatttgactggggatggccctggcattttttgactttattgattggatctatcgtccgattcggcaatgtttcagcacaaaatgtttatttggttttatcctattaacttttgtactcacattctaacagatattgttttttgaaattattgaattttctgattttttcaactaattattattattgtttttttatcactttcaattttcaatatccattttatattaatttttttttaaattaatttttgatttaaaataataaatcgatttgttagtttaccgataattatttattttgaattttaccaaaatgaggttttgtaatttaacgaaagtttatgtcagattcaaactaactcccgtagaaattaaaagcaaaaatcaaatggtctgctgatgatggatagtacactaaaccggaaaataattgcgcgtcatttaatatttgtccttgagcaatttttaattaactactgacgaatgcaattaaaaaataattgatttgcaatttaaaattgcaaaattttaattgttttttactaaataataaaatttcatttccatgatgggaggttttattttatgctgtaattaataaataattcattcatttggatgaatcaaccaatccgaccttttgccttgttcgcccaattagcgcattaattagcactcattaacattattgaagacatattagtcagccagcgactgaattaacaaaaccgaccaatgcttttttctcgcacattatttatttggcggtaattaactcgttttaaattgcattataaataggcaattaataatgaccacttcaaaccgacacattcattcattcattcattttccctctcaattttttagcatttgttaaattcgtcagctacaaaaaatttcgcaaaataaaatgaattcatcaatgacagtatctcttctgctaatgttgatcattggcactgctcttttggcattgacaaatggcatgccaaacgcagagtaaaaaaatagagacaaataaaaataaaaataaaactaattgaaatataaattataaataatcaaatcctttttaataaactttttaaaattatttaatttttttgaataattaattttgttcacaaaattttaacagaaatttatatacaataaattattttaattcatttatcttcaaaataattatcaattcaatttctggttaaatataaataaaaaacgcaaataaaatttaataaaaaggaaaataacattttattaattgtttaaaataattgattgaaagaaaaaatatatttaatttttagtgtttcattgacgcgcgaaaagcgtggcagttacggtagtggcagttatggtggtagcagttacggtggtggacccagcggtggtggtgacgcatttggaagcggaggggccgcaggtttcggaagcggaattggcaacggtttcggaagcggaggcggcagcggttttggaagcggaggcggaaatggtttcggaactgggggtggcagctacggtggtggcagttacggtggtggtagttacggtaaaaggcgatgatggaaaaacattggtccatttgtgacgaggaaattgcaatgtgatcatcctttcttcccgatcactgcttttccaaatttatttgttgtattatttatacaaaattttaatgaaaatgaattactgctaattgatgggatggagtaaaataaaaattaaatatttaaatatttttttaatacaaaaaatagctctattccagtttgcgcgtccaatgaatgactgtcctcagtttttaggcccagaattttttc

SEQ ID NO: 3413 - DNA, 5253 bp, Heterodera glycines
  unsure (1)..(5253): unsure at all n locations
aatgctcgaactgtagtgcttggctgttctgcacatcgaaggttatgccgcgtattttttgcacatatcgggtttcgccggttcgctcatcaaccatttttaaggcgtattgtttcgctccttgtacaaaaaatgatgttaaagaataaagctaccagcagccaccatctatttacctccgcaaacaaaacattggatggcatagccggcatattcctccgacatttgtccaaggaattcgccagtctgaagtggagaaacatcgcgccgatgcttcacaatcacgctgtctgtgtcctaaagaaacacaccatcatcatgatgtgatgatgatttatctctacgaactaccgtataaagcaattctgccccttccgtcccatgaacttgttgcatagagtcaaggagtttaagcctagcgcgacctataaaatgagagatgtgatgatggaatgtttgtctgggaacgaatgcacacaaactcgttgtccacaagctgagcataatattgcttgacgaatgctcatcgacaaaattttttttcgtcctgtaggagaccctgatgacatcatcagacaaaggaatgattgcataaatttccttaagtacaaacaatcattttttggccgattaacaacgaaaacagcattgacatttaccactttatggtcaaggacaagcttgtagaattcttgtggttttgtgatgactcggtttgcgcccagctcattgcgcatgctgaatttccccctaaattccattcatttacgaagaaaattcatcaaaaaaggtcgtaccataggctgtttagcatcagctttgcgatgaatcgaagtccagcatttttgttcacccgggacaagtccagctgaacgttgtatcttctcttgtattcttcagcaaacatttctttttgctgctcatctctgactccttcgggaaagccactcgcctcaacctgtcagaagcaaaaatgatcaaaatctaatatgatggctacctttagcttgatcatcaaccgcacatattccttgaaaatctgatcactccttaagcaggggattgaacaaaataaaacatgctgctattttcaaccattgttcataatgccaagccctccagaatctgtccactcggtagccgctctctaatgcgcgtgccagttcaatgtgtgtgtatgtgccacagtaggcccgctgctggtctgtatgttcacactggtgcgaccgccttgtgccgagatgccgaaatttggtagcacaccgataacagcaacagaacagcagccgctcgtctaacttcattggcaggattggtatgcgaagcccgcgtggtggaatcacacggacacggtacagtccacgatatactaggtcattcggtgagttcctgtacgacagaaaattgactgggtggtggaggctcgctcgctcttcctccgcctaccaattgaccataatctcttctacggacggatgaataatctttggtattccaatggggtaatcagtgtcgtagttgacctgtgtcatcaaagaaatgaaaccgaaatattcgaccgaccgctcttacccatggatataagctcactatatcgtaaacactgattttttcgccctcatctggttcggcaaacagtttaagcggccccgttcgacctgtaggcaggcatcagatgaccatattagcataaaaagcaacgcttcacctccgcaatatgctacacgagggtcaatcggccctctttcatttcccaaatcgtcgaagaattcgtgcatttccttatttcacgggtctgagaccaggccgttgatttcgcattccttaaaattgactattaaaattggatggtgaattaattgtatgtcgcgagtacccaaatttcttccacttcaatgcttctgccatcctggtctggctcgcgaagtttggtcaaacgatcctgagttgcttcgttgagctctcggcatgtttttccatccaccagcttgtctccaggctcataacaacgttcgcatccgtgccaataactgatagatttaagcagcttcatccattcattcacctatgttctcaaaaacagaccatcctagcacttcaatgcatttattttggtcgggaatccagccgtcaattttgtaattttttatgcgcttttcacgcccattgcctgcatgctgtattgtcaagccctcgtccttggccctccagtccaagtattttattgccttaattatgataataaagagctagtttcatgaaaacgtaaccaaagataccagaacacttgctctgtcatttctttcgtacccggcctctggcacaatggccagctgattgtccttcatgaacattccacgaaaaatgttcatacaaaggctaaattttgtgttcatgaattgtggataaaagacacggttatgtcacctagcaattgtacaactaatgggcaacgcatcatatccactggtcacgtcacgcaacaaaattcgacgaaattgaagaatggatttcatcagaatctccgtgtcattttcgcagtagtaacgcagctcttcaggaagaaagaagggcgtctgtcgattctcttcgtaccttttgggaaaaacatattttgctgctgttgcagcagttgtatggaaatttaccattggtcaaatttttctagctttgcctgcttcattgatccgggaaaataggtctctttcggtggaagatgcggcaaccgaatagcataattttctcttaacaagtatgtgatcagtcgtcataaattccgattcattgatgatgagaaaccttcgattgaaaccgtatgggaaaaagggcttgtccgggcagtcaaggtcaaatgtccctttcagtccatcaagccttattggtaggagcaggcatgagtcacgccaaattagaagtgaacggccgcgcgaatgttgaagacgaaattcaaaaatttttagcccgttcatcacaacgtccggtcttcttctggtctcacccagataacgaaggatgaaatgaccgtcaaatctggaagcattgtgtgccttgggaataattttttggtatcataaattgctagcaatggtccatttttacccaaatataagtgttgaatttttcattccatgccctcattatccattccacaaagctggcaataggctcatcttcttcagcttcactcctttttggagagatggtgtagtttttaggaaaaaacctatccaaataccaatatttgtttcgctccacttccccatcctcattcatgcaaatttcacaatcatcaaattgacccaggttggaatcggcacactcggtgcagctaacacgtgcagacaagaagttgactttgtgaatttgttgttgaccaccttccgcgggctcaagccgcgtttccgtatcccagaagaccattctataccgctgcttttccattggaatgcgtaatttcttaatgtagcatcccgtgtctttgccatggtaaacctggtaatgaagtaatattgttgtataacaactgaaaaggcttgatactctgaccttgcaacgggtacagtacttggtgaaacatttatgcggacgttttggatcccgctgatacgtgcgcaagcaacaattgcatcgtttgagcaatgaacatgtctgcccttggtggccatcatagcaaccatgagcgaaaaagaaacgattgcatgcgggacatagaattttgacgccaggttcctttgcgcatggatgccctggtccgacttaatcgatttttatgtaaaagtataaagtactgaatcaaacacaaaagctaactctttgcgcattggggacagcgtctgatgcactcaagagtgtgtttcaaagcacgatcgtacgaacactcacagtctacacaatattgtttggccagcttgaagaaacagttgatttttttgatgccgtcatagtgaccgttggccagaaacagcacaacatcaatacttcgccctgatgggcccttccaaattggcttgggcaactcctcagaccggtcttcgaagagcacaatgcgataaaggtcggtaaaacgttggtcctgatgtaataaaaattaaagcgtactgtttgctcaacatttcttactcacccaatagtcttgtacaatttgaatgtggtccaatccatatgcagctagaccttcagctatgccagcataattcatcagacggcgaacagcggaacacatcatctgccggttgttgatcatgagctcaaatgcttctttgttttcgcaaaaatcgagcatcagcgtcaattggcccatgttatgctgttggggttgttgcagttgccgccccgctgacatccattctttgaacaaagcagggtcatggtacgcccgaacagcgaccaaagcatggaagagacaatagttgtcgcccaagtttttaatccttatgcgatgttgatcattgtatccccaatgctgataagggtagaaacgtggccggcctgccccggtcggtggagttaggcatgtgacggttatttcaacaggctcgctaagcaacaatgatcgcttatcaattgcgtctgcggcaccgtgctctgctgcaccaacatttccgtcatcgccatcactttgaccgagtttgtccaactcggccatcagtgtatcactggtgttctgttcgggcggtcgaagaggcagcacgattggctcttgtaatcctgtacaataatagaacgtacagaattcattctacatacataatgaaagcgttcaccccctcccccaatattagacctctgccctgcaacgtgatgccaattttgacaacttttcgtccactttgctgctctgagttatgaattgcgcgggccatcaacatttgtaatgcatttcgcaacacctcatccggttcttcgacccgggcattcagcacaaattcggtgatgtggcgtgagacagagaaacgttcaagtttgtgcactgagtgggcgatttgccgaaaatactgatcactgctgtctgactggctgctgccttccgctcctgtcgcgctcccctcacctttttgcttttttaaggcctcggaattgattggttttacttccccacccattgaatttcttgtccatcttcatcctccgattcttctccatcctctttctccccgcgtttctttgtcgcttccgctgnccttttcatggtcttgnntgtgctgtccgtgaagatggacgtgattatccaatcgaaatcgcgattttcaaaat

SEQ ID NO: 3414 - DNA, 2919 bp, Heterodera glycines
tacataatgaaagcgttcaccccctcccccaatattactcctctgccctgcaacgtgatgccaattttgacaacttttcgtccactttgctgctccgagttatggattgcgcgtgccatcagcatttctaacgcatttcgcaacacctcatccggttcttcgacccgggcattcagcacaaattcggtgatgtggcgtgagacagagaaacgttcaagtttgtgcactgagtgggcgatttgccgaaaatactgatcactgctgtctgactggctgctgccttccgctcctgtcgcgctcccctcaccttgctgaatttcttcaagttgttgttgtggcagtaatgatgctgactgttgagcaggcggacagctcattgagcggaagtcccagtgtcgtttcattgctttgtggttaaaaagaaacaaaaatatatagttgtaattgcatgtgtcaataaattgggcaatttcaaaatgccttcttgtctgctatgaaaagtgcaaattgcgctccacaacatatttttctatgctaaattcaacaaggatatcgtttatcatgagcttgccgtcatcatcattcttctcagttcttttttgcttttttaaaggcctcggaattgattggttttacttccccaaccaattgaatttcttgtccatcttcatcctccgattcttctccatcctctttctccgccgttttctttgtcgcttccgctgccttttcatggtctttgttgttgctgtccgtgaagatggacgtgattatccaatcgaaatcgcgattttcaaaatcgccttttgactcctgacagcggaatgtactcaaaaataaatttaaagaattgccataaacaaactttgatagtcaatttggcgaccacttgcttctccagtttggcttccaatgcattagccaatttctcaggctccctttcgctcatttcggcaatttcgacagccttaagctgtaaatatttttcagccgagtgggcaaacatggtcgcgtattgcgtgcattcgggatgagcgcaatctttaaactcgatcctcaaaaacaaatttttgagcggcgattttgcagtgtgttcacacgtctcacaatacatttcgtcgtttaacttccgtcgacagcacaatcctcgctgctttaaggggcacgcctgcaaataggagctcatcagcaggaacagacgctcctcctccctcttacattataaattttgtactgaagatttgcaattttggcctcaacaaaaaatattcccgggctcttgaagtctatcacttccttcagctgctttgtcttagctggtattccttcgctggtgcgcttttgtccggcagtgccactctcgagtttaaaacggtccaacgctgtcgacattttttatatttttaataaatgatagcttaaataatgcaaaaaaataaaattgaataaatcggtagaaatgtggaaataaatacgcacagttttgcgcagggctaataggccacgccctaaattttcaattaaatttactcttatgttttagctaaatggcaaaaagttatggaccatggaccgagaatggccaatgattgggcacattaactagaaatacgccaaaatatatgaaataaccaataaatattatataaaggcaaaacattcaaaaaatattagaacaaatcttgaaataaaaatgaaatagcatttaaattaagataaattgttaacttatattgattataagcattgcattttctaataccgcgaaagtaataaaattttaattggctttccattggtggcattcgttaaacgaaataatatattatttccaggaaaacgatttttaggctctaaaaacatgcaaaataagtatgtagttagtaggtcctaaaacccaaaaagaagcagttgaaaacaggcactaaaaaagtctcaaatttatcagtgtaaaatgacaaaatttattgcaaaagtaataaaattaagtcaagtcactattggggcaaataattcttcaaattaaaattcttatgaagaaaagaaattaattaattatggagataattttttgttttcgactctgaaaagaaaaacctagaaaacgggcactaatacctcgaaaagtagattaacaacagccaacaaaaaggtttgttttttcattggtttcagaagccactgagtaaaaataggcaaaatcgtgtgcataattattgttcgaaatatatttacttttttatttgcaacaatcacttttttttggtgctcatatgtttacgatcactttattgatatcaaattttagaggacagaaaatcagaaataatttgctatatgcatttttccgctgatcaaaattttacatcatctttatctgattattgcttcacatgatagaaatagttttttgaggttagaaaagttttccagaaaatagtgcaggctccgtagaaattgaattaaatttttttgtgccctcaaatttgctattaaaaagttattgtaaacataagaacacccaaaaatttattgttgcaaataatgcttaatataatttcggcaatacatattaattctgaatggtatcaatggaacaaaatccaatgataatgcaataaaatattaaagttcgagtaatttttattaattatttttattggaatggcgattaattgcgaaaatatgaccatatctatgtagttaatttaggtatatttagttattttctggcgatatttttagcagggggcgagaattcaaatgcttaatagtcgaaacgtccaaattgcttaatcagcagagttgtcctattttacgttaatgggcgaatgtcattatgcaaaatgtcggttgacaaggtgtcgtcgaaatgttcatacagcattacatagtggtagaaattttcaaattacaaaa

SEQ ID NO: 3415 - DNA, 931 bp, Heterodera glycines
ctaataattgcattcatttttatggactttggaatatcgtttataatttcgttaaaataacataaattaaattatgtcttacttaaataaaattataatttaaaaataggaggttctttaaaatgcattttacaacagatttacgctattagaacccccccccccccccctcccccgctgaatcgtcgaacaccttgtcttgatcctgtaattttgggtagagcatcattttcgagattatcattttgtgctcgcctcgacacagagtgtttcccgtatttcgagttttcagctttttcgtcttttggatcagaaaattgctgcattgtgaccgcttcgatttccctcccaccaaatttttgtcgaaaaaatgtcggtcataagtccaaactagagcccggtgggaacgggattcccgcgggaaaacatggaatcccatttccgtcttttttgcctgacgggatttttacgggaacgggaaaaagggcggatataccggaaaattcatattttaattgatatttacgattgtaattttttatcagaatctccacatttagttgatatttacaattgtaattcattaccggaaaattcatattttaattgatatttacaattgtaatttttttatcagaatctccacatttagttgatatttacaattgtaatttactaccggaaaattatattttaattgatatttacaattgtaattttttataagaatctccacatttagttgatatttacaattgtaatcattcttcttatttcttccattttctttatttttcatccattattaattatgcagtttattaaaccctttttttattttccctgccattgaaattttggaatacatttacacctccttgcgcctcttctgttgctgaagggccattcaaatcaccccttcccctttttt

SEQ ID NO: 3416 - DNA, 3589 bp, Heterodera glycines
cggacacctgcgctttcttgtccgttgttatgaatgaagatgtctgaatgggagaaaatgaagtaacagattgctgaacatccgccaaatttgctaaaccttggccggatgaaacaggaagaccataattacgccaatactcaatagcgcattttgaattcgcatggagtgtattaaaagctgaaaaagcatttatttcacagtggtttaaacaatgtgtacaaatggaataagatggtgatcaaaaaaatgttcaaaaccaagtttcctagagttttcatgctcgctgatcatgaatctgagacccatctcgactaatttcgaatcgcgaccgcgactaccgtccccgttcattttcgttttgatgttcccgttccgtaaatgttttctcaaaaacggggataaaagtacactggtaagaatggggtctgatttgtgagtaaaaattttgtctttattatttatcgcatgggttcaattccacattggaatgggagagttttcatattttgttttgattactttaatttaaatataattattaattaataagaaaattttcaaacaaaaaattatttttctttattttttaaaacagctatagatccataaattaatcatgattcgatattttttggacaaaatctgttaacaaattcactcaaaatttcaaaaattttcacgtcggcgcctaatggctcggcaccgccgtcccccccccggttcccccaaagattttggtttggcaattggcaaatgtgcgccgcaaaaaagcgataaaaagtaaaaaaaaagaaatgattttttcaattagtcaaaattctttttttttcgtcattgaatattttggatgttggtaccggcctattttttaaacaagtcaattacgataaattcaaattattaaattttttgttattttttgcccattaataaaagcaatattacaagatatttctccattctttgcagggctggccgtgatcacggatcacgggtcacggattttttcaaattttccgtgattttgatccgtgattggcattttatatagggaatttttattgagacgaaaataggaaagtggtgtgaagaaatttttgagaaaaataaataaattcttttctgcttacaaattagaaagtaaacatatatatgtagtctggtggttaagccttctgtctttcgttgtctgtctcttgggttcaattccccattgggatatgactatttatatattttgttttgataattttaattgaaatttaattaacaagaaatttcataacattgaaaattatttttctttattttttaaaacgtccatagaccaataaattaaccaatgattggacatattttggacaaaatctgttaacaaattcactcaaaatttcaaaatttttcccggcggcgcctgtcggcaccaccggcagacggacccccattttaccgtatttttgaaattttgaccccaaaatggcagaaaaattaccatttttggcatataaactgctaaaaaccctattttttctctccgtcgcttaaatttaaaacgacaggcctaatcaaaattttcagaaaattttcccaaccctctaagaattttttctaaaattttcccgactttcagtatcttttggggtgttcagatcgtcatgaaggactgagcatgttggtccaaaagattttttcagcatcaaaagttagcttacaaattagaggaaatttttttctctacataaatagatttttggttaaatttaagaaaaatttgaaaaattttcttaataaattagttaaaaataaaaaattttccttggagatttctacaaaaagctctaattttcctcaaaaaattgccaaaaatcgtaaacttagtcattttttggaaaaggtcgccgcaaaaaaagcggtttatttgttttggtttctttaaaacattttttgggaatttttcccccgattaaattccgttttttaaataaatttaaataaaaaatcattagaaaattttttttttataatcacggatcacggctcacggatcacggaaatcacggggattttggggtgccgtgatcacggttcacgggtcacggattttttttaaagccccgtgatcacggctcacggatttccgtgattggaaattcaatcacggccagccctgattctttgtcacttcggctcaccacaatgcatttttattgtagaaaatgttatttaatggtttttttgtttcagttttcaatgccattaatttgctgttctgcttttcttctcacttggatcatttattttctaaagacgaaaccaaacttttggatatgtctgatgtttattaaaacgatcatgtaaaggatataagaaatgtttttaaccaatcgaataattagtagtgttgttcgagagtctcgactcgagaaaagtctcggcgttttttggtcttgctctcgtgtttttaagtctcggtctcgatttccgagactcgagaccgagacatttttacacccctaatgatttgcttttgttaaaattaaatagttttgtaagtttaatatatttctgggacctttttgagcttggataaaatcggaaattttgtaacggtacaattactggactaagcgacactacttacaaaacaaatgttaaatttttcatgtaatttacttaatttttcaaaataatcatttaaaagtaaaattaattaatttttcttttcaaataaaggctaaaaattaagatttaccaaataaaatttataaaaatttatttgtttcattcaaccaccatttttccacggaatcatatatatgtagtctggtggttaagccttctgtctttcgttgtctgtctcttgggttcaattccccattgggatatgactatttatatattttgttttgataattttaattgaaatttaattaacaagaaatttcataacattgaaaattatttttctttattttttaaaacgtccatagaccaataaattaaccaatgattggacatattttggacaaaatctgttaacaaattcactcaaaatttcaaaatttttcccggcggcgcctgtcggcaccaccggcagacggacccccattttaccgtatttttgaaattttgaccccaaaatggcagaaaaattaccatttttggcatataaactgctaaaaaccatattttttctctccgtcgcttaaatttaaaacgacaggcctaatcaaaattttcagaaaattttcccaaccctctaagaattttttctaaaattttcccgactttcagtatcttttggggtgttcagatcgtcatgaaggactgagcatgttggtccaaaagattttttcagcatcaaaagttagcttacaaattagaggaaatttttttctctacataaatagatttttggttaaatttaagaaaaatttgaaaaattttcttaatatattagttaaaaataaaaaattttccttggagatttctacaaaaacctctaattttcctcaaaaaattgccaaaaatcgtaaacttagtcaaaatgggaaaaggtcgccgcaaaaaaagcggtttatttgtt

SEQ ID NO: 3417 - DNA, 3123 bp, Heterodera glycines
  unsure (1)..(3123): unsure at all n locations
aattttttttttttggatatagtacntgatttgaagaaagaagctcaaaaacgcatttcaatgttgaaatttttctacactaatttttcgttatttcaacattctttagaaaatttaccgaaaaaatgaaagaatatataatatatatatccctaagaattgtcactatgattttcaaaaaatatatctctaataaatgaaaaatttttatttacaaaattattttatcggataatatgatccgtatttttttagagcctaaaagcctaaaaaaatttcaaagaagcatttttgcctattttggcgttttgtccaaaatttgttaacaaaaatgcaataaaaatgaaaaaacgccctaaaaatacgaaaatatgacggacagggtcgttttcgtacggccattttcgtacgaccatttgtacgaccgttttctacaaattgttgtcaagcgtcagatttaattgaaaaagcttcggaactaatataaccaatttttattgttttaatttcacaagcatactaattttataatgaattcataattaaaaaaaaatacaaaaataaaaaatttcagaacaaacggctctttttacagggtttgccgtaaaattaacaacttttgcaatttagagctaatttttttaaaaggtcatttctagggttattgtgacgctgatcatgaatttggataccttcggacccgaactcaaacaaaaagtcaaaagtacaagtttttgaattttttatttgaaaattcaatgggagggtcccaaaacagaaaattaccaaaagatcaatgagaatttttaatccgtgttttaaaaccaaaagaaaaatgcaaattttattatttttaaatgtagtaaataattaaattttgaatttttcgaaaaatttataaaattaaaaatgatgatttattatttttttaataaaatttaattttctcccaatctgctgtaaataataatttttctctcaacacctcaccccaatacgttcgtatttcatgcgaaaatacgaaatacaaaaatatgaaatacgtattcgaaacgccctaaaaactcgaaatacgaaatacaaacgaccaacatccctgatatatataatataaattacaatagacactacaataataattgatatatattcataaactacaacatacatacaccacaatgatcgttattgttgacacggagaaaacaatgaagccaaaagatggcaatggcattggcattggcattacgtcatcataatcatctgatgaaatttgcttgtaaattttaagcaaaatctgtggctataaaagagaacagcttggccagtgagcagcaccaattcatgcaaccatttcccattttctgttttgaataataataactgtatttatagggattggattttttaggcaaaaaaaaaggcacaaaattgaaaatcggcagaattttttcatggaataatttttttagtcaaaatgacaaagaagctgaaataaatttcgttttttttctctgaaaatgagggaagtttttttttaaatgaaaatacataagaattaattgagatgaatattttttaaaaaacttctttctattcacatgcgacaattttttttttttttgtaaatttttataggtctattttttgtaaagaaattttccaaaaatccaaaatcctaaccacaaacaccatctccatcattacaaccaccaaaaatgaacgcgcaattcgctgctgtgccgatgctgacaactgttttgctggtttgtgtattgctgttgttcccaacaatttgtgaagcgcgtcccaaggaagataaagcgaaaggaaagactcacaaaactgagaacacagattcccgcccggttattctcgaaagttgggattgtaatacaaatgcaaaaacaacagcaccatccacatcagaaaacttacaaccacatcatacaacaaactcacccgttagcaatcaaattaatggcttgccaaaaagcatgttcatgccacgcaaatagaacaaatcaggttagtcatcagtgagtgccaaaacagttatcgatcccagaaaatttttggttcaactcaggcacagccgttttgatgaaaataaaaaaaaattaatatgtgccaagaggcgccgcatgcctgggaatttttaattttttttctcgaattttgtgatgagaagaatttatttaataacattttcaattgttttttattttttatttaaaattttattttttgcattttccccgtcctccaatggttagcaggtctggtgctgctgcgcatgcaaacggtggagaatttgatgcctgattggtgaacaaacagatgtttttttgggggggattttctgctgatgatgatacatttcatttttgttgatgcctgatactgtattgttgttgtttttttctatgcattttctcaacaatttgttgtcgcatttatttgttgcgttatttttgggtaaaaaatttttttaaaaaaatgtgtaaatatgtaatgaatttttgtatagcttatatatagtagtcctttgtgtttcctggtcacgcaagcagtgactgccaaaagagcaggtccgtaattagaaaaattttatgggcgactgagtcttattggtgatgtaatgccaatgccattgtgattttttggcttcattgttttcgccataccaacagtaaagtagagagtgtgattgtagtgtatattgtaatttaaaaaataaatatatgtaattcgttgggaggctcgctccgacgggagaataacacaaattttagaaaataaaattctcccataaattctaggaaaaaaataaatatgtacatatattataataaatacaatatacactacaataaaacgctactcaactgttagcatggagaaaacaaaattaaaactaaaattgatttattatacttttaaaattcttttaaaaaaatcaaagacattttttatagaaaactcgtagcttcttatcgtctaactgaacttcagctacctcctcatggtccattctaactactttttttttaatttccactttttaatttgtttataaaagaattaagtaactctggctaaagcgacaaacatttggcgcaa

SEQ ID NO: 3418 - DNA, 1647 bp, Heterodera glycines
  unsure (1)..(1647): unsure at all n locations
cgctgcccttctttcgaagcttcagaccatactgttttgcgccaccacttacaaattccaaaatgtcatgcttaatntaaatttatattcataaaatcaaatattccttacctttgggaattcgtcagtaaactgacccaagtgaggtcccgttttcaatggatttcttccttttggatgaacataaatcaatgaatccgtatcttaaaaatttttttaaattataattaataaagtgtatttaccagtgtataaaagaatgcaaccaggagtacgagcgactatctgcattgcttttaacaaatgtaggcgagctgcagaagttgtgaaaagtgaaatgaccacatttgaacagggatgttcctggacccaatccttcttctggttatagctgatcaaaatcctctctggagtcagcatgtcaagtcctgtcacttcaattttccggttgtctagataatttcccagttctgatgggtcatcagttataagagtttgggagagtccgtaattacgaagtgaaaaacgaccccctaaaattttatctttaaaaaaacttttttaattataattaaacttacataaattatttacagctaatttggccaaagcccgctttcccttgttgggtaccatctttgttcgatcaatttttataccaaattggtcccaacattccgctatgaactgttcttcgacttcaaaatttccgtgaatattctcatcaaaccccgaggcatgtatcttttggaccataaattcactcatatatggccgaaaaagtttgttgtcactcctgtcgtactcgagaacgcgcaaaagcatgttaactctgtagccctcctccaaagcgacattaagctacaaaagtttttttttaatatttaaaacaaatttgcacctccaatgaggtacatgtgctgatccatcctctttgtttgtcagtatgctggcaactgtatgcttctttgacacctccatttgggtattttttgcaacaactcatgcagagcggaaaacatagcctatcaccgactttgactggcaatactggaatatcgattttgcggggagggatgacgaacactttgagaattgcaagaggataaggattgtcctctggtctctgccagtcaacttcttcacatgggacatgaagtgtcggatgtccaacaggataatttgttacgcaactaaaaattcttgtttttgatataaaaaaattatcttacttaataaatgggtagagactggtaaagtcataatagctaatttcctcatccgctttcacttcatggtaaagcttcagcgcacccgtccttccacccataaaacaagcacgaatattgattggtccgccatctcccgtatattcattgaatttctgcttcatctgttggtccttggtcagcatttcctcaatctcacattgccaataaatttccacatttggcactttggtcaatataaaatccatccttagtttattccgctctcggattcgggctgcggttttgccacaaggcattacttcactatcatccggataacactttgagcaagcatgccatacacatccatgtatttctagccctttttgttctgactcaatccatccgtccaaacgaaaattgcccactcttgaga

SEQ ID NO: 3419 - DNA, 3381 bp, Heterodera glycines
tacctggccaatgcttcatcaagcaggaacggcatattatggttttgggaatgccatctgtcaaattccttacgcttctcaggattcattccgtcggccaaataattcgctttcgttggaaatatttgacaaccgtaattttccggccggttcgccaaatgtgggaagaacggtttgtcctgcacatccaagccaaacattgggaccattgaggctaatggacccggaaccaaattccacgagtctcgaaagatgacatttgggtttaaactcttccgacatttgaccttcaaaaataaaaataattattaaacagaaatttttttaccttcatttcgagcaatctgttgccatttttaatcattgatggattaagtccttccatgaacaattcacggaacaccaaaaccatgtcaaaacgtcctccaaaatgtgagtaggcaatagtgtcgcattgttttggtaaattatacagaatccatttgacgaaggaaactagggggtgtcggtcaatgacctgcttgtccaccattgtgccatgaaagggcatttggctgaatgtaatcgtccgatgatggccacaaatattgcatttttttccacgcaaagtgttcttccattgtccggaagaaatgcaaccggggcaggcaacttttgcggtgacaaagttgacctggtgtttccgtcgctcaggaatttcgcaatttactggttcgtgctgcattgtctcaaggtcgaaaacgaccagtcgccagtcttgtgtttctttttttaaatttggctccaaaggacgaatgaaacaccctctctcgaaattgtggaaaatttgacaattctcgcaccaccgttcattgcatatatgtccctaaatttactattattcaacatcatattagtttaaacacctctcgtccattctgagtgttatttctcaagtcccaaactacaccgcaatgtttgcattctttgctcattttgcaatattcagacgaaagatgatgctgatagcatatattgttaaaaaataacttattgcatccgttgcatttttgtcggaaaccatgagttggcttacacgggaattttggacccatttgggagctaaaattctcaaataaataattaatctttttgtaattaccattttatacatcgagccttgcaacttttcatatgcctttttggtcggtcataagtcttttcacaactcagacaataaggcacaccgaataagttcccacttttttgcactccgttaaaatgtccgtcttcaaagtaaagaataatcggcacaccatagtctactggtccatatttgaataaaggtttgtaatggcccgtcgatccgaagacaaacgttttaactttccactgatcagaaaatttttctccattccaccagtcaacaattctcggcacataaacttccgcatcgtaatttggttgaccggctggtgcattaatggcacgcatcatttccaaagcatcatgtttaagttttcccctcattccattgttgccattgatatagtcgtgaaagcgacgaaaatcaagatcaccaactgcacggaccattgctgcttgcatcgaataaaataaacaataattgtcagcatcaaaattttgtatctaaaataaaattttttaaataaaatatttattttattagaaactttaattagacagtttgggtgaattctatggtgaacgggcgccaatttccgtgctgcacctccttttagttgtcttttctctggtagaccatttcgattaactgttgtcacggtaacagtaaatggttcgccccaaagtgtcacaccatcctgctttttgctttgagctacgtcgttaaaacgatttaaaatcgtgttaattgtatcaggagtaagttgtcgaataggaatccaaatatctgacgtaagcagctggctggaaacaatgcagccgagatgagttggctcaactccactttggtgactgtcaacaattgcctcatccatacagtgctggaatatgccgcttagcagtgcttcggggtcagcagggacgtctttgataatgaagcgcgatttgtttttgacccattggaactttggaacatgctcgatttccgaatcaagttttttgatgtaatcttttgggttttttcggggaggtgaaagttcattatatggttcccgaagtaactcttcaataaaaaaacgacgagaacgtttagagggaggagaagaagaagaatttttcattttcttaaaaataaattttatttaaaaaattctttattatgaataaaatgcatattttttcttatttttaaaccagaatatgatggatatgatagttctcttatagataaaattttatatttactcatcattattattgaacaattattggagagggaaatgacagttcattgcgccaatcatcgccttcccactcacatagcaaataaagaagtcatatttgaaaaaaaggaaaaggtctttcagccaatcatccaacggaaaggaaaagagtcattttcgccagtatgagagggacggattaaccttttcagccaatcacagttcaccattttatgcagacgcggaaggtttctctcggtaaacaatcggtgccggggtaccgagtggcagtcaatatgtttaccttccccctagccaatccctttccatccccccaaaatttactgaataaaaatgcaaataaattattttattggaaaattattaataaaattacggacaaataattctggattgtttgatataataagtttatgaaggaattcattaaaacttaatccaaatgataaaaaatacacaaaacaaatacaaaaatgggcacatgatttagacataggggactgaaatgtttgtttattataaattattcctggaaaatcatgaagaaaagagtttaaaacaatttcattgattggaaaggttaagctatcaaaataaattgcttttttctctaatccataaacaaataatgcaatccaatgtgatccgggaaattgatgtgggtccaaattaactattagtgaggatgggaatcgtagtgattttgaatcaggtagttgatcgcatgggaaacagccaaggaatgtgcgattcgttatttctgatgtcttcaatattttggtaatttgatgagtgtccatttgtcttagtgcgcttttctgtcaaagtgagctttaaccaaagtattgaccgtaactgataaattattaagctgatgactgatagggcgaataagactatcattgcccaacaaaaaacatgcgcatacacattagcttcttttggtaactctttgcaaagaggaataaatggaaaatttatagtttcagctggttgttgttgttttaatgct

SEQ ID NO: 3420 - DNA, 3060 bp, Heterodera glycines
aaaattttcaacattttaaaaatgatttaaatggttgtgtcggtcgcgatcgttctgttttatccaaaaagtagattgagtctgcttctcccataactatcagtgtaattccaccatcgggcactggttttttgaatttaatgtttactgccgtacatccctttttgattagatcaaataagccgccatgatcgtctccactgtttgtcatattaaacacataaatacagtgagtgtgcaaaaatgaaaagtaatcaattccatttccatatgtagagttagcaaaaccaagcgcctcctgcgtgtcattgtagggacgaacaaatttccaattttcatagtcaatgtcatacggggcctggggataagagcgaccattggccacaacactcaactcccgtacattaaagtgctgaaagttgaatgggctccttttgatgtttcccacataatctgaatttgcgacaagtcccattgttacacggcgtggaacttggtccatgaataaatttgcattaaattcatagcgtcccgggcttatgaacagtgctttcatcattgtcttccgtacagcataccgtgctggtttcatttccaattttttcgccaactcaagagccaagccatccataagactgacttttttgcagtagagtttcaatccaacaagctcaatactatatggctgaccgggtgggtctaaggtgtcaattaacaaaaaattgtcgtcatggggttgtatcgttatgtcaatttcacaatgattaatcaaatattggggtacattgaaaagatcggcatcgatttttgcaatgtattgtgctgttcgacctcccaaataccgttgtcttctacttttgaacccttcggaatttgcgttttgtagattgctagcatcctcacggtcgtatccggcagcagttaaatgcgaaactttagcttcaagtgattgagaaagttcatgagaaagataagttttgtatgccatcagtgaatttgaattgaaaatttcacgaccgtttattgcaattttcatgtctcgtatgaacgtgtgtccgatcagttgtatcggtacaacctgatcagtagcatccaaatgtccccattcaccatttggtggtgtcaattttcgcattcgaaattcggtcaaaaggtaacactttgacaggtcaatgtagttttggctcgagtgtattttaaaatggtaaggtgtgtcggtgagtgggttactcggcaaaatctcgaaaacctttgacgatgatacggtaacatttgtagggggtatactgaaaaagtcaacagcattggtaattgaatcaatgctgctcgagtcaattttgtgaaatgccattttatcttctttttttttaataaagtccaaatgcgtctgatctgagtctctttttgcttttaattagtggtttggtaatagtttttccaattaaagtctggtgcgatagaaggggtgatttgttagcttttatacgctttcttcgtcctcctgtaccaaattggcgttgaaatccacccttctccaaaatgttgtccgcgcctcgtttaccctcagttgtcaatgtttctattgtcccctttaaccccggcttttcatcgatcattcgatttataaaacgttttccggtttgcattgtttcgtccgtaacagtatcaccggctctgcgaattagaggcagaaaaaagcgccagagtcctcgaaaaatgtctccgatccctgcacccgtctgtgctgtgccccacccgcgctgaaacggtggcgctcctcgaaaaacttggtaggcggagtcatcaccgactccacaaccattttgcacaaaaaatgcatcatagcccgaaaccgaagtgtcatagagaatgtgaaccattttattcaatcgattatgtcaaattatacaataatgagtgaattcaaaaatttatcaccttcttaaatatcagtacgatcagcactgttccataggaaaatggtactaatcttccgtcggtcattgttcttaattcaatttgaatttctgacacttcttttggtaaaacacgtgcgtataggggggagtcgtaaattttttcagtgtattctcccggcgttgctcctgacactgagacaacacggagaagagaactcagtgaatttccaacaatcatgttttcagtcaaccctttggcgtatacggcaaaacttgcaaatccaccacgtaaatcactcccatatttggcaatctcattgtttcttacgtgttgtgtattttcaaaacctaatacataaccaagttgaggagaaaatgagataaattcaattctcggatgtgtaaaaaccgctttgaaccgttcaagatttggatgatattgtaactccactccttcaatgatttgtctaaccatatgtaagtttagttttttccattgctcatctccaaacaaaacggaaactaattgctccgcgcggtctctttccgtttgttcttcaattcgccctatcaaatccttgattgtttctttcggtggttcggtaattgtcgtggtggtagttgttgttatggtcgtccttttactatcaggtgttaattcagttacaagttgggtctgaccctgtttaacatttaaactcttttcatttctctgtttgggtggtggcccaatggtatcaattgaaattaccctgggtggggacgtggattttttttctgtcccgattgcgtgtgttggtgaagttggtatcggttgacgcggtggtgggactatttcaattgcacttttttcgtttctttgttttggtggcggaccaatttccatttgtttcgcctcattaatcgatgaaactgtttgattctcattcttttttacatgaggagcagctactacttgatgcacttgtgacactgtagtttggttcgacactggtaatggagacgtatgctttaaaactgaatgagttggtccgctgctgccttttaattcttcctgttttttagtcacatttattgatgaaattggaacgggtggaggagaagtaatattttgagtaataatctgattggaccctttttt

SEQ ID NO: 3421 - DNA, 1820 bp, Heterodera glycines
ctgaagccgtcttctcttttgctcattggtaagttgggaatttggaatggtgaaaaggtgctgatcctccgcaaactgacgacgctgctcttcggaaagtgcttcgccaaacgggttcttttgtctttttggttgatttttgataacatttggtgaagacaatctttttcttgagccaactctgattctttttttttcggtttcttcttcatttttactgcttttccgcttttttgttttactaggcaatggaggttcaggtgggagtggctggttctgagtcgaattattaggttgttgtaagagttccaaatcatggtcatcatcatccggtaatggggcagcggctgcctcggccagtaaatccctcggaggattacttctcgttgccaaggtcgaagaagttgaatgctgcggttgtgttactctgggtttgtttgtcgttttctgtttaaaacgaagagaagcctcttgttgaagaggaggatgtcttaactcttccgaatcaataaggctcttttttgcttctcgaacatcatttaaattttgctgtgcttttcgttttctgttaacttgagagtgtatggggatagatggttggggggctggttgaaatggttcttcctgttgaacttctgctggaattttttcttcacttcgccatgagattggcggcagttttctcctttgtcttttagctattttagaggaagaagccggctcatattgctgtatgagttgccgcttagctccctcttcccatgaggaataatactcatttgctttccttttttgacccctatttacagcttggaagggtggagagtctggtagtaatggcatttcctcatcgtcgtggtaatgatgatgaggccggcgctgtctgcgaatttgtgaagcagggggttgtgatctttctgatcccaaattaaaaatttgttcgtcttcatcactctcatctccctttttgattagtgccttcaaccctttggcaatttctacttttgatggatgattttggtgttcatctctcaggtggagataacgagacaattcttggttataatgaatattttttgctgtcacattctccctctttctttttgttctttccagcgcatgcttagtaaaacccaagtttatgtttcccgaatcactgcttgttaagccatgataaatttcttctggtacgagaataaacttcgaagccatgataaaatgatcaattgtcactctttgagcttgaatttatagcagagcgtgctaaatcaataagaataggagtgagcagagctgcaaaaactcctccgagtccacttccggtttgaaccaggaccttccgtgcccctctttcggtccttcgacgagcaagacttcgaacaaaagttgcataaggtagcaaacgctttctttggcgagttgttaatttaaagtgtgaacaaagaatgtttaaagctatttcaattagtgttaacaattgatcggcatttgcacgttttaaaatttgtctcctttttttcatcgatttggttttggcaagtactcgaataaaatcaaaatttttatgtacaatttctccaattttacaaaaggccattttttggaatgaaaatgatcttttttccttcttcttcgtcgtctttaaatatgccgctccttaatcgcagcagggggtttgaagcagcatgcatatcaacaacgagatagccatagggtttattagtcgcaatacgataggcagaaaggaaataatccagttttcccggaaaaagttgcactccaatgttacgaatcgccagtgcggaatttggagctcgcat

SEQ ID NO: 3422 - DNA, 921 bp, Heterodera glycines
ctccgcttggagcaaatcgcgccgatactcactgggcgcccgttgcgcttccgattccttccaattgattaaatgtaatgattagacattaaaaaaagctcggccttaaaggtcattaattctccgcgattggcattttgactggaaaagggacgccgcaaaccccggcaccaaaaatacggagattcaaatggacccgagcgatcaaagataaaatttcatttgaactatgattttgtgaagcaggatcaattcactcactcaccacggccctgccctttttgatgtaagccatcaccgccaaactctcgatcagtgaaagcactgtgaacgctttgatcacgacgaacctaaaaaatgctcaaaaaattaaataatgtgatcaatttgaggaaagaaaggcccaccaaatgtcgagagaagtcaaataggaagtgatcacctgaatttaaatgaaaaataaaatgtttttttttgaaattgggtggtcattggtcacctcctgattccctttctccatttgcacgagagtgagcagaacctgaacatcatcactattatatgtttatgcaaattaaaaataatatttttaatttagtggcgcccattctcaaggctttcccactctgatcaatttaattctcaaaaaagaaacttcctgtaccgtgatcggagtgatgatgcgcacttcctcgtaattgtacggtacatagcttaattgggctattaagagcataatgaatggaaatggacaatgatggtcaatgaacctacggggccacccaggagaagatcatggccaaaatgctgggcatgtaccgttcggcaacatatcgtgccgagtcgcgcttcagctcaaaaccaaagcgagacacgacgacggaactttgggagaaaatgaagggcaattacatgattact

SEQ ID NO: 3423 - DNA, 4662 bp, Heterodera glycines
aagagctcccactgcaagtcgagcatcgttttgggatgggctactgtaaaacggtacggtagcgaatttaattttaaaaacatttttttggtttgtccaaaattgcaaaatgttcgccattttgaggcacaactgactcgagctgatgtaaaggccgcatcgttgagaatcgtgggggaaattgcaaaagttcatctgacagtcgggcaacaaagtgattctgacatttgaagggcacaatttgaacatttgaaattacataaaataaaaaatgagttttttaaatttttttaaaaagcattgaaaatgtaaaaaaaatgtgagggaatttggaaaaaaaggaacaataagctaaaaaaggaaaagcatgtgcaaatggcatagctaaaatgtaaatccgtcaaattatgcccttttgcttggcttcttcataaacttcgctcgattcgagaattgggaatggtctttcagccgctcgaataaatgatgctgatggcgccgagttcagtgcccgtgccatatcttccgggtacatatgttcttcggctttaactttgcttggatcataaattaaatcatgcgatgcacccgatggatcgaattttgccattgaattttgcccaatttgccattccgaagcgtttggcattttgtttttcaatggacccgccgctgtccttccccattcaggtgccgaagtcaaatgctggacagcggcgcaaaagttggttttgtccactggcaccacaaagggtggcggtttgcgtgacttttttggcttccgtgcactttggcgtttcatctccactttttgagcgggactattgtaagcagaagcagttgcctttcttcggttgctctgtccgcttttgttttcggcatttgtggctaatccctgctggttgcccatcatttgattggcatttgttgccaactttggctgggtcaaactgttggcatgggttgccaatctctgctgctggtgacccatcatattgctgctttcactgctttttgccaagcctgttccgctgctttcattctcaacgctcaattgctgttggagaatcggactaattgacatgccatgctcattaagaaaggcaatttgatcgtcaacgtttggcggaagaaaggcgtcataataattgtaagaattatgatgatcataattgttctgctgattgtttgccaaattgttgctgttgtcattgttcattccatcgcacagtttgaaaaagcaaatgaaaatttgaaggacaacagcaaaaagaacaacaaaagtgtgcatgttgttcagaaacagaaacaaaacagcagaaggaaaagcaattaaaatgtgtaaaaaagggcttaaaaagtaattaaaatccaaaaaaaactaatttggattatattattgtaattgcaaaaagaaagaatgaataaaatggagaataaataatttcataaaaatttataaatttacataataaaataaagggaattacatttgtcacattttctgacaagcaaatgattgatcgaaaagcataaaaaaggttattagctacgtatgtgaagaaaaattttcaaattgattttgcccattttttgtgagtatttttgagaaaatgaattaaattaaaaaataaatatgtgtaaaatgatgagataaaattaatatgaacaaaaaaatggacaaaaattcgaaaaaatgtaaaataatgaaaaaatgtggaattaatttttttataccaccctaattaaggaattaataattgattaattagtgtaaagtgttgcctggtggtgaagctgacgtgtccgtcgggcaaaatgcgcatgcgaaagttgggaaaagtgaccatgtgaaagtaggagaatttggagttcaaaaacactgcgtccggcttccaaattcggtcgatgattttctgctcccgaattcggattggtttcgaaaaattgttagccaaacttaaaaaagtgccattgccaaaaaatggaatttatttgagtaaaaagcgttaccgaacatcgatccaacgcagtcggaccagcacatccaattcgtattccatctggaaattgtcgaagttgcccaggtggagcacttccagcgaaagtgccacgcgcaacggcatatctgaaaggggcacaattggcaatggcattcccaaaaatgtgccaatgaaaattgaaagacctgggaatactaacggcacacttttgttgtcgtatttgcgctccttcagcagtggaaggatgaagctgccgcccagatcgcggtacgtctcgcgcaattcgtcctcctccgcttcatcgctgacgttgttggacctaacggacggaacggaatagcaattgccattcaaatttatgactttcaaagcccattgaaacgcgttagattagtcagtcggaaggcaatccatcccgccgcttcccaaaccatttcattatccaatcaattgcccacctggcaattagttgtgccagcaattgctgtctgtcccgacccagcgggtcaacgtgctggttcatcgccagttcctcctcgttgatcggtgcccaagttgtgcttgtacccgtcgtcgtcgtggcgggcattggcttccccaacgacgtgccgttcagcagcactttttgcccactgtttgacaagtcgttgcgcaatggtgccattgggtcatctttttggtccctgtcttgaccccaaattgtgccatttccattttccgtttccgccttcgccgtttcttttgtttcttcgcccgacggagtcacaaaagcgccgaagatcagaatgtcttccaagtgcagctttacatctgcttttgctgtgccgccggttgttgagggcgtttttgtgctgcccgtttctctttgcgctacttcttcgcttacattggcattttgttccggcatagttttgttgacattttgttccgtaacgataattgttccattggatgattgctcagtgtgtgttccttggatttgagatgaatgagagtgatgaagaggatgatggtgatgccgaagacgatggggaacccaagggataatcagctgcttgaaaagtgccacgtccggtctctggtcatttgccaaaagtcccttctcttcatccctccctccctctttcgccttgtcccttccttgcttcatcttccgagcatcatccgtctgatcatcttcaattttcctccgggcatcctcctccccatctcttcctttttccttccctctttcttctttttcatcccttccaatgtcccattccttccattttccatcctcatcccttccacttccatttatccgatcgttttgtttccttaacttttcctccgtcgtattccttttttcttccgaattgtcaaattcgatgattgtccatccgtcgtcctctgcgtcgtcgtcataatcttcttctgctgtttctgtttcgccatcttccatctcatcttccaaatcgtggtcaaaattttgttggacaacccgaaaattaagaagtgaaagccatggcccatctgaaataattaatttcaattaaattgccaattttgaaatgattacctaatgtggcttctttgtgcttatttgcatggtttaaattgcagttaattaatctccattaaacattaagttatttttattggacaccattaaatatttaattcgattgtttttttcaaaattgcaatgatgaaaagaaatgccaaataaatgagttcatccgaattcttttacttccgataaattccaaataaaaatgccattccaccaccataacattaacccgatcaattaaacactatcaaaaggcctttgcatttgcctggttttcggtagaaatgcactcggaaagtccgtttccgttgttgcgaatcgccgaaaattgccgggccaataaaaatggcaaacaaaacatagacaaaaaagagcccaaattttgctgtcgatgagcacatcgtggcactacccaccacatcaccgcgcggatcgaagaagaaaagcagtgccaccaattttatttggcgaaattttaaacggaaattaacgaaaatgaaattcaagaaaaggaaattttaattaaaattacattcattaaaggcaaaaggtgaagcaagcagcattagctgatcaaataaagattaatgtgttgcgaaggacaaaaacaaacgaattaacaaatggattattaattaattaccgaaaatgtcttgggcattttcagggatttggcactgcttttagacggtattttattagtgttttgagaccggcagcagaacttttttcaaaaacagctccacccaacacaataacatgaatgagtacaacaactccatcaaccccaatgatgccccttttgttcgtcctccgtccgatcattttgcgatggtcggatgcgttttgctgcacattttgtccgctgctgatcgatcgatcagacgacggcgaattatgtcggctgattggacacaaaagtgcgtgtcctttcggggcatcagcaaaaaaggggggcccaaattggaaattgccgaaagcatcgaagcgaaatttcagtgggggggggcaaaagtgaattaaaacaatttgattatttattttaaaatcaaaagaaaaaatagcgaaatgaaatgggcaatttaattgtcgaatgggagaaaa

SEQ ID NO: 3424 - DNA, 1904 bp, Heterodera glycines
  unsure (1)..(1904): unsure at all n locations
tttttcaatttttgcttacgatttgcggcctgggctcccccaaggataccacgcgaagcgttggatggcatatggccacttgaaaatagcataaatgagaaggccaatgccgaggataagcaagccgacgacagacgcacggaagcttttaatgattgtgactatgacaagcgcgaggcaaatgcacagaaaaacgacgggaagaatcaacggcacgcggatggccttctcgtggacgccgtgccgcgcggcgccgatttgcaatttgatgcacaaaagtgccaacattgtgcaagaacgaataatcttacggaggaggggggggggggtaaacaaaggatgaatgaaattaaaaataattaaaatatttgttaaattttccgtttttcactttttgattttaattttattaaaaagtgcaaaaactcacccaatgtgtgaaggcgacgtagctgatcagttccttttttatgtaaatcattataaaatattccaaagttgtaccaaatacctcaaggttgccgagaaatgagaaagccattgaaagtaccacctgaaaaatgacaattcacagataatttcaatatatgtctgatcaatttttcaatcatgcagtttatttattcattgatgaattggttaaataatgtttgcgtttagatttaaaactatttaaaacaataattatttaaaacaattacaatttaattgaccaataaattctttaattatgaattgtggcaataataaacgcttatacattgtcctgctgatcagtaacttattctgatcatttatttaaatcattccgatccccaaacattctgcagatccaaaaatttatatccgattttgttttggcatttacatggacaaaaagtgccgcccggggactgtcatgttgccgattaatgcatgagatgaatgatgggaagtgccgttcccgagcggatgcccaaatgtaacgactgccttggaacaaagtggcattcagagacctgtgaaaataaccatttatcattaattaattaattgtaaatgggccatgatgacggcacccacccgatcagcacaatacacaccaaaaatggcatggcatactgcaaaaagccgccgagggttcgttccgcaaaagtctgcaacaaataagtcgagtgttatgggtcattaggtaaaatgggttaatgctaatgaggcaatttggggaagggaattaaatgcacaacgaatgccacaaaataagcaattttgagttttatgtattggcattgacttgccattgcgatggcattggagctttgcacttcggtcacactgagcaccacaaaataggacacattcatggccaaatacagtgcagcaaccgtggacatgcccacaatgatggcgaaaggcattgacctcaaatttttaataatttttaactttttgtagcattttaaatttaaattttataaattatcgtttgataatttattatgccaatgccttcccccggtcagccacacctgtgcggtttcttcacatcctccgccccaaaattcaaaatgtcccagccgtcgtagctgaacagcccggcaaacagtgccaatacccaattgcccggcttatcgcttgtgttggcgaagggttgccgaaaactaccagattgaacttctgaaaattgcaaaaaaaaaaaaaaagtaaaacccaaaaaaagatttagtaagtgccgagtgacctttactgattagcagccaaaggccgacaatgataatgatgccggaggcgatgaccttggcaatcattgccaacatttgaaagcgagcgacgacgccacggatggaaaagcaattgaggaagaacaaagcactgcgagggattgttggacataatgccanatggtggaccaaatatttaatggt

SEQ ID NO: 3425 - DNA, 1576 bp, Heterodera glycines
aggtggccttcgtaagacaattttactttttgttttttggttgcaattgggttagccatttctgaaaaatgtccaaatcagaatgtaaatcaaattggttaactattaaaaaataataggatttggaataagtaaaattgtaaaaaatgagcgaatgttaattaaacctaacttatgccaagtggcgagggatccctcaggcttagtttttagaatcttaatttttaaaaaagcacatttttctatttttgggttggggcccaaacgaccccggggcccaaaaacgggggcccaaacgcatcaaaagccaaaattgttcaaaaaatcagttcaaaattaatttaagagagacaaaagaatgaattgtttcagattcaaattcaataaaaagggattaatcatagtgatgtgaaaagaggttaatcctagtgataaagttcataaaaacaatggtttatttgagaatgggcatttcagtgcatgattaattaggcatttcattgccaagtcgtaaaattagtggataaattggtaatctgcagaatgatctggtggcaaatgagtaatacatgggaagggcacggcatttattacaagcattttagatcactcacaaatgcagctgaaagagattagccggttgatcgcgtaatttgctgactcatcgagttcaagctgaacagataaggaaaaggacaattattattggacacacaaaaagcgactcaatcaaatttatattctttaataattaggcaaaatttttaaatttattttattgttattatttattactagggctgctaattttatgtaagaaaatttgcgaattatgtaaataaaatacgtataaaaaatgctaaaatatgtatgaaatatgtacaaaaactactaaaatatgtaaataaaattttttaaatggtaattttttggaaaaaaattcttcgtaaaaagtgaagcaggcacaaaatgccataaaaatgaccaaaataggcttagaatcaattttagtactttaaatattaatttttggtatctgtttttttgaaaaaaaattcgattttttagggatacattttcaataaatttctataaattctcaaaatataaaaaaaaatgaaaatgtgtacgaaaaattgcaaaattttggatttttttggggcatctttgcaaaatatgtacaaaaaaaatgcgaaaaagtccaaaatatgtataaaaatatgtacatatgtaatatgtagaaaaagcccgaaatatgtaaaaatatgtaaataaaagtcccaacttttgttcgcaaacacaaaaaagaaagtgtttttcctattattcagagcatggagaatccaggaaaaatatgtatttacataaaattagcagccctatttattacgatgaaattggcccaaggatatccgatcattattaccttcaatcccctgatcacgtactccgaaaaggtttgcatttggatggccattgtgccagggttcgtgaaaatgctggcacaggacatgaaagagaaagctgaatgggaaaagggaatgaattgccaaattggcaaaagtgccgactctga

SEQ ID NO: 3426 - DNA, 4914 bp, Heterodera glycines
taatatagccacaatttatcattttttgtttcccattcatcatatttcgttaaactcaaatttatttttaaaaaaattctcgatttttttcttgggacggagttggcgggacggagttggctcgggacggagttgccctgggacggagttggcgggacggagttgcatgggacggagttggcgggaccccttcataggttttaccgcttcgccaactggagtcggggtcgttttggcgcccacgttttggcgccgacgttttggcgcccacgttttggcgccagggtcgttttggcgccgacgttttggcgcccacgttttggcgcccacgttttggcgcccacgttttggcgccaaaatgtagagaaagggcgaaattgtatatttttttgttttttcttggagtggggcaaagtctataaaaggagcaccttcctagtagatttagtattttttttattttcattcttcaaataacgcatttttgttttttcttgtttaggaaatgatgaatcgtcaaattgatacaaaaaagcaaaagcctaaaattacctatgaaggccagctttacaccttcgataaatcaagtgcggacggaacgagaaaattttggagatgcgaatacaagaactcctgcaaagggagaatttggagggatttggacgatcaattcattcgtttggcaactcctcatacctgtccagtgaacgcagcaaatgttgaggcgcagaaagtgaagacggcaataaaacgacgagcactcaccacgttagaaccgccagcagtgatccgatccgaagcacttcagaatgtgccatctccagctggacttttggttacgcaggatgcttcaaaactggtactgtttagtcgatgatatgaaaagcaatcacgaaagaaatcttaaggtaattaaaagggcacggcacgaagtcaatgcaccacctgcggttccacaaagcgttgaccagctattgttcctcccgcataccagacgtacgagtcaactgacggcgaagtggagcagtttctgttggctgactctggtgtgtattacgaggccggaaacgaaaacccgcagaggtaattttttttaaaaactataatccattttactaattttttcaaggattctgctgctttggacgtgaatctttcgggcgatgggctgatcgaatgaaagactgcttcggggacggcacattctcattggcacctccgatgttctatcaaatctacacaattttggccaagtgctgttttaatttgatttcacgtgaaaattgttttaaggcgtgggtcgtgggttatcgtcgtgtgccattgcttgctgacgtccaagtcgcaagcgtcctacgagaggatgtttggacttctccgtcaagcgtggccgacattctcgcctgcctcgttcaacatggacttcgagacagctgcgcgcaacgccgctgttgccacgtttcctgcatgcgaaatcaaattttgcttcttccatttcgtgcggaatttgcaaaaaaaaatcaaggaacaaaatctctggcaggtcagtaagcatattcagtttgtttttgtaattttcgtgtctattcagagatactgtactgacacagtgttggctgagaatctgaggatgctcacttctgtcgcgtttctaccgctcagtgacatcagaacagcagtcatcgcattagacacggagttcgggaacgtgactgcactccgtccgctcattgactggttggttatattattcagatgcattcaatttctgtgcaatttttaggttgctcaacaattacattggacaaccccggccaaatggaacttggtctcaaccactcttcccaccagagcagtggaacgtctacactcgcacactgaacggggaagaaaggacgaacaaccacgcagaggcagaacatcaccgtcttcaaggcgccttcaactgccgtcatccatcgatctggcacttcattgacgttctccgccgtgagcagaagggcaccgatgggaagtatgcgtcatttcttgctggacttgagccaccgcggaaagctaagaaataccaagcggctgatgagcgcctcttcaatttggtgcagaattacatcccggtgaacccgaacaatgaaaatgatcacaattaccacataaatccaaattttcatattattttagaatttctccgtggaatttcgcgcaattatcatatgaacccataaattgtttccatttcttcattttgttaagtttattatatttaacgaaaaatttcattttttgtttccatttcttcattttgttaaatttattatatttaacgaaaaatttcatttttttataatttttacaatttcttcctgccttttttttcatttttggcttggcgccaaaacgtcggcgccaaaacgaccctggcgccaaaacgtcggcgccaaaacgacctggtccctatttatgtgatttaaacgaaatgaaaaacaacttagaatgtacgcttttttgctccattagtacacaatctttaaaatttgcaggattagcttgctaaataaaaaaaggtgtgatcaatttttcgcaagccatatttttttcatactaatttatgaatgttttatttttaaaggtcgatagagccagaaaagaacattttgcaataatgacatcgacaagctcaagtccggaaagtaccaaaaatggcatacacaatattcatcaacgaattgatttttataataaaaaacggtaaatcagcggtcagtcactgcccttcgctcttttttctctcttcttctcttttttatgcttcttactcttccttttcctctttttcttcgattccgcctactctctctcttcttcctcattcttttcttctcctttcttgtccttcttctcgtagtgcttctcgaacagcttccacaccgtgctcttctcctccacggtcattttcggctggtgactgctgctgttcccttctcttccactgcctccgttctgctcatccctcctcgtggtccctctcccttcgcctcctctgctccggtgatgataatcccgctccctgtcccgatctcgatccctttctcgatggtgatagtctcgatgctctgtccggtgatgtttgtgttggtgcggttgctgctgctgataaatgccactgcctccggcactattgttgcgcatcagttggaaattgcgctccgccttttcgttctctttgcgcttcaaaaagttctcccaaacggacaacgagtcctccgccgaaagtgccattgtcgtcgtcgtggaatacatcggcggcggcgcggagagcacagcgccgccggcgaccccgccactgattagagtggtcgttggagccgtaactgccggtgttgttgctgttggtggttgtgttgttggacccgcaccggcagaaagcatttccggcgtcagtgtcggcggtggtcggtttgggtcgaacagtgcggccaactgaacggcagccgcgccaggccgaacggtcgtcgacggcggtgttgaggacgcagtcgctgctgcgcttgcggtggtttgggcagtgcatgttggcaatcccatcagctttagagaatttttcttggtttacatttaaaaaacattaattgtgaaaaatgaccattttgaaaaaagtaaaaaatgatgtaaaattgaataatatccaactgatagttttgagagacaccaatcaaaaacaatgcacaccaaaacacagcgaccaaaaacacagccaagacattacacagccccgggaataaatttaaaaccgtccgtgtggggaacagggacgggcgaaacttcgagcttcgtgcttcgtgaaaatgctcgaagtttcgggaaaaatgcacccctaaagattgagttttcgaagtaaaaatactcccctaattattgatcttaatgtgagtaatggtgataatgtttatgaattttataaattaaatatttcttcaatattacctattttatattctacatattgcatatctctttttaaatgatttttaacacattttacatttttagcttgaaaatgccaccacaaagcaaatatattaaatattttaaaatttctcaattgtgacagatttgagaaaagatttagcaggagaaacgttgaaagaactcctttttcttcaacagaatttgcctctttatggatttaaattcgaaatttaattgaattttactatctggataaattttttggattaaaaaattgaaaaacttcgagcttcgaaagcttcgaaacttcacggtttttgggcttcgaacttcgtgcttcgaaaaaaattgggcttcgccttcggcttcgagtgccgagccgagcttcgcccgtccctggtggggaaggggcggtctgaccatttacgaacgaatgccctcgggggtcggaggaatggaattggagtaggtgtccataactacaaacgggtctcaccggtctcaacaaaaattaattatttcttgcttttcccagtgccctgctccccagtgttttgcccaccattggcgtcccgtcgggtgccgctgttgacgttgccgtcggtctggtggtggtgtccaactcgcgctgtgcttgcgcagcggccagtccgggcaacagtttgtgcagcaacgaatgagtgtcggtcagcacactcggtttgttggcaccagactgaaattggtaaaatggttcatttttaaatgtaaatttaatgtgttttttgaattttcatttaaaagcactcgtttttctatctcacaacggtcggaggcggagtctgctgctgttgtcgttggtcctgagccataaccgcagaaaccagtgttgtcgccactgtcacggcatttcccccggcgattgtcgccagtaccgtcgtcgtcggctgctccaacgcaccgatgccg

SEQ ID NO: 3427 - DNA, 4920 bp, Heterodera glycines
agaaattaaatttatttttcatattttttcgggtaaggcagcaaaatgtaccatgttttgacacatttttagagggaagaaaagaatggtgaacgagcagaagccaattttcgtttctgatttgtcaatgagattgggttgcgtcaatcacctgaactgctccggaactgcagatatggcggactgttgctgaccaggagaacggctttcatccggctgaccagggaatggctcctgaaaataaagaaaaatagaaatgcacaaattgaaatcgtgtttatcaagtcgtatagaggtcaaaaaatagggaaattttttgaaaatgtacattagttttcttaacaagtttagtaaaaaatttgcccgatggatcctatcggcaccgctggaattcctaaaattaattgttagaggaatttggtcacgttattggcgaaaactgctaaaaagcgatttcttcgcctattcgaataatggccgaagagcagagaatttctcagtcaagcttcttttttcaggtttaagcctggtcgcaaatttttataaaaattttccatttaaattatgttaatttccattccttaatttctcgcccgacatgtcaatccccgaatccccccccccccccctctgctggtggcttacgtgttttcgctgcattcgtgcctggtggtgcatgatcggcttgacaaatttgccggacgggtggagcatcgccagcgggtcgtcccggtccgtctccatcagctcttccattgtgatgcccgctgtgcgccgtaagtttagctgaaaagtgaaattttcgggcatgacttaggccgggtttcagcttatttaaaatttaaaactttggtcattttggctgaaatggaaattttattgcattaatttaaaagatttctatacaaatgagatcggacaaaatacatttttgaataaaatgaatggaaaagtgtgccgtcattttctagaggtgccattttggactagggcatgaaaaatttgttttgccttcgtgcgacaacttttccattattatggcattatatggtaaaacagatggaatattttaagaaaagagtgaaaagtcgaacatttatatgcatggaatgcgaaaacgtccaccaaattatgcatttcgaataccaaattttttttagtattttgcgctaacaaaatgcataatttgatggagaggtattgaggattgacggacaataaaaggctgagtagggtgggcaattattgacacacttaattagccaattagttaatggaagtgaagggtaaagcatgacggggagggggagactgacaattacaacgccgacaaaggaagagtggccattttgagattaattttgaaattcgctgatccatcaccgacagacagcacagtgtttttgcctgcccaaccaatgggcggagcaatgggaaggagaagaagaagcatttaccagtggacagcttttgtaccaatgcccgggctggccgcaacggttgcacacgtacgtggccggcggagggcccgtcattataccgccgctgcgtcgctgataactgaaagaagcggacacattgttggtcatattcataagcttttttgcttgaaaaaagcccagtggttgaaggttccgaaagatggctccgaaaaaaagaaattttgaaaaaaaattcccgatttagtgggtggcatttcgatgccaatttgccaataaaggttgtttttttttttacaaaaatggcacactttttcagttgggatgggacgatacatctacttaacaactttttttgtttgaagaaaaattgaaaaaaccaaacagttcgtgtgcagcagagatttgcgcctatgccaaaaatcggtttcaaatttagttgttttgtcaattttaaatatcataaagagcattaaataagagatggaatttgactaaatgcgatacctcattcttagaaaatttttgaacccaattattgtcaaaagaagttggtttcttggtacttgtctagtttacaggagcaattccacataccttttcagattccaataaatgtgttttagaaattaattaaaataagttttaaagggtttttgaggtcgctgatcacgaatccgggctcagttcagcgctaccgttcattacatgagctgtacagggacaataaattgacaggcttcctgtaccattttaataccctcatggccaaggggcccatgaggatatcatgcgtacaattttcgaattttattcttcctgtaccaagggtacccacatgggcaagatgtcaatgaggatattatccatacaagattctaattttatttttgttcgagttcgcgtcaggggttcgaaataggcaaaaatgggtgctgtattcgtgatcagcgacctcaaaaaccccttaaaacttattttaattaatttctaaaacacatttattggaatctgaaaaggtatgtggaattgctcctgtaaactagacaagtaccggtttctttaattgaaattatcaaaaatgaaaaaaagcattgatatgaaatcgcttttagtcattcgcgccaatgttgcgtaaccaaaaggtttccattgttttcttaaaaacgcgtcccactccaactgcttaaaagtgctcattgtcaatgccttgcttattgttagctcactttgtcgagctgtacttctccgttgacactcgtttgatgtgtgccaggcgctgttcttcgctcattccggcaaattcctcctaaaaatacgaaaatgaattgaatttgaaaagaaatttcgaaaaaagaatattcagtcctaaacttttgtttaaagctgctacacaaccagttttttaaatatttaattttaagattttggttttataaacaagatttttttaaaaatctctccgcaagaactccgccgaacaaacgaattttggaccagattttaaatacaatacaatagtaaatacagccacaaatcaaaactcggcaagagcactcaaaacccgggcaaagtactaacaaaaatttcccgactcgttacaataaagacaaagcaaaccgggttaatgtagctgttggcgctgttctgttggtacgtcgacaagtttcttacgacaattccgcttgtgctggtatcactaaattggagaaaatgagcaactttttcaaaatgggattcccatgttaaaagcaaagaaaagaaaaatgattgtactcatttaaaatctcgagtttttttctcagaaatgcaaaaacaaaatacgagaaaaatcgacagagtaaattcggttccctcacgcttcaaacaattaacttttgagaggtaatcccacaattctcaaatccaaaatgggcccatcgattggccattttgtgccaaaaaaggccatgccgtattttctcgcccattcattgtcagcccaacacttactgcactttgggcaatttttgcgcattttcgcgcggaattcgctgcacaaccaccgacgaattgcgcggcaccaattcgcccactgcatattcgcgtttggtgtgcgcgttggtcagcagcaggtcgaacgactccgtccggatgttctccttgtcgcagatggccttcttcagctcgtcaacgccgatgtgcagcccgtcaaatgtcagcgttttgtactcgagcgtcgccttgaatttgtagtggacagagaacattttgggaggccaataaatatttttgtctaaaaaagaataaacacaataacacaatgaaaaaatgttagaaaaagcttctaaacatgtaaactctcgaatgatatcaacaatgttgaatttggtcaacaatgaaaaaagttgtagcccaaaacatcggctggcaccgaaccgtcacctacccagacaaaattgctcataacgccaaatagcgtaattggcgtaattatttgcgcggtaattcaaaaatttacactggtaatgtcttttttgtattgtaaggcgtaaaagggttcagccaatagcgggaagggaccgccccttggatctctcccgagggcccccttataagctcgggatttccttcccaagagatctcagtcgcgacttatcagcaatatctcctattcaattccctatccatcgatctcgtcccccttctccagcccagggagtactcagcgcgagggttacggcccgggatggacaagaggggatccgtgggaccggcacaactctaactggtagcacctgatggttctgaccttaccctgggcccaaggttttggccgatgccggccaatgagaaaggaacatggccgatgccggccagtaaaaaatgaaaataacaaaaaatggaaatggccgatgccggcagacagaaaataaagtcggccgatgacggccaacgaaaaaaaaatcaattctaaccgaaaaaaggccgattaaaaaccccggtgagggctaaggccctaaacagaaaagtccggaggtaaagaacattgcataaaaaagaggctgaaaaaagagaatccagtcgaaaaagaaaaaaaaaacataaattccggctggaagaaaatgaaaacaagccgatgaaaatgcgcaaaacagccaaatgggggttaaggcctcaaattaattgaaatttgattattataggccaaacgaagttatgtcaatcctaaaatggcacattttagtaatccaaaaccgcgaaaaagcggtgttgaaagcaaaaaaaaagttaatcaatttacatggcggaccagacccccttgtcttgcaaaaaatctgaattttagtgttctttatcctgaatttgaaaaagaaggctggtcaacctgtacatatacttctgaaaaattctaatgctaaaaaacaagcactcgcgtgaaaattgaataaaaatttcgtatttgaaaaattttgtccaaaaatttttacgtcgtaaaatt

SEQ ID NO: 3428 - DNA, 206 bp, Heterodera glycines
tcaagaaatttatacccctcagcccccccccccccctgcctacgcccttctaacaacaccgtttttttagaatgaccaaagggcggcacttggtcgcttcgtggctaattacaaaattctaatggtcaataattttcgacttggatcggatgttttttcaaagaagtttcttattgttagaggggaagggggcatatttcatttct

SEQ ID NO: 3429 - DNA, 8040 bp, Heterodera glycines
  unsure (1)..(8040): unsure at all n locations
gtgcacttttaaaatgtatcttctatccttaataattacaaattgtacttctttctcttaattctgcactttctacctaanaatgacgttcccaaatgcttaataatttacaaattgtaacttccattgcttaattctgcatgcattttcactccttaattattcatttttctacctaaaaacgacaagttcgtgcacataatcaaaatgtatcttcaactccttaattatttacaaattgtaacttctttcgcttaattatgcatttttctacctaaaaatgacgttcccaaatgcttaataatttacaaattgtaacttccattgcttaattctgtatgcatgttcactccttaattatgcacttttctacctaaaaatgacaagttcgtgcactttttaaaattgtatcttctattccttaataatttacaaattgtaacttctttctcttaattctgcacttttctacctaaaaatgacgttcccaaatgcttaataatttacaaattgtaacttccattgcttaattctgcatgcattttcactccttaattattcatttttctacctaaaaacgacaagttcgtgcacataatcaaaatgtatcttcaactccttaattatttacaaattgtaacttctttcgcttaattatgcatttttctacctaaaaatgacgttcccaaatgcttaataatttacaaattgtaacttccattgcttaattatgtatgcatttttattaaaaacgtgaataaaacgacaaataacacaatttttggtataaaatagagaaataaaaggggtacatgtatgtgtacgtgtgtgtatggggtatatgtttatgcgtgtggaagagagatacaataaatggtgaacaaaatacaaaagggtacatatgtgtatgtgtgagagagatacaatgattggtgaagaaggtattacaatgtgtgaacaattacaatgaatggtgaaaagacattataatgggtgagcaattacaaagtgtgtccaaaattgagaacattataatcggctcctacaatacccttcccaatataaggctgataacatttttgcatagagcttgatattacagatccaccatcacgaatattgggtctaataaagtttgggtatattacattaattggttcaatctctcctgtttgagcataacgtttgacttgctgtttttatatctaaagccttggttgttgatcacatcataattgagtgtcaatccacggagtttaagcacgtattccatttccgcatcatgtagaacatttatacgtcttaaagccaacgcatactattttgcaccagcagtgcagaattctacgatttccatcaattaactgcttatagtgtcgatcttattcagctaaaaagcatcgcgtagatgtgagaaaacaagactatccgtgtcggtggagagtacttaacgccccggctatatcatcatttctgaatagttttattacccactttttttattttcgtaggtaatcaaaacatgatacacctttcaatcctcgatggccattacgtctattgaacgattatcccaaatattctccaaaatcaagtacatcattattgaagtaaagtctgttaaaggctgtaatttcgtaaagaaatatgtcgcacaaattgttcaagcatagtttaacaatcctactcttcttggttcacagctatctttgttgggttaagatctctaatttctctttgcactctcttacaaattcagcttccttctcaccatttccttttatgtcagtatcaattgttaaatgggtaaccttcttcaaccgtagtaacattaatttcgattgaaatgcagattgctcagccatctcattgtttgtcattatgtttgcatatgtatttacgtctatcctgcctttttgattgtttttggtgcacttcataaataaagagaatcagagcctactattcactttgacgggcaaaacagaatatcgaattttctaaagaaatcatccaaaactttgagtattgtcaaggggtagtgtttatcttccgggtatttaactcgacttattcattcagcacatgtacattggtttaccaatcgagtagtgtgtagtaaaattaacaaaggggtagagagaaatgaagtcacatagaaattttttcattccgtcttcaaatccgctcatttatttgttgctcattaacattttagcgatctcgtagcctaatacacttacaactggatggacaacttgacttcgtataaattcataacgttttacattcctctcccgcactttatcatttatttttttcaattagacattaatatacatcttctagatagcgctaattgcaggcatgctaaacatatccgcttacttctattgcagttctctctgtttccaactattcatccacagaataatgatcaatttgccaagtgttcagttgaaaagttattgatctagaaatatcgcatacaggccttatactagtcatacattcctttagtacatcaatgggtactaaaagacgctgccttcccttaataatgccttagttcctttgagacatcaaataattccctcctaaacgataccagcaatgtcattaaaattttcaatgtcattacattttttctcattaattgcctctgtaaatacaaattttccagttgagaagatagttgtggtagaatttgtacctagacccttcattatatttgaaagatttatgtggttgtttttagtggatggggatattaaataaattgaggagaaaagttttactatttattgtcagtaacaccataaattgaatttaattttaggtataatttacttaattttaatcaatactattgtatttattatttttattatattttaatacaactttaatttaattttaatttaattttttaatttagttttatttatttttatttatttaacatttattttcttttaattttaatcttatttttattttactttttatttgaattaatttgaattttattttactttatttattattcagtaatttaaaggagttgttcagaacctctatccaataaaggctatttcgccgctcagcacggcataaaaggtactttaaccgtgcaccgtttagcattgtatgatatcctcactattttcaatatttttacttgttttaattgtttatttctttgaaatttctattaatattttacttttgtagtgtttaatgcaatcaaagaacattttaacttgaaatttttaacaaaatgaacttaataaaatattagtagttaattattgtaaaatataatttattaataaataagtttaattcatttattaaaatctaaaaataatgataagaatatatgtatacttcatattatatatcattttattaattaatttttcaatataaaatttctttcttccatcattaaaatgtttttgcttagcaataagtaaaaaattccatatatgcacgctacccctctccgcctcccatctgatatgaaattcttaacgcttttttcttaattattattatttttttcatttatttccttatttttagctatcatcaccattattattattttactaaatttattttaatatttattttttctacaactcttcatctcttcattaggcttgggttatgacacaagtaccatttgccacccctccagtcgccacatgtcaccacacccctcaaataagttttgggttatacgaccaccatttggcaggttgccaactaaattgttcatgctatgccacactacactaaaatgagtcgccgtctgaagaacattttatgccatccacggtcagtcattagcgcttaaataaccaccagcgggcactcagatagcccatgcgggcgcttaggtgacacgtgcgagcgctcaggtgacccggcgtcgcttccctcccgaagctgacgcccacccctccccttttaaacatcagcaaagccccataaaaacattccaataggcatccgccaaaactaaaccaatttctcaaattcaaaaataacaaaaaattaaagtttgtcaccagattcaaaattttgaccacggattgactactcaaggactgaaacggtcggactcaataggtagcgccctctcgagcttttttatttgactattataatttgtgtttattattttttttataatttatgaatttcttaaatttttttcatttatttttaaatttttatctattattttaaatttatttattaattttttaactattattattttaacaatttaattttaattaaatttattttttaatttatttattattattattattatttatatttttgtgtggtattagagagagcaagagaaaagagagagtgagagagaagagagaatgaaagagagagaaagaaaaaagagagagagtgagagagagagaaaagagagagataagagagagaaagaaaagaaagatagtgagagagagataagagagagagagagaaagaaaagaaagaaagaaagagagtgagagagagaaagaaaagagagagagagaaagaaaagagagagagaaaagagagatataagagagagaaagaaaaaagaaagagagtgagagagagagtgagataagagagaatgagagagagagaaaaaaagagagagaaaagagagatataagagagagaaagaaaaaagagagagagtgagagagagagataagagagagagtgagagagagaaagaaaaaagagagagagagaaaagagagatataagagagagagaaagaaaaaagaaagagagtaagagagagagagagagataagagagagagtgagagagagaaagaaaagaaagatagtgagagagacagaagagatagagagagaatgaatgttagcttttttattcaattattttttaaattataaaaaattttttttaaatttatttattttaatttataatttattttattttaatttaatttattttttattaatcaataaaaacccttcaataggtttaggttcactcccgcacccatccaataggttttggtttaaaccaataggttttagttttgggattgtttatttatttttatttttattatttatttttaatttaatttaattatttaaatttattattaatcaataaaaacccttcaataggctttggtttaaaccaataggctttggtttggaacggtggttttccaacccccaaaatcgcccggagtaactactgatttacaaatgaattctgtgccgagatatggcatgccaaagtttttggcatttataattggaaaagaactaattattttcatttcagtaagaagccattggtgtagagatagtgcgttagtcaagtcttttttaagtcacaggttcgaatcctttgcgtgcaaaacctcaatttgaagaagcaatttaatttaaaaaaacaataaaaattgaaaatcggatgattccatgaaattgaaaagaattatttcagatttttcgtcccaatttgtcgcttttcgctcctatttacgtccataaattttttcaatgttttgcccctaaaaacccgcgccatattaatgagaaaagcattataaatatttatcaatcagcaaaatgctcactgctggagggcgtgggttctattcccagccgaggcctaagattttgccaattcttattaataataaaaactcatatactttgtaagagtgagtcgaaattgtcgggtttttactcgtttaactgccgaagctctaggatttcattattttcacatttatttctttttggatttaatttccctttttactaattgtaccgctctcccagcgattcacttttcacttgtatttaatgttcgccttttcaagcgaacggagctcagtcgtcccgagaataaagccacttattgtgtgaccagcgagtgtgggaaggcaaccccgggcttgatcaccccgtggacccatccttcgggaatatgtggcactttccctttccctccccattccgaattccaattcccaacgccagcacgaccaccgcgcccggccgcgctactggtagcaccggatggttcacttttgtgaacttttcatcaacctgggcggaacaggaacagcgaaagggaggtgagtttgagtgagggacattgaggaggcgcctggtgtgaaggaaaaggagaagaagaaaaacgcttcggcgatttaaatgccccggggatgaaaaatgaaaataaaaggcactaaatatgagagaaatgtataattgttgcctgcagatgtactaattgccgatgacagcacaaaataaaaagcaaaaagtgccaataattcctgcgaaaaatgcctgcagatgagacgaaaaaaggcaaaaattatgcttcggcagtttatagccctccggaggtgacaaaaaaaaggaaaaaaagagagaaacaacaacgaaaagaaaatacatttgggcataataaattaaaagagcgaacgaaaattgaggataacgattcataagcgcccacagaagaacaaattgccataacaaatcctaagcgccaacagagaaagaaaattatgcttaaaaatcataagagccccgaaatttcattaaaaaggtaaaatcgaaaatatttttggcagcgacaatacctgcaaactcgatgagcgccaaaaaattgtagagaatgtctaacgaaaaaatgaggagtgtggcttcggccgtatatgagttcaaataagattagagattagtcagaataaaaagtctatgtttgtaattcaattatccagtaaaatgacttagaaaaatttacgaaacatgcttcggcagttttacagtcaagagtgaaaaaggattgattacggtaaacattttggttgttcgttcaaagtccgccagaggcgttaaagagagactctgcccgcccccattttcccttccatttttccgtttgctgctctccacaaaattcgctgtgacttatgccctatctcactgtcctttccctccggcgctgcgctgctcgtttccgaagatgtgctgattgccatctgctggccgatgaattcatcgctgccttagcgcttcgcttggccatcaatctgtgatgttgcatttttgctttgttccattcttcccctcccccctttcccatctcttacacattaaaattccgtttgccattctctcattccaccatttgtccatcccttcccatccacgccttcggcgtcgaccatcatctcattcacataaacatttatccctttttaattccttggttcattaatgctaaataatcggaaccaggacctttcgggttgaaaacccgggactttttggctgggaaaaccgggaaaaaacccgggaatttcccggtcccgatcaaaactggtcaaaaccgacagttcggtactcagttgtactcagttgtccgtgttttggtcctggtttcgaccaaccctaaacaaaatgatttgaatgagtcaatggagaaaaacaaatggttgtgggactgaactggacattacgcaagatgccaaaataataattttttttaatttttaactctcttttcaccttaattaattgtgcactttcttcacccggaagagagagcagcgtatggagaatatatttgctaaataattttaagccttttaaggttttttggtaaaaatattaaaaaaatgtttgtttattgttaagctggttttgttcacttaattcaaaatgttataaaaattttagaatttttcctaaccaaatgaacatttttgaagattttctgcgtttcaatgaggatttataaaattttaagaccaaagctccggttacgattatttaacaaggaggcactggtgaatgattttaaaatttaattataaaatgtttattaattcacaagaaaatccgccgtaaaaaacatgctttttattttattcaaaattttttatatattttttttctaaattaatttgtagaannatttattatatggaca

SEQ ID NO: 3430 - DNA, 3145 bp, Heterodera glycines
  unsure (1)..(3145): unsure at all n locations
attatttaaatggcaaatttgcagagcgaacggcaatgctattcttgggcgtatgaatgggaggcaattgtcggaaatggaaattgcaaatcaatgggacccgccaaatccctgtcccgcctctcttttgctcacatcgcctggggcattgtgtgtcgaacacaccgggcccaataacggtaaatgcctctaatgatgttcgagaatcggtttttcaacactcagtgccgagtaatcattcaaatttgatcaaagcaatttgcaggggatcggcattttcattttacccctcattttatgggtggggagctgcttgaaaatttataataattttgagaaagggggtcgggtgattttcatacattttttagggggangggggtcgaccccccccccccccccccctcgctcgcaaagggggcctgcgaggggggggggttcgcagcgaaggggggccggtgtaaaagaggtggggagagagggttcgcagcgagggggggtcgcaaattttaaaatttttccaaaaaatttccccggcggcgcctggcggaaccgccgaacccaaaattcctatttttcttaaaaaattggctcaaaatcgcaaaaattggccatttttggtgaaaatctgctaacaaatcacaaataaggatcaaaaaatttttcctggcggcgcctatcggcaccgccggcccccctgttcccgaaaagtttgttggaaaaagcgtgccgaaaaaaacggttttttgaaaagcaaaaaaaaaaaaagtcatcggcggccgaccccccttcgcaaaaatttttaccgacccacccccctttttaatgtatgatttagacgctcaatatggtaattagtaagaaattgaccggccaaaaggtgttaattgcgctgagtgtaattgtggtcgatttcgttgggtttggccaaattgaatagacgaaaaattccattgtgatggccagagtgatcaaagtattgctaaaataatagaattaaattacacaattaagcaatgctttcacgcacacgtttatgctgacatcgtggaaaatttggacgggcgccacaaaagcggcgctgtaaagcgaattgatggaaatgtactgggggatgagcacgaaaagcctaaatatttcaaaacttaatttaaattcaaattcaaatgtccgaccgcgtggcggcgatgccaaaggcggcgaaaagcatgttgaggaaaagcactttcatagtgccggtgaacgaagtgatggcggagaccattttggcaaacggtgccgaggcgccgatcacgcaaacgttgacgaacatttcgaatatgcaaaggccgagccgagtcgagtccatttcgtacgcgtcgctgcaatttttggccgagtgatcaatcggttggattacagccattgtgaaaaacttaaaaataaaatttatttttttaaattgccatttatctgttgccagtgattagcccaacagaccaaagactgactttttcgccatttaatttgaggtaaagttgagcgggaacgttaaggaattcattttcaaagtcaaaaactcgaaaaaaaattttcaaaaacacggcaaaatttttaaaagatacggcaaaacatgcggcagcttatttagcaaatttaaaaattaaatttatgtaaatcaacatttttcacgtgatttgggaaactttgacaaatatatggtttggttgattttaagttcttcatatacataaatttccgattattactagtggaaaaatattcgaatttaaaataaataaaaaatatttcaataaaaaagctgttatttaattttaataaatatttttgcattatgcgacttaagtgtgtgataaagccaaaatggacttaaggaggtcaaaggaaatgaatgcatcagtgatacaaatatttttaaataaagttctgtagcatgaagtttgtagtacaaaagtaaaattctataataacattattctgaattcagaaccctggacccgaattcgaacaaaaagaagcccaaattttggaaatttgcgttttaggttcaaaatcagtttaaatacacggaaacaaagccataaaatacttcaataagagattgtttactcttttttgaacaaaaaatgctaaattcgaaaattttgattttcggctttttgttcaaattcgggtccggggttcggaattggccgaaatggatacagattcgtgattaacagggatctttttttatgtaagaaaaatcgcgaaatatgtaaaaatatgtaaataaaagtcccaacttttgtcgcaaacacaaaaaaagaaagtgtttttcctactaattaggctatagagaatccaggaaaaaacatgcatttacataaaaatgatccctggtgattaatgacctcgaaaacccaaggaatttgtttatataacattaaaattttcaccgacgcatttccgagagcaatttttatactcataattagaccccctattatccgtgattatttggtttcggtctcggttgtcttccaccggcgggaccgagacagaggggcttggctttttcaaaaattgagaccgagacttggaaaacccgggaaggaatcagtctcggcctcgctcaactcaatttgaagatggaactttcgggaaacttatgaatggcaaaaataagactttttgcatttactaactgcgttcatgcataggacaatagaagaaatggcttcaaatatgccaacatttcctatttttctgggttttgtctccctttttacgcatttcgtctcccaatttacggcacgcaataatataaacggaagaagataaataaattcaattgaaaaaggccgaatgacaacgaatatgttgtgtatttgattcttttggttttctgcattattctcacgaattcacaattggcacaattggccaaactatttaaaggcagccaattttggtgggaatttacatttttaattagcaatgagaaataaatagggtgggaaaaaatggtgagaatttctcgaatttattggtaatttaataaaagtattttacttgagattgggaaaatttaacctttagcattctgtacttggttagacgggtccgggtatttaggcaaaaccgggtccggtttattgccagt

SEQ ID NO: 3431 - DNA, 1846 bp, Heterodera glycines
aactaatttttttttaatttttctttccactgttttgatcaacaattttacccagatacccattcttaccaatgtacttttggagccggttggacgtggacctatcggcgggtccggaactgggtatcagattttcagaaaatcgggtccgtgtccgtcttgaaaaactgggtatccggtcttggacatttttgattcaaaaattcgcattcttaatttgacggcttttaactgctttagaattttgttttaaagatattcgccaaaataattcttagtttctcaaatattaggcaatttcactggcgaaatttaagaccgttaacacaccgagtcaattttgagcccccagttcaaaaactaattgattttttgtcttagtggtctgtgagtttgccaccaaaaagggagtcccaggttcaatcccacctgagttatatatttaattaagcaatatttcacgtttttctcaacgaataaagaaaaaataattaagtcatattattctaagatttttttaagtaaatttaaaaaacaaaacaaaatttgatcacccaataacatcaatgacagcgtcatcttcattgtccgtttattattttaagtctttgtttataaattttaatctttaacaattgaaattgcaaatatttttgtcttcccaatcagttgtggtaatggaatgaagaaacaccacatctaaaatggatttaattttcaaatagtaaacagatttaaatttaattaaaatccaagacccccgcagagaagctgaagtcgccgcgatttccacgttggccatgcttttccttctgtagtccgattggcttgtgcttctgtccgaatgcaaattcctcacgaaaagttccttcacttttaatgttgttttctgaataaaattttatgatataaactacagtgtgttccattagaacaaggcgcgggggtgagaaatttctcgcccccggggacgggggcgggggtttgtttttaattagctccaaaaaatctcacaaaaaattatttttatttttttgaatgatgtgtttggctccacattcctttattcgatgtatcgcctcgattcaattcttttttggtataattgcatagatattgtctaaaaatgaccaaatttaaggattataaattatgccagaatagtcaatttttatgggtgtttttgtctaaatccagggtttctatttcaaaattttcaaaataagaataaaggccaaaaaacaagattttagggtcaaaataagaacattttgctaagttgcttcaaatatttttacattttatacgatcaaaaatgtattctattattatatttttcataaatttcagtgcattcgggatcactaaacagatttttaacattttttgcggcacatttccaaaaaacttggtgaatgtgcgaggggagaggcccggtggtgtcgattggcgccgcaagcggaaaatttttaagactttatatgaattttgttagaaattagccaaattttttagaaatttcccttttttagatgaaaataaggtactaccccaaaaccagaacatttcttagaataacaacatagaaaaaccctgtattatttggaaaaaaaaaataataaaatcaaaagaaaacgtcaaccggtgtcgaactcataacaaaaagtattgttaatgttgaagcactaaccactaaaccacaaatattttaaaaaatataagcaaatttactttatttcataaaaatttgtaaaagagttaaaaaattcaaaattgtataaatttttgcctttaattccacgaatatgccattcttaggggtgtgtttttcacccacgtgcccccg

SEQ ID NO: 3432 - DNA, 1123 bp, Heterodera glycines
agtttgccagtaacattgaaaatgttggtaccagcttatttttaaagagatcaattccgaaaatttaattattaaatttttgttttaatcatttacgtagatacaattttttaaatttctacatcgtccgtaattgtttgggaatattaaggaattaggtgtttggcggttccgacatagaattctcaggttcgaatttataggattttcttatttataaatagatttttagtattggaaaaagaggcacaaaaacgataaatatcgtttatcgatagataaattttcttgtttttcattattttttgatatgcatcgatttcgttttttattgaaaaatatggatcgatcatttggccggtctctaattttgtaattgtatggaaatattaaggaattttgtgaatggcggtgctggtagtttaatttcgcatcaaatcattttttctatttcaaaaaattccattcgttgattttattaatttgacttttaccagaaatgaaaacttgccatcctctgcagttggcttgttgcttcgcttctgtccacttggccattgtctgatgctgttgccgctgggcttggcctttggccccaactttgtgccaattggcgttggtacatttgcgcggtgtgcggcacaattaaattttcacccaacgcatttctgacttgcattccgtgtcgttcagcagataccgtaatgtttgggagaacatttgccggactcacagagccgaacaaaaatttcctgaaaatcttttttaaatttcagtgctttggtaaataatttaaaagctaaaaatatgccctatggttggtttaactgggattttgtaggactcgtccaccgattccgtgggcacctgtaccattgagctaccgtatcataaccgccatttctttatgggtcttatcaatccccattttccgcgttttaaccgcccagaacagctagatcatttattacaatcgcattttattcaaacgacgacgcacataaactgttttctgaattcgctgtgcgtgaaaatcagcggcacaatgaacagcagagagtagagcgctaccgtaatgtcataggcatggttacagtacaaatggacgtagtaaagacactcg

SEQ ID NO: 3433 - DNA, 3236 bp, Heterodera glycines
  unsure (1)..(3236): unsure at all n locations
acgacccctttttttgctttcatatatttttgcggtgcattttcaaatattaatattattatatttacaaaagagaaaaacaaatatttttgatgattttttcttctgttataatgttggcaaatagctaattaatagggatgctaatntaggtaggaaaatcgcaaaatatttattaaaaaaatacaaaatcccgaaacaggtagtaggtaaataaatttttttatttagtggaaaaaggcaaataaatggtaaaattttggttctatttttgtgtaagcgaataatttaaacatttctaatatttccttagaaaatatttacctacatttttaaattaaaaaatttgtcaagaaaaaaataataaattttaaaggataaatttgagaaaattttataattctttggtgtggaacttttactttttttaattaaagttccagcaggattttacttgatatttttcgtccaaacttatcgaacgcattgttttgtttttgtactttttacaattgtcaaagtaaaggcgcagaaaaaccttaaatgaaaaagcaatattaaaatatataaattattaggtcagagattttggcaatgccaatttttctgccaatttcttaggatgaaaaaactcaataataaaatcatttttgaccaaaatttctgatttacatttttgagagaaaaaatacggtttttaatttattttgataaaaaaggtaattcaaaaatatttaattgaaatgaaactaccatccaactgataatgttaatcacttccagcacagcaaattggggcactgtttcaataatgcctgtggaacattttgtaaatcgttttaaataatatataaagtacttaccattttgttccaaccaatatataacaattgtagtagaccactaaattaccaaaaattaaacggtcaatatggtaattaatagatattaccggccaaaaggtgttaattgcgctgagtgtaattgtggtcgatttcgttgggtttggccaaattgaatagacgaaaaattccattgtgatggccagagtgatcaaagtattgctaaaataatagaattaaattacacaattaagcaatgctttcacgcacacgtttatgctgacatcgtggaaaatttggacgggcgccacaaaagcggcgctgtaaagcgaattgatggaaatgtactgggggatgagcacgaaaagcctaaatatttcaaaacttaatttaaattcaaattcaaatgtccgaccgcgtggcggcgatgccaaaggcggcgaaaagcatgttgaggaaaagcactttcatagtgccggtgaacgaagtgatggcggtgaccattttggcaaacggtgccgaggcgccgatcacgcaaacgttgacgaacatttcgaatatgcaaaggccgagccgagtcgagtccatttcgtacgcgtcgctgcaatttttggccgtgtgttccatcggttggattatgttgcccattttattatagcactcgtaaaaattcttctgcttaagaaatatatcacctctggcttgagttcgcctccgatagacgccaccagaaaaatttttgcaaattttttttataccagtggatagagcagggtcgacttctattgtgaatttctaatattacgggcccatagtcaagaaacaaaaaagttatgaagcctcaaaaattgaaattttggctatgttttcacttagttggttaatttcgcatttttggggttcaaacccaacataaaaacaaataaattttaattaatgtataatataaaaaatcattttttaaactaaaaaactgtatgatagttattctttagtaaaaataagcaaaaataataataaatgtgattgggaattcatagaaagtgaataaagctgcttagcctaaaatttcgtttttgaggccacataacttttttgtttcttgctctcgaaaaaggcactataatagcaccaaaaaataaaaaaaggcattaaaaggcacaaaaatcccaaaaaaggcatttaaaaaatttaaacgtttttagggagcaaaacttatcaagaaaaaaaaattaaattttggcgatcaatttttgagaaatttttcaatttttaaggggtgtattttctgaaatttttgtcgggtcatttcttaggggtgtatttttcttttttattgaattttgttaagcatttttcggaaaattccaaaaaggcataataaaagtcatcgtagaagcttcaaacaaagtgaaaatgtgttatttaagcttaatacatcgaaactagtcgcagaataaaaggcatatgtcttcgttctctatatatcacacatatgcttttccgacttactgttcgggaggttcccttgttagttcggaggatttgtgtcgtcccgctggccgttttcgtgattatcgctgccaaaaacggtaacagtacttacaattagcggcaatttgtctgttccgatattagagcctggtcagctaaatattttacttttaatttacaatataagcaatgaaaagccacaaaatatacaatggttttcatttatcatatagtaattggcctttttactatttaatcgtaatgaataacgacacaaaattgtttcaagttgaattgtcacgctttttgattaattaggaaaaaattaacaaaagcatacggtaataattgcgtgttgcctacaaaatatataaagaagacgtgtaaatttgatgaattctgctgctgttttatgtactaaatggtgaaaagggttcatttgtgcgctaattaattccatgaatgactttcattggttccaatcacttgggcagtgaacaacattctcataaaattcacaaacatgcataaaacattttaataaatatttaatagtatcttaagataatccaatttgcaaggctaactggacttagtatacttaaaaaataaagcaaaaaatagaatatcaatttctaaaaatgaattaaaatgttactaaatatttataatgtgttgttgttgctgtggactgagcatctgttctgatgttacctcctacgagtgattcagtcaataaagctaaaaataatgataattgtattttcgactttttataaaaaaataaatcgaattaaagaaaaaaaaattggcgcaaatgtgtggggcggaggcgcggccccaaaaaaaattacaaaatttgggcataatttctccgaattttattagaaaatttgccat

SEQ ID NO: 3434 - DNA, 1082 bp, Heterodera glycines
  unsure (1)..(1082): unsure at all n locations
accgcttcattcaatttcttataaattcaatagtttttccaattgtcataaaaagcattgatcacaaaaaaattatgtaataaaagttatcatcatacgacacattttcataataaaaagatgataatttgattaaactctaaattaacaattaaaataaatcatgtaaaacattctttgaaaaaaaaaattatttttagactttgcatggtcgttaaaagaaatgattatgattatttcttcaaaaaaaacggattctttaaattagcatgcaaaaatcttccaaaaatctagattatatgtaataagttttgcaaatttagtgcttttatacgctttgtctataaaatcgaattaaaatttttctttcgtcacttggcacttgaaatcgcaaactgtgttaatgcaattgaagaaacacgacttctaaaagaaaataaaaattccaattttaatttaattaaaatccaagacccccgcagagaagctgaagtcgccgcgatttccacgttggccatgcttttccttctgtagtccgattggcttctgcttctgtccgaatgcaaattgatcacgaaaagttccttcacttttaatgttgttttctggataaaattttatggtataaacgagacaattttatgtaagaaaaactaaatttgtgggggtcacgctgcgtgattttgaaaaaataatgtcaaaaattgacgtaactttttttcattcgttcaatttttctgaaatattgccaaacgaacatagaattttacacctcgtccgtaattgtttgggaatattaaggaattaggtgtttggcggttctgatagatttaatttcgaatcaaatcattttttctatttcaaaaaattccattcttagtattttattaatttgacttttaccagaaatgaaaacttgccatcctctgcagttggcttgttgctccgcttctgtccacttggccattgtctgatgctggtgcggctgggcttggcctttggccccaactttgtgccaattggncgttggtacttttgtgcgcggtgtgcggcacaattanattttcacccancgcatttct

SEQ ID NO: 3435 - DNA, 999 bp, Heterodera glycines
tctgcatcaattgacttttctcatatcgaattgtgttgttgaagcggatgacagttgaatatgaacaagcaaaagcctgtagaagctttctatggaaaaaacgtgaaaaaaattagggttttactttgctagaagaatataaatttgactgaaaaaggcggtgccaaactgaaggtttcgctttgtttttattttctaattgggatattcatttatattgtagctaaacatagatattttaagtttttccttttataattgacaaaaaaaatattttaagagttatgggcaaaaacagcttgccagactaaaccgaccctctgactaaactggccagactaaaacggccagactaaaccggccagactaaactgacccggtccgtgtcttggtgacaactcgtacaaaaggaaggcacaactcgtatcgatgtcgtctgtaaacaatctgctggcactcgggcggagatgccctaaagtgaacttttgaaaatacatgacactaacagataaagggtaataccctcatatgcataatatgcccatgagggtaccatctgtagaaatttagaatttcacatatatgattcaaaatgagctaaacaaacttttattgcagtttttatgtgacattaagttcatttctaggaattggtcgaaatggatgctgtattcgtgatcagcgacctcgaaaacccattgaaaacagcatggaatatttccttcattttaggcgtcattttcccccaatgcacctttttcttcggtttaattacccaagtttgaggtacttggcgtattctgcccataaaagtgccaaaataattagtttattttctaaaaaacccccaaaatagttgcaaaaatgggtaaatagttgttaaaaagttccgaatttaggggcgtaaaaataaattatataatagatataaaataacttcactgaaattttcaataaatgattggcagttccgactcaatttcttcaattatcgcagaa

SEQ ID NO: 3436 - DNA, 6433 bp, Heterodera glycines
tcaatttcttcaattatcacagaatttagtatttaaattcattattctgatccttcgggaataacggtttaaatcgaatgtttttttagacgtaaaataaagagagtatagttaagaaattatgtttaaattttcattcgcttatctgttatttagggcttgacttaatttttctgatctattatttgctttacaccggtgaaaaattggaacaaatcacaaaaataatgttttaaattctgaattattttagaaaacaggtttcgataattttaaattatatgctttcagttatcactataatcaatttattaattttcataatagggtataggaatccacaaaaaaaattctggaataattcccaagaaaaatcaataacttttcatcatcttcaatcaggtatcactaaggattaacgagattatttttgaaaccattttcaagaattgctgatatatggattcgaaattcctcatgtcttgttgattcttttttcacagtatattaataatagttagcttgctttttgaacagaatcatcttttattttaacattaaataggctttattttattttttttaatcatatatcggggtaacgatgacgatgaattgctcatttgttagaattttttactattgttttttgaaaataaatggtgttgataaaaattccatttatccccccggggggataaatggagaagggggggggggggttatttttgaaagcctcggaaaggggggggtggataattggagccagcgggattaatggagaacggggggataaaaagagaaaatatggtattctattttcatccattttctcctatcttaattttaacatttaaatcacctttttccttttatcatttctcattattcaatttgtccaactcttcgacttttttcctcgggctaaataaatttgtttgtttggttttctgtcctttttcggcctaagggacgatcctctaacgttgggggaaaatcgccaattttgttgtttggggcactcatcgccccagggtccgcgtcgtcgagagcagctaatttcgtacggggtcggattaactcctctgatccgaagcccatcccctcacttcgtctcccccattttggtgattggaaccgggaccgttcccggtgtacaaggaggttcactgactcccacagtgtgctggttccgttagaccctttccctgcttgtgcaaattgggagccgctcccgtggtccccgcaattgacacactctgtattctttcctttattatttttatggctcaaaaaattatataattttgaaggtattccaataaaagaaaagcaggaaaatcaccaaattatgcaaatataatataaacgttcaaaatggaatgatcacatgaaaaatggttttatgtaaaaaaaaatgtcaggagaaaaaccaaatggggaaagaatcggtttatgaatgactattttgaaaagggtaattttatattgtacatttgccctacccatttttcaaaaaaaagaagtaaattttatctagcttaaaataagtccatttccgggtatcgaaattcgtttacgaaaaatgtgccatggcaaaccttcctataaacaaaaaaatgatgataaaatgacaaattgtcttcggaatttttgcccacaaaatattgagttaaagcaaattaaaatttttattataaacatatgaccacccgaaaacggagtgtgtcagacaaaggcaaatgtaattcgggcattaaccggtatttcgcctaatgattggtatcattgtaaagcccattaaaaatgctacaaaacgggtaagattgtaggcctataatagagcttactaaaattttataaaaaattattattggaatcggaaaatattataaacatacagtcatggtcatatgtttaggaacacctcttttttttgaataaattctttgaaaatattgcttctctggattgaaagaaaaataatcaataatctttttaatgcattttgtagcattttttctgggctatccattggtaccacacatttctcgtttgctttattcctttttgtaaaaatttgtgttttcttccatatagtcaaatttcggggtggtcatatgtttaggaacacttcataaaattcatattttctaacaatagaaatgcctaaaaaaattcaggtaagcataactttggatgctgatcaaaaaaggtagcaacaccaagttgatcagatcactccttcatggtgatctgatcagcccattttggctgggaacgaggggtaaatttcaaaaaaaatttctagggggttgagaaaatttttctggaaattttgagtaagccgggaccttgatttacaaactgacatggattttctggacaaaaacccttgcaaatccaggtccagaaaaatccaggcctgtatcccggcccacatcgagctctagtaaatacattttttcctgggttctcatgctttaaatagtaaaaacattttctttcacacaggtctactcaaatatttcattttcttaaaaaaaatgcctcaaattttcaaaaattggctatttttgggcataatctgacaatgtattgtatttaaatattcaatttttttccctgcgccgcctatcggcaccgcggcctccctcttccaccctggtcaccaccaaaaagttttttcaaaaaatatgccgcaaaaaattgttaaaattaataaagggaatcaacaaaaaattatttaaaaattttaatttgaagcaatttgaaaaaatttctgattttcgaccaaaaatatgattttttaatttcaaatttctgcttactaaatttttctgtctattttttctctaataaaaggattgtccttcaaatttgtgcattaaaaatatttttgtgagtatttaattaaattttcgaattactcccgctgccgcccgggactcccgtaaaatttctgccggattttaacgggagcgggattttcacgggattcccgttcgggactcacgttccggaaaattttcaactccgatcccgctcccggaaatttttttttaccggactctagttttggcccaatatttttgcaccactcaaaacgggatgcggttggttcggcaattcttattaggcgatacttttacatacagactcgtttcgcaaatatggattagccatctttagatgttgtattaatatttttccctagcaagagtattttcgagaaaatttgaatttcgctgatgcactactgcctttggcccagtacttttcacatgactggatgtacatattttctatataatttgctttttcacattttttcaaaatatttgaaattcctgaggctaagaaaaatttttcataaatgtcaaaataaaaccaaagtttcattcgggtccaatttaggaattagtcgaaatggacaccagaatcatgaccagcgaccagaaagccctttgaaatatattttcagattttttaaattaaaaaatatttatttcaaaaaagtggggtaacaacggtagtattaccgaaatttgttatgcttgcaaaatcatacttacccatccaccagttttaaatgtattttttatggctcaaaaaattataaaactttgaaggtattccaataaaagaaaagtaggagaatcaccaattatgcaagtacatatacaatacagtacatttaaatggaattgatcacattatgtaaaaaaaaagatgtcagaagaagaaccaaatgtggaaagaattagtttaggaatgaaattttgaaaaaggtaattaaaataaattgtatatttgccctcacccaatttttcaaaaagcaaatttttccgggatctctgtgatcaggaatattgtgataatttcgattcaatttatttctaaaagcccgacattttatttacttttaaaactacacatccatatgataaatttatcgaaaggccaattttgcagaacggaatgtctgtgaaagaatgtccgtttttcatggacatatcgccaacaaaatccgtttttgaaagaaattttcagcaattcattacgaaaaatgggcattgacaaactttcctataaaaacagaaaaagtgatgatgatcaaaatgataaattgtctgtggaatcatttccgatcaatgtggataacgaatgtgtgaatgaacgtcgtcggcaaatgccaatccgctgatcggccatcagccaatggagggcaaagggtcaaagaaacggcgtgccaccgccgccgccccaccgttgaagccactgtttagcaccgtcaagcatggcactggtggcactattgttgttgttgttccgctcatccgtcccgctggcaccgttgttctgctgctgttggtgacgccattgcttagcggtccacccaatggtgccgccgggacgatggtggggttgatgatggcacatttggccatcattatggctattgtctccatcattgcactcctcactgctcggcgagcgaatgttcagtctgtccaacttgaccacctgtttgtgcgttgtttatgttattgtatataagggaggaatcggaggcgggcggtcccacaaagagaaatttcggcatccagaaatatggcatcataaaaaattccgaaccgacaccagtcccaatcctgttggtggactttcttcccaaaataaacgaaacatattagaacacatcaatcatttcacattcctcctccccgccccgcttcccccgaataaatttaaaaaactgaaaaatttttagatttctaatttcttagttttaaataaaaacaaaaaatatttttcttgtaattttcttataaaaaatttataagaatttcttttatttcgaagtttaaaaaaaaatttcggcgccgagaatttgtgccgtccccgccgctgactatcgattgggcgcctatcggcaaggcaaaagcacctcttctagcgcaaatgggggcggctttatgtgctgctggcggttgttgtgttggtggtgatcaaagcggaacactttgctgccgctgttgtgctggtcgccgtcgtcttcatgttgttgttggttgtggtggtggaaatcgacggatgcggcgaccgcggcggacgacgacggcactgacacggaagcggaggacggcacggaggaggaagtgatggtggacgaacagacggaaatgctcagcggatgttcttccctttaaaatgggaaaaaatgcggtacgcgacatttctttcccgccgtttctttcccgggacttttctttcccaaaattagaattaatcctaaatattaaaaataaatttataaagcaatataagcagtaataacaatcatcatgaccaatcactgacaaaaaaactcaattgctcactgatccatttcaaaattgtttgcaatcccacgtaaatattcagcaatagtccgttctccgaggccgccaacaacaatgtttctaatacgctcatctgttctttggtacacaagccttttttttgctgcatcatctccccgaacaaattcttcgtataatttgtcacgatttttttgaactcttttcacccttctatgaaacacaaaagaatggcgggaaagtaacggcgggaaagaaatgacgggaaagaaacggcgggaaagaaatgtcctgctccggaaaaaatgatggaatggagggagccacccgaacatttttgtctgattttttgttcgtaggcccataaatttttttattccgatattatttttaaaatctatgcggtatgggtaaaaattaagaaatttcgtcaaaatttatttaatgtatttttgcaaagttttgcaagttgatacaaattaaaaaaaaactttttccaatattaaagtttcgttatttttaaaagatggaaacagtaagtaattaatggaaaatttgtcttttttgagtcatttgaaaaaaacgtccacaaattttaaaaatcaagaaaaaagaacatttttgattttcttcaaattcaaaatttcgaacgcacacatcctttttctaactcattcaactgtatagcgtttgcttataaaaagcttctcctcatcaagagctttcgaatgataccaagattgttcagcttggtttgcataaactctcaaaaatgatttcgaaaatcgtcattttttaagtttttttttctttctctgtaaagaaatagttcgccaataagagagaaatgtgtctttctctgcactctctatttaatgacttatgtctcattttttgagtcggtgtgtccactggttctaaaatcggtggaaattttttaaattcttttttcttgttttaagattttttcataaaattttttgttttaattttgtttttaattctgaaaagtggtggaaaacgttgtgcacacgtcgtgaacacaaattgatgcattcactcactcaccc

SEQ ID NO: 3437 - DNA, 2798 bp, Heterodera glycines
ggtgatttgactatggcaaatgccaataagcaaagattcactaatggcatttggcatttgcctaacaaatgtctttcagcatccaagtcgaattcaaatcactcacaagaatttcatgtccattgtggacttcagcccgacaacaccaccaaaatgtgccaaattcccgaacaacacacatttaattgaggatcgtccgccgaagtcggccaactgctgattaacatttaagctctaaaatgctttaaggtatacgactgtcctcggcacaaaagtgccggtcatttcaccgctcctttgctctagacaacgttatgatcaaaaaatggccaaaagcagcacggaattggtgttgcaaacagccgatgaaggcgaaaatcgcgaggcggaaggaacggagcgggagacatggggtaaaaggagagaatgagaggggggaagagagagaatgcctgaaggggagaggggagggggaaaagcgggagacaaaaagatgatcaaggcgaaatcaacatctaatggaatgaatgttgggggatgcctttgtttagagcgcaaaatcgactttcttctctctgtggtcggttttgccgttgatttggccaatgtttggcgttttccttatttgtgcttcaaaaacggtggcggtaagtcgcttaaattgccgtttcgttctccccactttttgccgcttcttcaggcgcttttctgctcccttacacaatgatggttcttttggcaggtataaacatccaatgagcacccaaatcagctttatttggcttttgtaaggcattcctttgttttacatggagttggcacttggccaattccatcgaaagggtgcgatcacaacttggggccgaatttgtccgctcttcaaaggcatggacgacggaaggtcccctttttgagcatcattcgctgttttaggcatcggctactgcgtcattatgaccgccttttacaccgacttcgtaattttgctaattgccccccccccccctcttttttgctcactttcccagttttacaatgtgattatcgcttatgcccttcactatttctacgcctccttctccacccaacttccctggtcaagctgttccggaaaacgttcttaattaattctgctaattgccctgtgatttccttttgagacaattcgcccgcctgttacgagccgagttggagcgaccaatcgcagcaatgcgcggacggccccattttccggcagaatgagacgagaaatggcacttcgccgcgcattgaccgacccgtctcagccgcagaggaatatttttagtaagaaacagaaattgggagagagggaaaagaaatgcatttgcagcaaatatttccttggactacacgccgaaaaagaagccattccccacgtcacacaaagcgtgggacaactcggaccaatcaattgggaaatcgtggtaagacagtcaaagaaaggcaattaattggttaacgatgactcattaatccaatctcagactaattgggttgttgtaattctccgttttcccaaggcttgtctgtttgttgtctacatcatctgctatttttcgctatggaagggcatcaaaatgtcgggaaaggtccgtccgttttcttaccgtggttcccctcgtgatgctcgagagtctcggccaaagaaaactgttttctctgatgggttcagtctcggatttgtttcagtcccccgccctctccccccccccccctccccaccccttcccatgctcatttgtcaggttgtgtggttcaccgccatttttccctacgttgtgctcttttgtctgctcatccgcggcgtcactctccccggtcccttttccctttccctctccctttttcatttttcaattataaatttcaaaaggttccgaaaaaggcatcgaatattatcttcggcctaatttggagaagctgaaggacccaaatgtgtggcaagatgccgcaacacaagtgcccaatctgtcgcgtataaatttgttaattttccatccttaaaggttttcttttcacttggcccaggctttggcgttttgatggtttgtactttcatttgaatattttttattttaaattttaggcttattcttcttacaacgaattccacaacaatgtttattttgacgctcttctgacaagcacaataaattgcgccacgaggcatttaatttaaatgcattaaaatttagacaattagacgcattccaacccaattaagagttgattgttttacattaatattctaatagttttctggccggtttcgtcattttctctgtccttggttatatgtcgtgcaaaagtggaaaaccaattcacgacgttgcgcaggaggggccggggtcagcagtgccttcatgactccggccattagtcggctcatttctcagtttagcctcgtcttcgtcgtttaccccgaggctttggccacaatgcccggggccaccgtttggtctttgattttcttcctaatgcttttgaccctcggattggacagctcggtgagcaaagaaacaaaccccgcacccaattccaatccattttattgttttcgttcagttcggtgggtccgaggcgatcatcacggggctaagcgacgaattcccagcaattaaacgcaaccgcgaagtgtttgtggccgtactgttctctttctatatgatcattgggctgacaatgtgcacaaaagtcattttgctttatttggccactaaatgtgccaaaacccaggccgaattaagggcggaatgttggtgatggagtggctgatg

SEQ ID NO: 3438 - DNA, 2313 bp, Heterodera glycines
  unsure (1)..(2313): unsure at all n locations
catatgatcagcaggtattataaattaattgttttaatattatttattaattaaattattattattattattattattgttctttaattgttgcgcaattcgcttcagaattgcactttgaccatctcttcatggaccaattccaagtcggcgttggattattacgcggatgaaaaagttaatttggcgtcgttcattcccaacgaggaatgggaagtggccagcttccgtattttccggcatgaggtgccaaaagcagacattacacttaaattttgcattaattttgcaattaaattccaatttcacttttcacagtataaatacgcgtgctgtcccgagccgtgggttattctcgagtaaaaatacatttggctttctctccaatcaattcattttttgtgcttttcccagggcttcgattgttcttcgacggaagccgctttattacgtcattaatttggtgaaaagttttttgtttttcatttttttaaatcaaattccatttttcagatcattcccacctcaattatcactttggtggccatcaccggcttctttacacccgcgtcaacagcagacgatcgaactgaaaagataaaccttggcattacgacggtgagaaaaattaaacaaaattaaaaataaattaattatttatatttgcccttcagctgttggcaatgagtattctgatgctgatggtaagagaaatgaatgtttgatcaaatgtaataattgtccatttgttaggtcagtgatcaaatgccaaccaccagcgaatttgtgcctttaattggtgtcaaattaaaaaacaaaacaattttttttttgttattttcagcgtggttttacctgtccattatcattgtatgctttttattttcttccagtttttatttaaaaataattttaattaattaattattaattttaaatttaattattttgctaattcccctcaattagatcatttccattggtacttttctcaccagtgtcattctttctgtccaaagtcgtcgtcaatatggccaattgccttcgctccctttgcgcttcattttcttcgtcaaattggtccatcgcattttaatgctcccattaattgcccttttgcccacccccccccccccaattaggcaatgattctgagcagtttcatcaacctgcagccccttcagtaccaagactacgtctatcctccgttggccaattctttgggcattgtttttgccctttcgtcagtttcggccattccattggtcgcactttggcaaatgggaaaagcaaagggtcgaacttttggcgaggtgcgaatttcacacttgggacattaaatttaggactgctttaaactgaaattttccgtgactcttggccataaatggggaattttatcggcccgagaccgactcgagcagtcctaatgaacatcattcattaattcggtgataaaatttaatagaaaatgcgatttttgcttacgccgacggaagaccaaacgcatcgacagacggaaaaggcacaaaaccgtgtaaaattttcaaaaatggacatggacattccgaatgaagaagaattccatcaacagattaatgctgaacacggcgacgtattattatagggaacgtaagaaaaaaatgccagtggcaatttgcaattttacaattatttaatttgaattgctccccgaccccactgggaggaaattctcggggagccaaaaaagaccggggacagtcagggattggggtcggggagcaaccctaatttaattgacagaggtcgttaatgagctcaattaatgtgaactccggtcaattaaagtgattagcacaatttaaatttgttcaatgacttcttctgtttgtccttctttcttttaacaccatccgcacaactttggacatttcgtgtacattttgaatctgaccattgggttttcgcttgcgcattcattagacgttaattcgctgcaaagtgtttcgtcggtgtttctgaacggtgctaattatcatccaatgcaattgatcaattgctgctctttgcctgcattcgctgttctgctgctgagtgatcgaattgcacagtccgcacttattaggacagaaagtggccatcacactctgttgctcggtgcaccacccttggtccaaccaatgttggcacgttctttcatctgtggacagagcccaacttcacaatggcactccgtcccaaccccgcggcaaaccctttttgttggtgcatttaaattncgggtcgttcgcagcacatttggcaggtcttagcacattttaacgcttcatt

SEQ ID NO: 3439 - DNA, 2266 bp, Heterodera glycines
  unsure (1)..(2266): unsure at all n locations
atcatttaaatattctcttctgctgatgcgcaagaccctttcggttgcggcagggaatganttgngccttgncccaatggaatatttttgtactgacggcgagaaatgcggcacagaaagaacagtttgagttggaattgcgcagactccgcttaatcgagcagaacttttgtgagcaaattgttgtgctcgaagattcgccggttaatgccaaaatcggtggcccaaattaaccaattaataagaagaaaaaaatggccttaattttcgataggttctggcggtgccaccctaaactccttactttttctcttcgagagttttggcggtgaagccttttttgcgcaaaatcgtatccttttgctgcacagcggcggattgaggtcagaaaatggggaaaaatggaaaatggcgcacaaattgccatttttagccaacgcattttccatgtcgccctcacaggttttttggcatttccccttttccgtccttctctttctccgtaggaaaagccttcatgcttctgccggatggtcgcactttacttgagcataaactcatctcttatcggttagttgggcagcgcttttcagcggccgacaaaaggccaaaaattggccaaaatgccattcttttgtttttgggcctctccttctctccgtccattcgtcgctcggcttcgttttcgtcgcttctgccgatgtgctcgaacactttcctcccgccgtttccgtcccctcttttcctggcgatcttttgctgatcgcgcaccaatcgccggtcgaagtggccgaagggcacggcgtttatttactcgacggaaattcaaatcacagcaacggacaaagccaaaagttgaaggtttttccattttaagaaacattgcccaccaaacagcacagagagtgctgcaaaaaccgacggcggaggaaattcgcagagaaaatgcaattttggaatgccaaagcgaagggggggaggagttggtgttgacggacagttgctatttgctgggccacggattggccgtcgaattggcgcgtctgagacggaaaatgggtaattagcaaagacaattaattagccaccaccatttgcaattaataattgtgcagaagctgtgccactgaatgagctgtgctgttatcgcgactttctctgcccgttgggtttcgcttcggaagagcaacgaaaggcccatttcaaggcgaaagtgccggaactgctgcaatggcaaagtgccctttggtagttacaattaacaaaatttagtggccaacaactgattttcatgctaaataaccgattaaaaaacacaaaaatatccatttgacttttcctaagatatcattaaaaaacagtcatcattaagtttatttctgaataatcccttactatataataagcgagccgaagctccgcccctttttttggtcgagttaaattggcgtaaaaagctttgatttgtggcgatttgttcattaataaaaaagaaagaaaaatcaaaaaagagcgttagaaaaagaaaaaaagaaaattttgcaataacttcccatgacagtgacaggtaaacaaaacaaaaaagagagaattatttttcagttgtttatgtcaatgtgagagagaaagaatgaggaaagagaagaggtaccgagagagagaaagaaagtgtggagataaagagagagagtcaattaaaagaggagggagagaaaagaagaaatgagatagagagagaaaggtgaagagaggaagagaagaaagaaatagtgagagagagagagagagagagaatgaaggcagagagagaaataagtagagagaaagaaagagagtgagtgatgaggtacgaaagaaaaagagaggaattgaactgagagaaagaaagaaatagagatggagagagaaaggtgaagagaagaagagaagaaaggatagaagaaaatggagatggggatagtaagagagagagagaaagaaaggcagagagagaaataagtagagagaaagaaaaagagggagtgatgaggtacgaaagaaaaagagaggaattgaactgagagaaagaaagaaatagagatggagagagaagagaagatggaggggggatatagtaagcgagagagggagagagaaagaaagaaagaaagaaatcgagagagaggagagaaagacaaagagtagagtgaatgaaagaataaaagaagtgagtgagtgattgagagagagtgggagagagagacaacgagagagaggagagttagaa

SEQ ID NO: 3440 - DNA, 1070 bp, Heterodera glycines
aaaaaggaagaaaaatcaaaaaagacctttaaaaagaaaaaaagaaaatttgcaataacttcccatgccagtgcaagtaaacaaaccaaaaagagaaaattattttttcagtggttaatgtcaatgtgagagagaaagaatgagaaaagagaagaggtaccgagagagagaaagaaagtgtggagataaagagagagagtcaattaaagaggagggagagaaaagaagaaatgagatagagagagaaaggtgaagagaggaagagaagaaagaaatagtaagagagagagaatgaaaggcagagagagaaataagtagagagaaagaaagagagtgagtgatgaggtacgaaagaaaaagagaggaattgaactgagagaaagaaagaaatagagatggagagagaaaggtgaagagaggaagagaagaaaggatagaagaaaatggagatggagatagtaagagagagagagagagagaaagaaaggcagagagagaaataagtagagagaaagaaaaagagggagtgatgaggtacgaaagaaaaagagaggaattgaactgagagaaagaaagaaatatagatggagagagaagagaagatggaggggggatatagtaagagagagagggagagagaaagaaagaaagaaagaaatcgagagagaggagagaggagagaaagacaaagagtagagtgaatgaaagaataaaagaagtgagtgagtgattgagagagagtgggagagagagacaacgagagagaggagagttagaagagaagatggagaggaagtgagtaagtttggtgtttgtgtgtacatatgtgtcatcgtttgaatgtggcgtttcgttttgttatcgctttgcgttaaaaaatgatttgaaaaatgcgttagaaaaagaaaaaaagaaaattttgcaataacttcccatgacagtgacaggtaaacaaaacaaaaaagagagaattatttttcagttgtttacgtcaatgtgagagagaaagaagaggaaagagaagaggtaccgagagagagagagaaagtgtggagataaagaaagagagt

SEQ ID NO: 3441 - DNA, 1329 bp, Heterodera glycines
ccaaatgttttagttttgcatttttatcggtcgtcccaccacggccaattctctcacttttgaattaattaaaatgccaagggatttgatgcacagcaaagaagcgcatttgctcgacttgggcacacagagttttttccattttggcactccaagtgaacttctctcccatttctacggccatccatcaatttttcgcgaaaaatttttgcacaacggaaaaattgggaatattttatattcaacaattggggaaaagaaaaaggttgagaagagttaacggattatttagttttttatttttaaatgttcagatttcggctgaaagctttttggaatggtgcgatttgaatgaaaattgcgaagttggcaaagaatgcattttgagcggattggtttatgacggggattcactgctgcgcattggcaatggcatttgtgccagcactttcccaatcgatcggaaaccttcgggaggacacgcgggtcggagtttggcattttcattgaaaaaataattcatttgacaaaagaaaaagaaaatatcggcacttaaaaaacaagaagcccttattgcgtttttcagccttattagcatatttttccgttcttcagttgacaattccacggtctctgcttttgttacggtggcatttcaccgcgacgacgacattaagcgaagttcggccgaatgtccgctgctttggtttggccacagattggccaccatcgcccaagggcatgcccaattccattccctttggcactttccccttttctcggctcacccaaatcccagcgaatccctgcaggaaacattggacacaatcaatcgactgggccaaaacgaaccacaaaaaagcgacaagacaaggccgagaagcgatcagcaacttttgtcaattgaagaagtactgcaaaaagtggacgcaaaaaaactgagggaaatgcgcgaaaaattcattaaaatgccaatggaagagaaagaaagcggaaaaccatcaaaatgatctgtgtacttaaaacaccggaaaatccaaaacattacgaaaactttaagagtgtacactatcaaagagctatttataagagaaattttcttaaagattttttatcggaatgggaagtgattataaacatattattttgtgtgtttgatgttttggcgcttaatttgtaacaggaaattgagaaaataatttttggtaaaaatttcagcccaattggacaagtgaaagatagtggaattacaaaaaatagtggcgctataattagcaagacataaaaccaaggaaattttctcataaaataatctattacaattttgta

SEQ ID NO: 3442 - DNA, 3459 bp, Heterodera glycines
aacaatttcgcatttttgaataagcatccactgacccatcctacgttcattgttgatttgaatgtcgattctgttccattgatcattgaattgccagtcaatcgcttccttttcccattttgcccatttgctcgcgtctcgcgcaatcggacaacggaccaacagaagaagatagcaatagtcagttcctttcaacgtcaattgttcccgagtcaattcgttggtctgatcaaatggcacaacggagtcagcaagacgcggtggccaaatgacaatgaaattgacgggagatgaagcattggcaaatgcctcaaatgtggaaaaattggttaagaaatatgaaatgaatgacacttaaatgttgtggcgacatgaaatatgaatttcgaaatttctattttttaacttatttttaggaacattattcaagcaaaaaaaaaaaaatttgagtgccgtccaaaagaaatatttcggtcagcgaaccacaaagaccgtaaaaatgacaaataaaatcaaatcaccgctttcaaggcttcaattctcgaggacaaattcccatcatccattaacacctttggcacattgtcaggacggggagtgaacagccatttgtccaacgcttgtccatccgacgccatggcactgtcatcggccggaaattcggcgaaaaagccaccagaataggaattgataatacgaagcgatggacaatcgtttagaattgacggcacggattgtcgcaaacggtagaaaattctgccgtacaattgtatggcacaaatgtttttcgcgatcattggccaaaatttgcgcaaaatgaactccaaagtgcggtcaccacccgtgtagatgaccaacttaattggacaggaggcgaaaagttggcgaaaacggcagagaaaagcgatggcattttggtcgacgtatctgtgaaaattaaggaatcgttttacaacaaaaaagaaaaaatcaatcattcatttcactttattgaaatgcgcttgaatccgacgactttctttggcaacgctttttgtggagttggcaacggctttcgattgaaattgacaatttcccatccatttgtgccgtccgcttcaaatttggctttaatttccatgggtttgagcgcccaacgccgcgtcttgaagtgttcgtcgatgtaaaagtcaaaacggtggctgacaagtgcaattccaaggcccagttgacgtggcggaagcaaatcgaacactgaaagccaacagtcggcggagatgaaactgaaaaaaaggaaaacaaaatttaaaattgaaattgaaaattggcattttaattttacattgctttttccattttttcttcggcttcttttcggttgtctgacattttgttgcagcaaattattaagacagttttcggcactttttcagtttcttaactaccaccaccattatcaaggtaaaaaaattattggaaaaacaaaatgatgggcgatagaaacattttcaaaagtcctagaaaaataaaataaagatagatatgtattacgtatttttcttaaagattaaaaagtaattctctatcgaatttggtgagaaaattggcgggaccgttggagctgaaatttttcgtaaaaatcctgctgggtcaattctgaatttcattttataattcctgaaatatcaaatagcccctgctaggccagtaaaatttcaaaaaaaaatttgacaaatttttttttcttattttgtaactaatcatagtgcctcaatcgtccccccccccgtcatttttcgctttgtggggggaacatttattatcatttatcaaaattatcagagagaggctcagtttgctgtcaattaggattccaagatctcggattgtttgggtctctttaataatttttccattaaattggcagggaactttaaaattatccttgccaatgtacagagaagctgatttttctggtgaaaatggtagaccccacataaaaattttttggaaaaatacacatgtatcttatttattcatcaccccataactttaaaattggatagtaaataaataaataattcagaattttttttctctattacctatatgcaaaatttgttgtggatttatgtaacaagcagaaaaaaaaaaaaattttatttttacataattaaaacaaagagatagtacaccaaagtgagagaaattacaaagaaaaaaagcaactacgagatagtatgtgctaggcttttctctgcacagcggagttgacccatagagcacacctctgaaccaaaaaaaccttataaatatgtcgtctcttggggttaattttcattttgttgtatcccattgtttttactctttttcgctaaaaacctgaatccgcatagtttttcgagacaaaatttgtaaaaagtcgactaaactttttctgatttctcccacctttgaaaacattttgcttctatctctataatatgtaaactcggccaaaaatttattcagtttaaattttcatgtctttatttgctatgggattattgccatccaaaacgacaccatcgccgaatggcacgactccatcaccgccaactccaccgaatggcacgactccatcaccgccaactccaccgaatggcacgactccatcagcgccaactccatcgaatggcatgactccatcaccaccaactacaccgaatggcacgactccatcaccgccaactccaccgaatggctcgactccatcaccgccaactccaccgaatggcacgactccatcagcgccaactccatcgaatggcacgactccatcaccaccaactccaccgaatggcacgactccatcaacgccaactccatcgaatggcacaactccatcaccaccaactccaccgaatggcacgactccatcaccgccaactccaccgaatggcacgactccatcgctgccgcagcaacctccgccagtcgccacagctccgtcaccgtcgccaccggttggcaatgtgttgccgctgctcgccaacggacagtacgcagttggatgtgccgacattatggtgggttgggtgtgtgtaatgaatgggtaatctgagggatttgttacagattcacttacaattaacaacaattgtttttttctatttctccctcctttttcacagctttccgaaccttccgctgcctcctcatcttctgctggtggcgttggactgttcgcccgactgttttaccccgccgcttcgtccgtcgtcctcgcggatccgtcgacttcgtccgccacaacagcgtcggcggtgcgttttttttttgagtgctgacatacaaatacaaggggtatctcggaccaagggctatacgacggacgattgggacagggggggggtgtctcgagacaccctttgtatatgtatggtgctgaatgagccgaaaaagtgattttggagttcgttctatgtttcccctcatcat

SEQ ID NO: 3443 - DNA, 737 bp, Heterodera glycines
cgatcgcccgtccattggcatgcgccggtcttgccgggtgagcagcgctttccactggtcattttctcgcatggcatctgcggctgtcggttcttctacacgactgtgtgcgcatcgttggcctctcacggctacgtagtggcagcgttggaacaccggtgagtgagtcgggcatggcatggagcttttgaaaattcaaactatacctcctccccctctccgccttccagggacggctcctgctgttggacgtatacgcttgagcaggtgctatcaccaacaccgccgccctcgccaccgctaccaacagccgttgaagggacgccgcagcaacaaaacggaccggtgccaattggtgagaagcggtgggggccggcaatcggggaaaattgaaaaattttccttttcaaaatttcgctggggaattaattggagcagagttccacggaaaaccgtaaaatgcaaattttatattcatcataaaactgaaaatcactgaaaaaaccgaaatttgagcagagactgtccgtgttttatatatactttaaacttttttttttaattttcatattatttaagccgtcaccgctggtgctgaaaacactccgccgcagacgccgacaccgccgccgcccgtgccgacgacaacgcatgtgaagaagccgatggaaatgcgcatactgccttacgacgagaccgaatatgaaacacgcattgatcaggtgggaggggggggg

SEQ ID NO: 3444 - DNA, 2960 bp, Heterodera glycines
atttttatttattttcaaattcccctcccctccccgaaacgacgtgttgctgagacggtgcacatgccccccatcttagccgaaatggacgccaatttgctgcaaaatgtgacgacggacaacaacaacgaacgccaaattggacaacagcaaattcttctcggccaaacattcgattgggcacaattcaaagtgagtggaaaatggggggaaataaatgaaaaaaaaaatagaaaattccctccccgttttgtcagaatcgtctcgcgttggatcgctgcgtgtgcatgggccacagttttggcgccgcctcatcgctgtccgcatgtgccgaatatccgtcgctgttcaacgcctgtgtgctgctcgacgcctggctgtacccggtggaacgacgaatgtatccggcgactgtgcaggtgtgtgaaatgcgattttttggaaaaaaaattttgaggaacggcggaagggtgccgataggcgccactggaaatttttaaatttgttcaaattcaaaatttgtcttctttccccccttcatcggcacatacacccaatgggattcgaacccacgccaataaaacccattttgtgcaaaaaataaatttggcccgtttccagaaaatttcggaagtttttttttctcatcgcctttccccgcttttttagcctgtgctgatgctcaacgccagcaaatggcaatggccacgcaatgtgcgacgaatgcagcgactgttagcgaaagcgaccacttccaccaatgacgacaaaacagcaacggagacgacaacaacgacggcaccgcagcaacagtcgcaggacggcgccgcaacgacagcagcaactgcacagccgagtgtcaccaacacggacagccgaatgatgttcacgataaagtgagtggtgggagaagcggtgggaaaagcaaaaaatatacatattttcttgttttcacccactctttttggcattccccgaattgctcgctcatatttatttgaacatttgtttccttttcagggacattgtgcaccaatcgttcagcgactttggcttcctggtgcctggccgtgtcgcccgttacatcggcgttcagggcgacttggacccgctgttgaccggcacagccgtgctcgagatggttctgcagttcttggagtcgcaatttctgcaccagcaacaacagaaggaggacgaggaggacacggaagatgaagaaggagaagaagacgagttggaagaaaaggaagaggaaggagagaaggagtcaaaagagagaggaggaggagggcaaagggatgtgcggactgagcaaggggagcaggacgaagtggcgagaaggtgaaaaacagggcattaccttaaatttggagttcattttgtttcctccccatcccccgaaaaaaatcaacaaattttcaaactgagaattttcaacaaaaactttttccagacataaaagtaaaaaaatcactgaaaatgtttcgttttttgaaatttcataagaaaaaaatttcgggcgggaaacgagctctgctctccctatttgtaagtgtgagagggtgaatttgaatccaaaaaataataatttttgatacaatttgaccaataatatgggaaatccatgcattttgtcaaatttgccccaaatttacagcaatgcctccgcgttggaccgtttgcgtcgtttggtggcggagaaatacgcggcttttgtggtggaagggacggacattccgcaggtgaattggggtcctgggcatattggatggccatttggggcgcctttaacaattttggaaaaattgttttcacactaacacatgttttcaaaaaataaaaaatatttttttcttaattttcccaccttttactaatgtttttttattttcgcccaaaattttaagaaattgcaatttttccccgtctaaacactgtgctctaattcaggtcaaattggacgaggtggccccccttgtggaagcggaacaacagcaggcggtgtccgcggaggaggagcgcaacgtggccaatgacagcggcgtggacacaccgccgacgactgagacaacgacggaggaggcggccgagaataataatcagcccagcagttaaagaatgaagtgccaaaagtgtgatattgaattcaaataaatgccatgccccaagtgtatgtatataaagcagtcaaaataatttaatttatttttttgtatgtattaaaggaggagcaataaatggaatattatgtgttcaattagtattgtatcttccttccattgattggagttaacaaatcttgatgcctttatttttcggggtcgtagaatccgatttcgacacctaggtattttctttcgcttatttataaccctgaattcggattcgaactaaaaccaaaaattgaattttcatatagttaccccattttttaaattagtaagagaaatagctcaaaaatctttaaaatcttagatctagtcggttttaagcgttccatgaatgtatcctcagtttcttcggccgtaattttttcttagttggtcaatgcctatattctttggtatcaatcgaaagctctaagcctatagaaatttttttaactaaaatttcggataaaagcaatagataaaaattattccttgaatttcatgtttctcattgtattttttttcttaatgccaggtatttgctttttcttccatttataagatctcgagacttcaagctttcgattgataccgtcattgaccaactaaggaaagggtgaactgtagtgaacgccccgtgaaaaaaagagtcaaatgatataccgatcgattcatctcaaggagctaagcatggaaaaatatgtcgcgagttgcggaaatgccaaaaaaccggtttttgaaccagttcaaaactcgaaaaattgagagatttcacagtataactttaaacgatcgaatcctgacaaattt

SEQ ID NO: 3445 - DNA, 1406 bp, Heterodera glycines
  unsure (1)..(1406): unsure at all n locations
ttatgaatgaacacaataacaaaacgaattaaatcaggatcatcaacaaaataatacagtaaacgcattggacacacaaaatgatcagtacggtgttgtgaagaagcgcacacattcaattgatcttggaaccccccggaagaaatcaaacattttaagttgccaaaattacatgggtcaatcatcttcagagtccaagagatctgatgacaaaaccgagcaacaaaattttaatgaaatggctgctttatcatcaccgaaagcatcaaatggaatgccaatttctgatttttgctatgaaatttttggggatgatcaattcaacaatttgacgtcatatctcgatgagattgatggatttgagtcaaacctattcgacggccttttgcaagaaaatgatgaacaatttccaatcactgattttaagattacagaaaaacaattttccggatcgaatcaaactttagccgaacagtatgatgaagcaaacactagtcgtactgtaagcgaacaattacagcagggggaaaacattgaaaatacccaagaaaaatcaattggatctgatcaaggaacaaactcgaactcggaaaactttcaaggaccaattccggatcacaacatagttgttgtacaatctccaaaacagcatgagtatactgtattgcaccaagaacgagaaaaggaaataaaaattgatactgtatcggttcagcctaaacgcaagagtccaaacaaaggtgcatctaagaagatcaaagaaaatcgtaaaaaagcatttgatgatagccaaacaaaaccgacccaaaaagtaaagccaaatgcggaaaaacaacatcaaaaaataaaacaagtactcagcgtaactaaaggtgtacaaaagtcaaccagtgccatggcaaaccatggacaaaaattgaaaaagtctaattcattttcaaaaatgctaaataatgaaaatgttgaacatgttttgacaagaccaattcctggcagttctcatacagcaaattaccaaagacagagcaatgcttcaagtccaattaatattcaaacggcacatatgacagtgtccagtccagctaatccaacacaaatacaaactggcacatcaaacagcccggatttaggctggaaaacgcagaaatccttgccaaaattgaatatgacaaaagtcgcaaaattgcttgacataaaccaaaacagtccacaatactcgaacagcccgacaacggtgctaaatcctgngacggttccgaactcaccgctgatgtcctcccagccacgcacgccaacgtatttttcgccgactgatatgaggctcagtgccttcngcaaccaattacagctttcacgacgcaacatgccttcagttccacaaccaaatatcgtatcggatccgcaac

SEQ ID NO: 3446 - DNA, 2069 bp, Heterodera glycines
  unsure (1)..(2069): unsure at all n locations
agatttatgattccatctagattcatgctgctcccttttccgataatgttgctaacaatcatgcagggatcaatcaacctgctgcgaacaaaccactttttaaagttcccgcgcccccaactatgaggcaaactgaaaatgacaacattgtcaatgccgataacaatacgtcagaccggctacaatcgcaacattctgtttccgattacttgaagaactcaccatcatatcccaacttggagactactgtagcatcaacatcacaaagtgtttcatcaacaaacaataattatgctgaagctggacattacaatagcatttcgcctactgtcgatgctacagtaaaatctatgcccccaccacagttttcaaatcctttcgcgtcaaaatcacaaaatatgaacgcaacagatcaacttttggctattaataaagccgcgagaaatctttggacctcacaacaaaattctactaccaatgttaccatctcaggcttacgcctgccacagttgccaattactgatgcaaatgtcaggcaattaaactcacaaccaaataatgctactgtatatatgcccccacaacaactttcaaatcctatcgcgtcaacatcacaaaatctgagcgcaacagatcaccttttggctattaatgaagccgcgagaaattatttgagatcacaacaaaatcctactaccaatgttaccgtatcaggcttacgcccatcgcaatttgctgttgcagatacaaatgtcaagcagttaaactcacaaccaaacaatgctacagtatcaggcttaaccacagagcaaatggctactgctgatgctgcggttaaacgcttgaattcacaaccgaatactgtaagcaatgctaccgtatccgacttaacccccgagcaatgggcgctcgttgaagcatcagtgaaacgtttgacctctaaacatgctgatgatgcaaacattgctaccgtcaaagggcaaacaccaacgcgtgtagctactgtaattgataataccgtgcattcatcgcaaattcaaagcgcaacaaacgccggaagggacgcccaacccattaatagccctcaaaataatgtgctcacgcggcagtcatctttggaatttataaatgaacaaagctttattactgctgccaacaaaacagctgcgaagggcacgtatttacgaaagtctcattcaactacagtacctcattcaatttttaccgtaccacccgtacctcaatttggtaaagaacaatttcctaattgttgtttctcaggaataattttctgacaaaaatatacaaaatattaatattttgatcatggatttttcggaaaatttattgcttaaaaattctatcgacttttagactaacttagggtgttatgctagacaaaggcccgtaaaaaagatggaaattttaaaacgaaagattcactaaactactttttaaggccacacactatacttaaggtaaatccgaagtgctgagtcgaagtaataaaaagtgcttgtgatcaaattaaaagcaaaataattattttaaacattaaaagcataaaaattcttttagtttaaatcaataataatttatattttaaaagcaaaataattatttaatttcaattaataataatatacatctaaaactttaaaactattcatatacctggtcagccgaacctatactatttaaaatttatttattaaatactaaattatatcaaattaatttaatttaaatcaaaattattattttgctttcaatttgatcacttgcacttttcatactcctttatagcacataaatgcgaggtgcaatatccgaatctgccgtcagattggtcatgtggcttgaaaaatcgatagaatttttgacaaatcttttatttttattttagcccatacctttcttttttcattaacctaaatgagttaaaattagctccattagtgcaccggattatatataccccaaataggtgctaggtcgtttcgtaaaatctgccatttgagcgatattttccacaaaacanntagtatataactttgcttatgggcaat

SEQ ID NO: 3447 - DNA, 1366 bp, Heterodera glycines
ataactttgcttatgggcaataaaattttacattcttggtaccattcgatagtccagctttttctctattagcataaaaaacttcaaaaaaattatcaaatttaacataagttatcgtagaaatagttaccacacaactttttctaaagttgaccaatttttttttaaattttggaggcttatagagaaaaagcttggctatcgaatgataccaagaatatataatttggttgcttttaagcaaataatgccacgttatgtcgaaaaaatcgctaaaagggcagattttaagaaacgacccagcaccccaccccaatatataacaggtttttttatactttttaaaaaatttggtttacttttaggggtgacaatatttttaggaaaacccaatcaataattgtttaggtaaatcaacaccaatcggaaacaatcctgctgaggctcagattcaaaaccaaataattgaacctctcaacaccgtacccactacaataattccatcgttggcagttggtggaaaagttggcgaaacttcggacaatttaaaaattgagcaattatcaattggtctggaattggccaaattggcattaaatgccacaattccaccacttattattggcacaacagcgacacatgtaaatgattataaacagattttgaaaatgaattttgcctgtctaatgctgaacaaatcagaactggacattgaccaactttatcaaaatgcaataaattcaaattttaggtaatattacaataaataggaatgggatttttagtttaagaaaaatcccgaaacacctatttaaataggtacaaaaaaactcaaaatacttattaaataggtacaaaaaaccccgaaattggcagagaaataggcaaaaaaaaatttattaataatttttaggtagtaaaacatataaaataatcaaaaaaaatttaattttgaatatttcagtcgtaaatgcaaaaaatttaaagtttttttcgaataaaggacaatttttaaacctaaaattcttgtcaaaaaaaaaattttagaggataaatttttgagaaaatttttttttaagtaatcggtaaaaaaaactcccatatatatagttaaaggataggtgttataaaactgggtccagaaactcaaaataaatgtaaaaatggttttttcgcgtttaaccacacgtatgaagtccgaaattttttttttagacattatctaaatatcccatcctaattataatacttttttaaaatatgcaaaattaaatttaaaaaaataaatataaattggaacaaaaatggtgtattcatatatttttttattttaagcagagaaatagtgggcatattctttcaaatc

SEQ ID NO: 3448 - DNA, 1065 bp, Heterodera glycines
tacccacccccccccccgaaattttctaatttttttcctaaatttaattatgacctaaaatatttaaaaaaaaacaaagaacaaaattcaagggatattgaaaacatttgcataaattcttcataaaaggacaaaataattaattaatttatttgacccgatttttaaacaattttttcataaaaaaaagttacttttcgcttaaattttaaacaaatgaagcgctcgctatttatattaaaataatttaattgaaattattgattgatcgcctcgcgatttgtaataagctaattttgcccgtttgatttgctcatccaaatcaccactttcgttctgatgctgatcattaagccttttttcattttggcaatgactacaatacggctttggcattctgtcagtccgctttagaaatttcttcctctttcgccgcaacttaaagtataaaaaagaggttaaataaattaattaaaaattaagaaaaatttcaaaataaagtttccgaaactctaaatgaaatttttccagaagaattttgcccttgttcaaaaattttttaatgaatccatcgaattcaaaatcaaaaataaaatatagaaaatgaaatctaagtcaaataagaatatttctgtgtttttaggaatgatttttttttattgttatacaaaaagacttattaaatttaatttttttcaattaccgtagttggcaatggtatgccattttcggttacggtagtggtaaacattggcacaggtggcgcggatgatgatgctagtggttgtgattgctgttgtggtggtgggtggttgtggcactttttgtggtgaaggatcacggtgttgtataggcaatgtaatgatcggagcattcggttcacactgccaaaaaaaaaatcatcaaatttgaaaattgttttggtaccgtatgaaagtttttgtcgggtttcgtgtctctcccctttaattaaattaaaaagcaaaaataaaatatttaatttaaaatctttagcagatcaaaattatgttcaaaattagaaatgtcaaattttcaaaatttccc

SEQ ID NO: 3449 - DNA, 4726 bp, Heterodera glycines
tagttgatgaaaaatcatgggtaaaaatcaatgattttcaaaatctgagttcaggtccgtaatcaacgcattttttaagcctagaaaaaatacctgcgaaatttttaacttttttttgtcgggacaccaattcttgaccgctcttggatggtctttttaattctatgcaatggaaattcggttcgtttatttctatgtattcaaattttcaacgccgtaatgaacaaattcaatgccaaattgctgtgccggcgccgctcttggatggttttcggaagagaaaaacggacagtttttcgtcctgaccctcaaacttatcagaaaaacagatcaatttgttcggaaagcgattaaagtatttcacttgatcgattttttctgattcgtttgttgggtcatagcaaaaagccgaaaattgtgcacttttttatgttttgtcgcccatatttattaaaaaagcgaataaaatttccttttcttatgaccacccaaaaaatggtgtgtggcacataaaatcgaatagaacttctggcatcaaatcttctcttgcctaatgatctgtatcattggaaagcccataaaaatgctatcagaaagtgcgctttttttctctttaaaattgaaaaaaaaatacaattttaaaccaaaataaaatatgaatgagaaaaaggaataaaggaggaaaaatttttaaattaataaatgtatggggtttacattaattaaatgaattttcgaattaataaatattattattatgaaaagtgataaatttaaatttattacttaattgattttataaaagtaatcgataacagacaagtgatcaaaatttgcttaaaaaataatttaaaaaatcaaaatttgaatttttgcatttgaaatttcgggtgaagctactaaaaaagaattttctatctttcaccgttcgagcaaaatgcttaatttttgaaaatttttgtaaattcaagtaaaacttagaaaatcataaaatttgtaaaatgcacaaaaattaagtcgtaaaaagataatttactttcaaaaaaaaattaaagaagtgcccaattaaaatttaaatttaaatataatttattgttgtttttttttgccacctttgctgacgacaatgagcttaaattggcagctgtttgtgcaaatgtttgggcttgttggtttaacagtaattgatgatgaagctcattctcgttgtatactgtagcatcgtgattctcaactttaaaaatacggtatataattatattaataaccatgttttgcaaaatattttgaaataacaaaaatttaaaaatttcataaaaaaaactataaaaatccaaatgctaaaataaaatataaaagcccaatcggttaccagcctattaattcattaaaaggtatactgtacaattataattgattgattgattattaattgattcaaatggaccgtttaaactcaaattagacccattttggctatttgtttcatgcgtttgtaggtcggcaccatcagcagcagttgcttctttgtcaccaattatgcgtaaaatcagcatatcaacctcaattaaaaaattcacattttttaaaattattttttaaattaaaataaatttaaccaaaacaatgaattgtaatgttaaatagtgaaacattattgttaattcgatcaatttttgtaggttaataaaagtcgtgctgacgcgttttataaattccgccacccatgcgcgttttataaatccgccaaaatgggtttgcgcgttttataaatccgccaccatgcgcacccccaccatgcgcgttttacaaatccgccagcgcgttttataaatccgccaatataaatcaatatgctttatataaatttattatttgttgtgaggacccttgtaagcaaaatatagcaattatttaccaactttaatactggataaatccttatataatattttatctgaataaagcatccgaaaatttttttaattgaatttgtacgacattagctatcacaaaaccttaataactatgataattaataaagtgttctatgtaattaatttaaaaaattcatatcaggtgatggtgcaaaaattttaggagatcagatctcaaaaaaagaaataaataccctgaagagctgctggaaaatttgataaaattggattgtaattaccctaaggactttattttagacattttgtaaaaaatatagctgaaattattgcataaaattttaatattattaaagatatatgcaaaaaaatgtgctggcggatttataaaacgcgcatggaaacaaaataaaaaaatgtgtaagatggcggatttataaaacgcactagcaccataaaagttattaaaggcttattaatgatagaaaattgtttgtttgttttttgccttaaaagcttaagttttttgttgaagcaaaaaaccctcaaaaatttgccacggcacgtaaaattctttcaaaaattattattgttggttggcactctgttgaccaattattaaatcacaaagttggcacacactacttcgctcaaattggcacgtgaatttttgcccattcggctgagtttttcaatggtccgtcgcttcatgtccgcccacttttggcgcatgtatgagtcatctttgccgacaaaatgtgccatgccattggccaccaattggtcacgaatgtacatccaacgaagcttcttcccctcatgcgttatttttggtgaaaactaaaaaaatggtaaaaaaataaatttatcaaataaattttgtttaaataaataaatacgtaatatttttttaaatcgaaaaatatccgaaactaacaaattaacttaaattcgtttcagcaatgcgtagtaacttcaaaaaaaaaaacacttttatttctgttggtgattacttttttttagaaaaaatgattttttatttaattttttttttggtgaaaactaaaaaatggtaaaaaataaataaataaaattgactaaattgcaaacaaatttatttaaataaatgaatagttaagaatttttttaaataatacgaaaaatattcaaaattaaaaattatcttagaatcgtttcaatcaatactagggactcaatttttaggcaaatattttagggtttttgaaaaaatccttaaaaaaatgcaataaaaacgaaaaatacactcctaagaaatggtccgaaattttttttagaaaatacactcctaagaattgaaaattttttacaaaaatttatccacaaaatttaatattttttcttaataaaatttttcggttttcaaattttttcttttcgaaaaaacattaaaatatttaatatttttattagaattgcaaatttttatgtgttttactacctaaaacgcgttaataaaaaaaacttttatttgcctatttttgcctatttgaggatttttgttcctattttgcgatttttttctgcctttttaggtgcctatttcacgattttttgtgcctaaaaatggagtccctaatcaatacatactaaatttcaaaaaaatcacatttttattaattttttggcaattaattttagaaaaaataaataaaattttatttaatctttaataaaacaaatatatattaaaaataacgaatttaatataaaaaaatacataacattcagaaataaatgaaatttatatatatatattactgaaatatttaaaataataattttcttataatatttttttcaaaaatgataaaaaaaaattttgaaatttaatttgggcactaacttttgaaaacagatattctcgatgtggtaaaatgcactgcacaaatgccacattatgtgcgcatcgatttgacatcttaaaaatataaaattccttatagcaattaaaatctaaaattaaaatatttataaaatttaaaaattaaagattattaaaacaattttttaaaataaataaaggtatgtattatttaatttatcaaatataataaaaaaaattttgttaaataacaattaaacagagaaaaattttcgtcaaagattatttttgaaattttgtgatcaaaaaaaaattatgattttcctaatgccgaaaacggaaaacccattggcgcgtcaaaaaattatttcaatagatcatgcaaaatatatatttttttattaaaaaaaaaatttcacgaaaaaatcaatacataaaataaatttttgtggaatttccagcgaagaaatggggaaatttggaaaataatggtggatgggtcgatgggggacccaccagtggtgagcggcggcacagctgaaaaacccagtcacgccaacacacaagcccatcccattaaatgggacgatggtggtggactgggtgaagacagagaaatgtggaaagaagaaatagtgcatgaatgttgtaaaagaagaatggaagagaaaaggaaaatagtgcatatgggagagatgagagaaactgagataaaaaaaaatagtgtgtatggaagagaaacgattgaaatgtgaaaggaagaaatagtggaagaaatgttgtaaaagaagaatgtaagagaaatgaaaatagtacataagcgagagatgagacaaacagagataaacaaaatagtgtgtatggaagagaaatgattgaagtatggagagaagagaaaaagagagagatgtaaagggagtatgtaagagatagaaatatggatacactttgtgagcaagacctttta

SEQ ID NO: 3450 - DNA, 2221 bp, Heterodera glycines
  unsure (1)..(2221): unsure at all n locations
aaataaaagaaaaaataaaggaaaaggaagaaaatatcagaaaagaaatgaataaatgaaagaaaaaatagcgaannaattggggacaaatcgaatcaaaatttataaatggattaaagaaattggactttataaatatcacaaatcaaaaactgatgaacaaaaactcgaaattgtgcaaaaattcattgtaatgaaaaatgaatttaaacaaaacagaaaatattcgcaaaaagaatgggagaaaaattatgccgaaatttgtaagaaaattggagttggctatgtaacaattaaaaaatggaagaaacattttggctttcgatatatgagaataacggaaaaagaaaaaatggaaaaaataaaaatttattggcaaatgaaaagaaaaaatccaaaaatgactgacaaagaaattgctaaaacattgaaaattcatcaaaatagcctccgaaaatggaagaaacagtttggaagagaagaaaaatgagaaaaaatatttgaaaatatgaaaattgattaaaggaagaaaagtttagaaattttttgaaaaatttgaataaaaaaataaaatcattttaagacgacaaaaaatgaaattattccaactattatttttatttatcaaagaaaaaaattaaaaagttttgacaaataaaaaaagaaaaacaaaaaatgaatgacaaaaaaaattgtaaaaatgttgaaaattcatagaaaaatcatgaaaatttgaaaaaaaatttggcgatgaacagatgatttagaagtacacaatttgatttaaaaacgcggtttattttttgacaaaatttttaatattctttcaagcattaattttgcgcttttttaatggcataaacatgaaatttaaaaaaactgattaattaaacaaatccaatcgagctttccataaactattgtcttagactttcattaggcacccaaataagcccaattaattaatggtaattattttatgcgagagtctttggtttatttcaaatgccgatagtttattccttatcattggctaaatttcccttcggcaaataaaatatcatttacaaatgagttgttgatgatcaaattttcagtaattaattaattttgaacctaactctttctattattaataaaatcgcaccaaattttaattattacacgttaaaggcactctaatgtataaatattaaaaatggtttataaattcgaaaaattgtttttcaataaatttatttttttgcttagatattaaatttggaaaagaaatattagttgatctctttattttattatttctttgcaattaaataggatttccttattttattcgttaattaatagaaatattatctttttcaatttttaatcagataaaattcataaagcgacacttgcgtcagaattaaaagaccaaaaaaaataagtttggggtgtctacaatgccttttaaaatgcctaattttgcctattttggactttttgtgcttaatgccaaaatgcctatttttgtgcctatttggccatccttttttggcacctattttcagggttttcgaaaaaatccttagcaaaaatgcaataaaaaccaaaaatacacccctaagaaacgacccgaaaaattttcaaaaatacaccccctaagaattgaaaaaattttcccaaaaattgattccctaaattttagttgtcgattctcgataagaataatttcacccacattacgaatgaatttttttatcatttttttctttttgttgttgtaattaatgtaaaaattttttttcatacgcttttgtttttggaataatctcatccctaaacattcattgattggattaattgtcctgctgtttttggtaatcaatttaatgctgcaatacattttcattttctccattcaaaaatattaattcatagctaaaaatttccaaatttctttcatcgaattatataaattagcattacaaaaaaattaattttgaataaaatgcaattatatattttattatttttatttttgattactctaattgatcaaattggtggaacagaaaagaaaaaattgcagcaaaaaacatttgaggaaatctttggagaaaaatgggaagaaaaagaagaagaaaaattgcaagaaaaaagagaaacaattgaaaaatattataaaattaaagaaaaaatcaagcaaaaaggaagaaaatactcaaaaaaagaatgg

SEQ ID NO: 3451 - DNA, 2278 bp, Heterodera glycines
  unsure (1)..(2278): unsure at all n locations
tcattaaaaaataacaaaaatgcgcgctattcacattccatatgatgtattatcagngataaaaagcaacaattgttcgtctttctcatcaaatggttcagcttcagaatatgagatgagttgcgtgaatttgcgcgccttttgttgttgttttttttattttggtgtgctattccaaaagagaaaagtgtacccatttttcatcctcctcccacctgctgctgctttcaattcccaatatttttttttgccttgcttttcttcatttccacttcctgttgtttattttgcttattcttacatccctccttttacagtatcctgatcagtgattgccctgcctaataccatctccgtctaccgtaccgtgccgtcctccgtcgcgtgtcatgcctttggtcggcgcctcctccgcctgctccttctcctcctccttcaactcctacttctcaccccgcgtctgttcttcctccatccccgcgcccgtcggcttttttaatgaaagcaaaatctttctttttaattgtatttaatttaaaaaaaaatcattaaagataatagtgcaataaataaaatattctttcagttaaaaaccaattaattttatctaaaactttatgagtaacctattttgccaaaatggataaaaaaataagaattttaaatcataaaatttttttgtggtaatgataattgaccttggcataaaaagcaaaaataaaagaatataagcaaaaaggaaaaaaatatacaaccaaagaatggcgacaaaattataacgaaatttctaacaaaattggaataaaccgtggaacaattgaaaattggaagaaacaatttggaattagcaagaaaagattaatggagaaagaaaaaatggaaatccaaaaatgaatgataaagaaattgcaaaagtgttgaaaattaatagaaaaaacattcaaaattggaaaaaacaatagagaaaaagaaattatttagaagagcgagaaatttaaataaaatcataatttaatttatttttgtcaatttttttccgtgcagggccgtttcgtaaaaaccgccaattttacagatttttctgaaattttttaagctaatagtaagatatcaagattagtttttaggttgtgtttaagaaaagttatgacagatttttctcgaaaaatctctaaaatttgccgttttacgaaacgcacatattgacatttttttacgaaatgatctacactatttttttttctatatataatcatttgaatttaaccacctataatattgtgtctattttaaaacatgacaaatctacacaatgttatttttgtcaaaattccgtataatgtctattagctatgagacaccttactcaaccggcaaaaaagtcgacttggagatcgaaatttcggcgaacgcccgaattgagggcaattaaaaataacacaataataagaatatttttgctaacaaaatcaaaaaggataaataaatatctgcacaaaaacaaattagatttaaaacacccagatctatttaaaatcatgtgaaaattaataagtcactaaaaacctaaattaataatttgagttattttaaaaaattataaataaataagcatttttaaaagaattaaatataatttcacgagaaggtccattgattgaagtacaaagcaactaaaatgttaaaaatttataaaaattatatttattaaatttaagaatcatttttgcaagatttttaatcattgccaaaaaatttttctgacgaattgtccactgacggattatccatgacggattgtccattgctaacggattgtccttcactgacggattctccggaccctcaatgaccgcggctccggacaatccgtacagaggcatccgtcagtggtcaatccgtcagcggacaatccgtcagtaagtggacaatccgtcagtggataataatccgtcagtaactaatccataagcaaatttattttttaaatacgcagatctatttaaaatcatgtgaaaattaataagtcactaaaaacctaaattaataatttgagttattttaaaaaattataaataaataagcatttttaaaagaattaaatataatttctcgagaaggtccattgattgaagtacaaagcaactaaaatgttaaaaatttataaaaattatatttattaaatttaagaatcatttttgcaagatttttaatcattgccaaaaaatttttctgacgaattgtccactgacggattatccatgacggattgtccatt

SEQ ID NO: 3452 - DNA, 3845 bp, Heterodera glycines
tttaatcagaaaaaaaatcatttaaatgcctcaaaaaaatgatttttttaatcaataaatagaaaaaaagaaattatttaatagaaaagaaattcttttaagcaaatggtaaggaggaaagaatatattatctttttttcttttttcaaatcaattttttgccgaagaccattagagagttgtgattttttcatgtgaataaaaggctcttaattgacttaacttaataatgtgaatttatttaagaaaaaaaaacataatatagattcatatttgaagataatcccggaaaatgaaattattgttattattctttttgattttaattctaattgccctaattagccctattggatcaaaagaaaaaaaactacaagaaaaatcatttgatgaaatatttggagaaaaatgggaagaaaaagaagaaaaagcgcaaaatgaacagaagaaacgggaaatcattagaaaatattttaaaataaaagagaaaatcaagcaaaaaggacgaaaatactcaacaaaagaatggaaaaaaattgaattaaaaataacgaaaaaattggggacaaatcgaaccacaatttatcaatggattaaagaatttggtcttcaaaaaaagaaaagttataaatcaaaaactgatgaacaaaaactcgaaattgttcaacgatttattgaaatgacaattgaatataagcaaaaaagaaaatattcagcaaaagaatgggaccaaaattatgccgaaatttgcaagaaaattggagtaagccgtgaaacacttagaaaatggaagaaacaatctggcctcacagtgatgattgttgagtaggacttcgattggtagttcgaagttcaaggctttgatgccttgccgaactatgcagctttctgcacagcatatttcgaacttttggatttcgggtggcactgttacgacgattcctttcgtgtaacaagtgaggccacactcatcacatttcccgattgggaaaccacttgcaaatggaagggcaagtgtcaggagggtcatagccaccactggaagcatttccagtagtttggcttttcttctggtgaccatttggtgtcccggctctcgagcgagcttgggatggttttcatttggctgttcagttgcagcaacagcttcagttcctgggtccgtcatttcaggacccgcttccaaagggaagatgcggttcactggacgagtaaggactgtctttcgtggcatgtcctttggtttcctgttgttggtccctcggacagggatttcaactttaacacttcggatggctccaggccgtccgtgtgtttcaacgattcgtcccattggccattgattgcgaggaacgaggtcctgagagattaggaccaccatccctttcttcggttcaccgaagttttggagtcgtgggcctttgtggtcccactgggctctttctctgagtaatgttaaatactcagagtgccatttggcccagaaaatgtcgttggcttcccggagtgcttttattcgggaagctaaacgtttgtgtgtggaggaaaacatttcctctgaatcaattgggtccgttgttgtttcccaattgatatgaatctctggttgtaagagattgatgggacgcagtgggactggtccatctactgcgtctgagaccgcggtaatcggtctgtaattgagggtggcctccacttcggccacgaatgtgttgagttggtcgaaggaaagaatccttcgacccaaagttcgtttgaagcagtctttgactagcttcacgaggcgctcgtaaaagcctcctgcccaaggacttatttgggcaatgaagctccatttgattctgttctgagtcaggaagttttgtacttcctgatccggacccggagcactgagaagctccagggttttctgagcgagtttgaaggtcgtggcgttgtcggtccaaatgatgtcgggttttcctcgtcgacttatgaatcgacggagaacattgatgaatgattccgatgtgaggtccaatgttgcctcaaggtagacagcgcgcgtcgcaaggcatgttatggaagaaacaatttggaattagcaagaaacaaataacggagaacgaaaaaatggaaaaaatgaaaatttattggcaaacaaaaaaagaaaacccaaaaatgactgacaaagaaattgcaaaaattgtgaacacttctcaacagaatatttccaattggaaaaaacaatttgtggctgaataaaatcattcgattttagaattaacatgaaaacttttttgataaattttataaaatcatttaggtttgctgtttttttcaaatgtcgtaaatataccgaattattaaataaatatttaaatcaaaaaatcgaattttccgagagaattctaagagaggcttttggagaaataaataaattaaaaactgataaacagaaaactgaatacgaaaattcattaaagcgaataatgaattcaggcaaataataaaatattcaaccaaagaatggcgacaaaattatgccgaaatttgcaaaaaaatcggagttagcctttttctctaatgagttaattttttttcaaaatttttccactttctccttaattactccgattttaacccatttgtgctgtcttaattaatatataatacatacatgattaaatttggaagttgattccatgctggaactttcattttataaaaataattttatcaaaaaaggaccaaatttaatataaccaaaaaatgtattagtttgaaaaatagtttttaattaaaaaaatggatttgtatagaaaaataaaaatatgttggatttttgattatttatcgttttaaattgcgaaaaagcattcgtttttctgatggatcttctcaaaattacatttttcccatttaaaacactccttttttgactaattttcaagggtttcgcaataatttatccattaatttgcggataaaataggtataaaaaggtaccaataattgttcaaaatgacaataaaaacaagcaattttcaataaaacttattcataaattaagaaaatttactttttttttaaatgagcaccttaattgaacaattttgaatgcttatgcatagctttgtaaaatttctgatttcgtagcccatggagtccacaagttgttaattagttaattacacgtaatgaattaatttaatagaataaaatatgaataaaattattattatttctttgcaattaagtaggatttccttcttttatttgttaatcaatagaaataagatctttttcaatttttaatcagaaaaattcatttttattcatttatatgcctcaaaaaatattacgataaaattgtaaaatttcagcgacagttccaggctttatttggcttgaagggtgtgcaaaaacccatccaaattttcagttgtccgtaactgactttggtttaaatttaaattttattttttcttaaaaattttacgactttcgaataagcatttaaacattattttaacaatttgcaatttattggtaagtggaaataaaattattaatatttttattaatttttctttgcaattaagtagaatttccttattttattcgttaatcaatagaggtaggattttctttcagttttttaatcagagaaaattcatttttattcatttatatgcctcaaaaaatgaattgcgatttaattgaataaaaaaataaaatcattttaagacgacaaaaaatgaaattattccaactattatttttatttatcaaagaaaaaaattaaaaagttttgacaaataaaaaagaaaaacaaaaaatgaatgacaaaaaaattgtaaaaa

SEQ ID NO: 3453 - DNA, 2830 bp, Heterodera glycines
  unsure (1)..(2830): unsure at all n locations
aataaatgtgattttattttatttttcatattttaaaaattttttcgaacttttgcatccgtatgaaatgacatcaaaagggttgtacagaatttgtggcgaataaaacaattcgaatttatttcggatcttctgcattctttcacaaatgcttggcgatattcgctactaaacatttattgctaaattaaaattttaaatttaaaggcttacctcgtccaaaaaagaatcggcgcatttgaaatgcaactaatgtttaacaaaatgccaaaaatttgattttggttccaaatttcaataatatcattgttcaacaaaggaattatcatggtaatgtgaatcaatttcaaaaaataaccgccaacattaacagaaattataaaaaataatgcacggaaaatgcgaatattcaattgattggaatttgaattgggctgagctgaaaatatttaattaaaattgtagaattaaatttattcaaacaattaaaatcgtcttttctgaagtaaattaaaatcgtaacaagcaaataaatgagaattgttgataaatatatcatattcataagcgtaggcaaaatagaatccgtcaaattgctgctgcactgatacttaattaaacactaattagaaaacaatttaaaattattttttactgaggctattccaatgtcattcattgagccagtgactaacgtttcgccagcaacatcacaaatttgtgaataaatataaattacattgattagaccaaagatgggcagaaacagtgcataaattaaaatactttttgtttccctaaatgaattttaaaaaattattaagttttatgtttatttatttgttaccgtaatagaaaaagcacataaaataaaaacaaaaacttcattaattgttgttgcctcagtcattcaaaatttaattcaaattttaagttaaattgcggaaaaggacttcggctgttaaataaaataatactatttgtttaattaagattttagttttcataatactttttatgtacaataaaaaatattcccacgcaaataaaaggttgaaatacaattcaaatgtaatgaaagaaatgttgagagtgaataaaagatgaaaaaatttgtactttctgttgcacggcaatggtcaattatgaatacatgaggaatgatgatttgcacaatgaaatatgaaatgatgattagaaaatgattggcttttggtaaacttatatttttataaattttaggtacttttttgttcaatttcgttagcacctgcgtggtccagtgggttgtgctcattttttggatttttggaaattgaatcaaaatcaaaaaaaccaaaaattggtctcaaaaaaattcaacgattttaaagagatttttaagcaaataagaaaaatttttgaaaaaagtctcgggtttttggggtctcggggtcaagtctcggtctcgagtcttgggaccatggcattttaattctaataaaagtgattttattttatatttcatattttaaaaatcttttctaaattttgcatccgtataaaatgacatcaaaagggttgtacagaatttgtagagaataaaagatttcggatcttctgcccttctttcacaaatgcttgacgatattcgctactaaacatttattgctaaattaaaattttaaatttaaaggcttacctcgtccaataaagaatcggcgcatttgaaatgcaactaatgtttaacaaaatgccaaaaatttgattttggttccaaatttcaataatatcattgttcaacaaaggaattatcatggtaatgcgaatgaatttcaaaaaataaccgccaacattaacagaaattataaaaaataatgcacggaaaatgcgaatattcaattgattggaattcgaatttggcggagctgaaaatatttaattaaaattgtaattaattttctaaactaaattgccttttctgaagtaaattaaaatcgcaacaagcaaataaatgagaatgcatagattaaaatactttttgtttccctaaatgaattttaaaaaattattaagttttatgtttatttatttgttaccgtaatggaaaaagcatgacatcataatcattttgtaatccattgtcccaatcaccaccccctaatcacatatgacataaccaattgttgccttgggggcggtccctttaatccaactcttttccctttccccactctcccccacgttcagtctctgtcccgactgcgaatcgggaagaggcggtccatccaattgtataatactcttgaataaatgattgttaacaacaccgctaccaatttgggaatgataatggacccgcctggatcctcagtattcatggaggtcccgccctaaggacagagactgtatatgtacatactgtatcatacaaaattttttattaaattaattactggaaaatataaaataattataaaaattttttcaacaagtccagccaatgcaaaagagaaaggaagtgaaattaatggaaaataatgacaaaaagtgagagagcgaaattgtaaggaatgaaaataatttaaatgccggaatggaatttaaaaaagcaagtgtttaaagcaacaaattgccaatggcaaacatccatcattgccaagactcaaacaaaggactccgaaacaggctaaaaaaagacangaaagggtttatcaattanattttgccgatgagagtgctcacaatagccaatgatgaggcattcttacgagccccagagcgcaaagagtggccaaaaatggttttttgttgggcaacgaatgaatcgccgaaggcatgctgagtgaaa

SEQ ID NO: 3454 - DNA, 2086 bp, Heterodera glycines
actgtacattttgatcatgcttattctcggcattatcaaagtgacaaaaaaaatcgggtgtgtgtttttattttttggctcggaaataaaaaagcaattttaaaatgattttttagtcgcatttgttaatgatcaccgaaattcgtcaaatgtgacgagacatgacgaatcatcagcggcgatgctttcatcatcagaggcaccacattcatcagcggcagcgagttcatcaacagaaaaaaacatttcaaaagaaaaaaatatacgtaagtgcgggccacagacaattggacagaaatggaaatatggacagtgaacaatatttaaaaaattataaaaggcattagcaaaaaatgatataagttttttgaattcttagaaaaattggaatttttttaagtaagctcgacggttatttgataaaaaatgactaattaacatcattttttaaatttttctgtcaaagtgtccggattcttttagtttccatgagcttgtttctatttctgattggcaatgaggggatataaaaaaataaaagaaaatttgaacttttttggttggcttacacgaaaacgaatgttaattttgaagaaaaacagaccattcttaggtcaataaatgctacaaataacaccttaggtagatatgacgattttgtgaaatttaagaagcattccaaaacagattttctttcctttataaattaggtttttagcaattttcttttctcagtttttaaacccactaaccaattatctctcattaagaaataaaactcttccaaaagttgagcaaccgtcttgctgtttccaaaggtcaatgtgcaatttgtttgggtgatttagtggatttagaggccaacacaactgtaaagcagttgccgtcgtgtaatgtaaataagctttaaaccttttaattatttaaaactaatgaataataaacatcagcatgaattccacaacgtttgcatggaactatggtaagtaatgcatactgtagtacaaaacgtatttgttcaacagaaatttaaacattaaaccaatgcttttatgcgtaattaaggctcctaaccaagggcaattgtccaatatgccgtgccgaaatttttgtcatcaagaatggcaaaggtaagcatcctgcataaaaagttcgaaaacaggttgaataatcccgcatgcaataaaaaggaaaaatacactgctacgaatcgacccaaaaatttctgaaaatacttcgctaataaatgaaaaattttctcaaaaattcttctccaaaatttattcaattattttcatgataaaaattttacatttaaaaattatatatctcaatattgatttggcttaatattgttgacttttgaataaaattttgccattttacaccctaaatttgaaactttttagcagctattttcccatttttagcacctaattttgggttttttgaaccgaatttactgtccaaatgtccgattacgtttgaaagttagaagaaatacggataaaaaccgggtacccgaccgggccaggataccccgacttttccaagacctggcctcagtacccagacccgactttttgaaatccaatacccggtacccacccgaactggtaggtccgagtccaaccgggtcgaaaaatacactgctatgaatagggtttttgattgtttagtaaaattaaaggaaagaaaaatggaaaaattattattacttatttcaaaaactttcttgctgttgtggcctagtgttattatctttagtatacaaagttgactaataaagattctagaatttttacaacatttccgaaagaaaattaaaaattttttttgataatactccgtcatatgcccttagcctgagacgccccttgtgcatatgtatgatttggaaaatattattgaaattttttgtgccttctggagttttttcaaaaatattattttatttgctatcgaatgtttaattacaaattcttttgtaaaatttaattattttttaattataaataatttttttgaagaccccagttggactcggtatctttactagtgtcgagagtctcggtctcgggttgta

SEQ ID NO: 3455 - DNA, 1701 bp, Heterodera glycines
  unsure (1)..(1701): unsure at all n locations
aaatttgcaccaaattattatattttttcctttcaaccattcaattcaaatgatatgtttttgcccctctcaaaagagagagacgacaaaagaccaacgccggagagcaatgatcaggcaaattttggtgaattgtcctagcctaaagcgctaaggcagggactttagggctgattggttaataagctgaacagaaagtgattaatgagaaaatgtaaacgaataattagtggccagtcacaaggtcacacggttggccaacccaaaaataaaaataaatgcaagctaattaagctaattaagaaacaatgtgatgtgcacaaaataaaaaaggatgattaataaatgtgacaaaaaatgtgattaacaaaaggatgactaaaataaaaggggttcagcttaacctagtcagatcattttcttcgactccaatcgtcagcaaaaatcattctaattaaaaattaataataattataaatcacgttttcgcacaaaatcaaatcaaattaaaataaattaaattaattaagcaaatccaaaaacaaacaaattgcactcagcacttattaaagcactttctacaattgtcgacaaatcaagcagtttcaaacagaagtgggccgaacagaagtgtgccgttgtgtcaaacagaagtgtgccgttgtgtcgaacagcagtggccgttgaaaacgttggtgggcgaagacatttgaataattatcaaaataaatacataaaaattgtcaaaactgagtcactcatcagtccctgaatatttggaaagcaaatttaaaaataaagatcaaagcaaagccgaaagggaaaaaaggacaaaagaaagagggttaaaaaggagagaaaaagagactttggaaagtgaaaaagataaagttcacatcggaagaaaaaaacaaaaaatggtggatgttgatgatttagaagtgaaatttgaggctttaaaattaaaggtgaatgatttggaagataaattggcaaataaaccggcaacaaatttgccagcgggggtaaaaacaccgaaatatgatgctacaggcgaccttttcaaattcttacgagaatttaatttaatggccactgccagcaattggcatgccacggactgcgtccgaatgttcccattattccttgagggagaagccaaagagctttttctaaatattccgccagataaaaagaaaacatggcgagatttaacaaatgccatggcggatcaaacaaaaaagattgacggtccaatgtgggcaaaaaaattgttggccagagcaaaaatgggccatgaaagcataacagaatatgccaataaaatacgtgagttggtggaacaggcttcccccgacccaaattacacgagcgaggcccgagaatgtgagagtgtgcattattttttaaatggacttccgactttcctaaaaaggaaaatattttttatgaaaaagccaaaaacgcttgttgaagcaatttcaatggctaaagaagttaatcaagcaagggaagaacttgcaaatgatgaaaagggagacgaaattaaacagcaaataaatgagataagggagcaaataagtgtaatttcgagtcaaaataatgggaanaacgaaaatcaaagagaatttgttaaccgttcttggcgtaacattttgaaacggaaattcttggatcgtggagagaaataatacagaggag

SEQ ID NO: 3456 - DNA, 2847 bp, Heterodera glycines
  unsure (1)..(2847): unsure at all n locations
tcccgaaaaacgaaaaaagcagcgggaaagtacagtaacgctttttcttcctattcgagatccaaaaaaatttctcagttatanaatgttaccaaaaactgacaaaaaattgcnactggcagtctcttattcttttggaaagacataaaaagccaagaaacaattgttaaaggagtaaattttgaaaaatgtcatgattttaaaagaaaaattgatattcttatgaaaagaaaaaatgaaaatttgtgggctacggataatcccgaaaaaatcgaatatgtttggtcaggagaaaaatgtacaacaacaggtcaataattttattgaaaaaggacatggaggaattttggatttttacctcattacttcttttggtcataaaatgaatccatacagaggatgggaggaaatgaacagtcaaacatttatttgggagattcccgagccaactgacacttattgggccacccactttccagtgggcaattttcttgctgaaattacggatgatgcaatagtgattgagagtgagcaaagtgtgttctatttcgaaaaagaacatccggaagaaagagaaggaattattggcataccggatgacgcttttaaaatgacaaacgatgcatttataacaattcaagtaaaacaaaaggcaaaaagagaggcaaaacaaaaaattgagcctaagaaaaaagagagaccagtaaaacaggaggtggtatttttcaaatttcgacaaaataagggaaatgagagtgttgtaaaccctaccattcaaattacaagggaaccgaacattagccaagaggagattaaaaaagaaagagaaaatgcgaaagaaattatttcagaaattccaacaatgcctaaaccggaccaaccaaaagagaccaaaattgcggtagcacctacaaattttcccataacaactacagtaagaaatgtactaactgaacagacaaaaattacgacaagtacgaccccaaaaacaaaaatggcggcagtaacaaaagcgccaaaaacggtgccaaattcaaaagttgaaaaccaacctttttcaaaaggttggatcaaattaaaacagaccgagcagaaatatatgataaaaggagtgaattttggaaaaattgatacaaccataattccggttaccaaaacagctaaaaatatggaaaataccacagcaacaacggccaaaactccgttaatgagttttactacaataaaaccaaaaaaggaaaaaacacccaagaatatttcgaattccgtttttgagaatgaaaagtcaaaacagggaaataagacaaaaacacagacaaaagggacaaaggaagaaaaacatcccaaaatggtaaaaattggcaaagaattagacggaaaaacaatgcctgaggaggaaaaagtcccaaaaattgtgaccaaccaaaaaccaaaagaaaaaggagtaacgaaaaacattaccacaacacaaacacctaaaatgaccacaataaaaacaatttcaaccacaactcctaaaccaaaagtggaggagataaaggcaaaaaaggcattgccgaaccaaaatacaacactttcaacgatttctgttacaaatttttctaaaaattctgaaaaggaactaataaaaactgaaacaattgaaattaaaaatgaaagcggagaaaaagacttacaattccgaaaattgtcagaaggcgatgaaaaagaaagtgacgacgtaatttttgaaaaagtgaaagacaatttagaaaatgaaaatgagtcagatgagtatgaaaatatggaaaattctgcagaaattgaaaatgaatacgaattggacagaggggaaaatcagtttgaatttatggaaattgagagaaacaaacgaacaacaattactaccccagacgctaaatggctcagtaagcttaagaaaagcgaaaaaaggataaaatcagggcaagagaacaaaaatttaaatacgcgtgttaattatgcactttaccgactaaatgaggacagaaagaaacagtacgaaaatatttttctccaagcctgtgaaaacacaaaattccaattacaacttgcaaaggcaatattacaaataaacccaaatgagggtgtacggaaaatttttgatcgggatgatttagtcgcccgatgggttggtgaaaatttggaagttgggttttgtgtgccaataacaccggaaaaaatattttggagcaaaaaaattgggaatgagtgctacgaatggacgccaattttggcagaaaatacaacttttttcgtaaagccagggtcccgggaactgagcattttgggtaagaaagttggctgtgccgaaatggaagaatatgttatgaaaaatgacacacaaaaagaagcaataacaaaaatcagtacaaattttgagaaaatccgaccaaaatacagaaacattcaaaatcctttggtcttaaaagcaggaactctttacgagtcggaaaccaagcgaattgaaacagcaatgttggaatacagggcaagaatgaatactttaccttctgcaactctgcgtataattcaaaaaccgaacatttctgaggtcataaaagtaatcaaagaagaagcaagtgaaaccatggaaatagtgatgggaaaaacgggaaattggttcgaaatggttaaaaatatcccagaaaaagcggaggaggcagtaaattatttaaagggcgcctcatttttgcttattttaatacccattttaattttgttggcactaattgngtatgtgatggtaaagtaccgattgattatttttgctggttttcgcgcgggaagattcttaacagaataattggacaaataattgaatgaaaa

SEQ ID NO: 3457 - DNA, 1352 bp, Heterodera glycines
  unsure (1)..(1352): unsure at all n locations
ttttcttggtcaaaaaaaacgagcaacaaatgtcatcccganccaagcaaaatgaatggatgatcagagaaaancaacaaaaaaatgacaaacntcagaaatcacacattttcatcgcacaaaattctgagttcaattttgcgttggttcgctaaaattaattaaataaatggtaaaaatttattgtatttcaaattaaaataaaccgttttttaatgaaattatgaaagttttgcgcgacaaattggacaattgttgttctgtttaaccctaaatttgtaaatgttaaagttaaagaaattaattgtcctttcatttaccaaaaatcaatgcattccgagtgaaaattgtgctaaatgcaaaattagtatttaagtatagtttaaataaatcagcaaaatagaaattgcggcacaattacaattatttatgcgtccacctcaatacggcactcagtttgctatgttccgattggcttatatttgttatgagttatgctttatcattacatttcggatagcgaacaattggaaatttattcggaatataatttgtgtgatatgacgggtaatttggaaaaacaaattaatataatttaaaaaaagccttaacagcaattgtgaggcattttgtaaacactcaaaagattaaattaaaatatttaaatgcgatttgattgaacgcataaaaaaatgaataaacgcataaactttacagtagtaaagctgaaatctcaacaaaagaacaaactttcaacaaattaagtgcctctgctacaatagccaatgttactaccgtatttcatctacgcaattcctaccataacttttgcgttgacaaatttacaatatttcctaccaaaatcacttcgtacattagcccctattcggcttaaacattcacctgacatggcggaatctgacgaatcatctgtccctcctgataagcatccaagcaaatcgcacattcgtctccgttggccttaagcatttcatattgagacaaacgactcagagccttcgtaacttaaaatgaattacgaagcaacttccaaaaaagattttataatattccaatattatcagacaacttatctcggtaaaatatcagtgctggcacccatacctatttgattaagaatttttatgcctaagaatagaaatgaaaattttgaaaatttacggaccaataagctaaaaattttgaaaataatcaaatatggtttttaaaaaaaatacaaaataaaagttaaaatttaatatgtttttcgtgcgtttcaggccttcgatagtccagcatttccgaattgttagaaccaataaaataaccaaaaacccaactttttttgaggc

SEQ ID NO: 3458 - DNA, 1564 bp, Heterodera glycines
  unsure (1)..(1564): unsure at all n locations
agcttctgcttaatncatcgcttttaaacatcaaaagcatttgaatgataccaagttttaagaaattggccgactaaaaaagttatggccacatcattttaaaattgtacgagttgcctttgtacgagttgccattgagccagtgaaccctccgtattgaaaaggtgtatattaaatgtaagagaaagcgtaaagtgatcggacaaagcattggtcacgaaaggggcggaaataataaatatgaaatttactaaggaaaatcagaacctctcttacattatcaacaaaaattgcttctcaacttttatcacattcatttgtatattaagaaggtttttaattcctattatataaaatgtcagtgttttcgaaagaaacaacagattatattccacaaatcatttgaatttataacgctcggatcaatcgtcggttccttttcgttaagccccaacttttgaaacttttgaaaatgagatggtagacttatttgaagacatcgaattctgagaagttgaaaactgctggaaggtctgatgagttcatttgactgattggtccaagttcttacttaattaattgctgctttttctgaaggtccccgttttgcattgatttcacttttaattacaattcagaaaattctggtaaatgtccaatgggtttaattgttaaattagttcaaattttccgcttcatttctttatttggaattgttagtgatcacatttacttgaggtcatcagtatcaattcttgtaaaaagaaatgatttttactttccaaaatttgcacaacaataaaaacaaaatatttgctgcaaaaaggactaattgcaagaaatttacatttttttgtgtttttttttcttctttttcatcaattttatttatgtaaatttgaaaaaaacaattctctagtcagtatacatcggaaaagattttagttaaaatgagtccctttgacaatacaataaacattccttggattttggcaagcttattttttgattttggtaaaatttacaaaaaattattattttttatttttctgaaactttttttttgttatcctctttttttcttgctttcttcatcattctcctctctctgtcggcatcgtcggactcaattccctacttttttttttaaatttgcacaaaaagccacaaaatgctcattttttgcataagatttattaacaaagcgaacaaaattttaaattaatccccagcgtttctatcggcaccgtcggctcaaatattgttgggttaaaatgctttgcttttttggttcactaatatgcaaattgaaagttagttttaaaaatgtgcttattttgacaagctcatttcaaatacaaagtaaaaaattaataaaaataaatgaaaattcatggtaaaatctacaaattttgaaattttaaaacatataaagcttaacgacggtatcttcgtataccttcttgtagcccattctttctttctacaaaatgacttcgggggcattcatacaattattatacactcttacataaacaataattgtttcattctgatcagccag

SEQ ID NO: 3459 - DNA, 3844 bp, Heterodera glycines
ttaatcgcttagcttctgcttaatcattcgtttttaaacatgaaaagcattcgaatgataccaagttttaagaaattggccgactaaaaaagttatggccacatcattttaaaattgtacgagttgcctttgtacgagttgccattgagccagtgaaccctccgtattgaaaaggtgtatattaaatgtaagagaaagcgtaaagtgatcggacaaagcattggtcacgaaaggggcggaaataataaatatgaaatttactaaggaaaatcagaacctctcttgcattatcaacaaaaattgcttctcaacttttatcacattcatttgtatattaagaaggtttttaattcctattatataaaatgtcagtgttttcgaaagaaacaacagattatattccacaaagcatttgaatttataacgctcggatcaatcgtcggttccttttcgttaagccccaacttttgaaacttttgaaaatgagacggtagactgatttgaagacatcgaattctgagaagttgaaaactgctggaaagggtctgatgagttcatttgactgattggtccaagttcttacttaattaattgctgctttttctgaaggtccccgttttgcattgatttcacttttaattacaattcagaaaattctggtaaatgtccaatgggtttaattgttaaattagttcaaattttccgcttcatttctttatttggaattgttagtgatcacatttacttgaggtcatcagtatcaattcttgtaaaaagaaatgatttttactttccaaaatttgcacaacaataaaaacaaaatatttgctgcaaaaaggactaattgcaagaaatttacattttttgtgtttttttttcttctttttcatcaattttatttatgtaaatttgaaaaaaacaaatctctagtcagtatacatcggaaaagattttagttaaaatgagtccctttgacaatacaataaacattccttggattttggcaagcttattttttgattttggtaaaatttacaaaaaattattattttttatttttctgaaacttttttttgttatcctctttttttcttgctttcttcatcattctcctctctctgtcggcatcgtcggactcaattcccgtacttttttttaaatttgcacaaaaagccacaaaatgctcattttttgcataagatttattaacaaagcgaacaaaattttaaattaatccccagcgtttctatcggcaccgtcggctcaaatattgttgggttaaaatgctttgcttttttggttcactaatatgcaaattgaaagttttttatcgagttttaaaaatgtgcttattttgacaagctcatttcaaatacaaagtaaaaatgtaaaaaattaatacaaataaatgaaaattcattgtaaaatctacaaattttgaaattttaaaacatataagcttaacgacggtatcttcgtataccttcttgtagcccattctttcttctacaaaaatgacttcggggcattcatacaattattatacactcttacaataaacaatatttgtttcattctgatcagccagcccttagattcgaatcaaatccacacagtttcgctcatccactctctgatagccgggcaaacagtcgcatttgaacgagcccggaagatttatgcaaatggatccgacgccgcatccaccgagctgttaaagccattttaattttattttaaatgaatttcttttaaatacatttagaaagttatgtattttctcttaacagaaaaagctcttctcttaatcgacgagtgacctaattatttaattgcctaattacctgttttttaattggttcattaccggttctcttaattggcttctcaacattgtctattttttattcgctgattgcctagtctcttaattattagctgtatttttaattggttcattacctgttttataattggctcattacctgttctcgtgccatttcgtcccacaggcattcgtccacatcgtaacatttgctgccgttcccgaaaaagccctaaaaattctcccaataaatagcgttaatctgtatcgatgaccattttgcattgacaaattggcgcatggcgtcccgacaaacatttggcgttagggtcacaaattttacgctggctgtcggcacaatggtcgacattcacacagacggggcaacaatggttgggcaatgtctcttgctcggcacagtccaacgggggacagagcgcggcatttctaacagtgagtggtacggtagtcacatagttacggtaagtaacgttaaaaaacgtaaattacccgtgcaccgttcgaattttatttaataaaagccggcaaattatcggccggtttctggtaaaacctcataacagatttgaaatgttaatgacccaaataatttttttaaatgataatttagcgctaaaaccttctaaattaataattggctcaagtctcagtgatcatttgccccaattttaattcactttggtccataattagtgtggcatatttgaactcgaaattcagaggccaggaataaattcaatttcaaattctcgcgaattcttcacctgaattcgcagttcattcgtccgtcgctgcactggcaaaatacgcacgactttggccaaaaagaggccccactttcgtatgtttgaccattgtaaaagcactgaaatttaaacttatagccaggccagatttttctggctaaacctctgaaatatggggaaccgcccacttcggcgccggccttttcggcgccgttgctaacaacttttttcctgatcaaccaaattaaaaatttttgttatcattcgatagctcttcagattctctattagcctgtaaaatttcaaaaaatttcgtcagtttacaaaaaagttatggccaaaaaacctcaaaaattaactttttcttggctttttcggcgccgcgtggcataacttttttatttttgaatcattcatttctatttttacatgtaaatatagagcacacatagagctttcaaatgatgccagattggctaaagctaactgacaaataaaaaagttatagcatttcaaaatttgcggcgccgaaatggtccgcgccgaagtgaccccgacccgaaatatgcctaaacaatttattattgatagagccaattggctctaatatttaaatattacctattcatttctaaaaaaagccaaaatatgtgaaatatgcatttttgggaaaaaatttattttatgcgccaaaaatccctttaattgattattttccataaaaatgcgaattttagcttcttaaacctattaaattaaaatattccaggtttatttttcatttctttgaatgaattttgtcagtttagcttctcagcgaccggaatgatttaagatgatttgaaagtttttaccagaaaattttgcaaggcttttctttcttcgccatgacttgcttttttaaatcgtctctttcattgagtgattttttttttcaaaaaataaaatttttaaaaattataaattccacaattgagatccggtttacatgcagtcttggtgttcaatgttactcacttttttcccacaatcgggacaacatttgccctcccgtttgatcggatgggcacaattcaatggggcacaaccgatcgggccgcactgcgcctcgccatccatgccgcagtggcactcacgacagtcggccaactgctggacgtgctgtcctacggcatgccatttaccattgatctgtgcgaaaattgatcagttagtgaattttactgttcaaattaagaaaaaaatatagaga

SEQ ID NO: 3460 - DNA, 788 bp, Heterodera glycines
aattagcgcattaattagggaagcgacgaattttttgtgccgctatttgcaataaaaggttaaattgaagtggactctttcttgctcgtctgactttgcatcccctctggtgcagctccacccgcttcactctgtgctcaacgcgtgccaatgccgcgtcccaacggttcagtcgctgttcaatgcgcaaaatccgttcgtccgtcgcatcgtttacatttgttttattcctttgcgttggtgccaaaattgacgtgtttttgtgcccgattttcatcggattgccatcagcgacccgagtttcgagatgggcacaaagctgctccaacggcttggccgaactcgagacaaacgaacgcatttgcatgtgcccccctccatggccattttggggcgccgatttgacaccgagcaaaacattcgatctgccgaatggaagagacctggacaaaagcgtacaaaacaattcaattataaattaattaatgccaaaacctatgcatttatgatttgtaattgacattaatattatggactcattaaatgtttataattctgcttaatgatgctattataaactaaaaatactactattaaaatgatttaccatatttgcgaattgtcatcgtcctcaacccaaagtaaacgatgacaattctgtgctacggccaacagtttcccgtcaaatacaaaagtgattttgtggaattgaccatttgaggtcaaaaaaggagtttgcagagtgattagtttatgtcgaccatcgatcaaacgaaactcgagaataa

SEQ ID NO: 3461 - DNA, 1606 bp, Heterodera glycines
ctttgcgttggtgccaaattgacgcgtttttgtgcccgattttcatcggattgccatcagcgacccgagtttcgagatgggcacaaagctgctccaacggcttggccgaactcgagacaaacgaacgcatttgcatgtgcccccctccatggccattttggggcgccgatttgacaccgagcaaaacattcgatctgccgaatggaagagacctggacaaaaacgtacaaaacaattcaattataaattaattaatgccaaaacctatgcatttatgatttgtaattgacattaatattatggactcattaaatgtttataattctgttaactcttaatgatgctattataaactaaaaatactactattaaaatgatttaccatatttgcgaattgtcatcgtcctcaacccaaagtaaacgatgacaattctgtgctacggccaacagtttcccgtcaaatacaaaagtgattttgtggaattgaccatttgaggtcaaaaaaggagtttgcagagtgatcagtttatgtcgaccatcgatcaaacgaaactcgagaataatcttataaaaataaatttatttcatcgaattgatttttttaatttggcacttcatttggcgttgtgatggttgagctttcaatgcgaaacagtaaattttggtcgccatctttgaggttgaacaaatcgaattgagtgaaatttgattgtcgaaagtcaaattcgagggataaatttcttgccataaataattcagtcaatttagccgacttaaaaaataatttaattttacaatataaaaataaaaaacatttatatatacattttttaatcaccaaacatttacaaaattaaacaaaaacaccttcaaatgatccaacagaaaatttccgcgtccaaactgagcagagacaacaagaaatggaagaattgataaaaaagaggccatcacgttaaaaagggattatgtcttaattcattctgcctgatttaattaattgttttaatcacttcacattttattttaatttggagcgaattttggcagccaattgctttataggacagcacacaaaatattaattggccacatctgtcggctgctgatgatgaatgacagcagcgaatgtgttggaaaagcgagaaaatgaaggaagggaaatgagggaaaagccgtcggagggataatccggcaaaagcatttcgccggaggcgaaaagccgcggcaaatgcctttggggcgaaagattgacacacgacgggagaggaaatgaatggaggcgactcggggaaatgtgccaagagaaagaaatgcgccgattgaaattaaaaattggataacggacgataagccgaataaacatggaaaaagtgtggtcgaaaagaagtgagatttagtgacgccaataataaggcaaataaataattagcaaattcatttattaatttcgtaacatggacaagcagaacgacgacacatcgtacgagacagactttttcaaaactaataaagtacaaaaactaaatgggaaatattacaatatttttattcttgaaaatgtattaatgaaacttcaattttaaataagatttaaatgattatt

SEQ ID NO: 3462 - DNA, 1545 bp, Heterodera glycines
  unsure (1)..(1545): unsure at all n locations
ggttatggtgtaaatatgattttataataggggccgaaatttcactttttcacccagcgacacctaaaccaacaattcatcttatgtcaaaatcgcaaattttgtcattgtgtaaatctgtaaaaaattgcactcaaatttcaaaattttcccggcggcgcctacgagcacagccggagaaaaacccgttgataaatcaacaaaaaatttacgatggtgtccagggatggcgttcctaggaccctcaaattttaggaaatcagaattccgtgccatcncaggtggtgtctatcggcatcaccttacggttccttaaaaatttttacgacgaagcgcaaaaaaaaagtaaaaagttttttggagattttttaatttctcgaaatttttcgaaatttccaaaatccctgggatgccgcagattttaaatgcgggacttgcgggattaatctcacgggatcacgtcccgctaaaaatttctgagttccaatcacgcagcgggatccgcaaacttgaatttccagtctctaatatttataatttccctcttgaaagattattttattttattatatttttaagatggctattctcctcccattcgaatattttgtggtacaaaaagtgtacacatttgcgcacaaagtgccacttgaaaatttgtgccaaggaaacaaccaatgcattttaaattattttgaatcatttactcagaaagaaaacgaactttcaaaaatcattgaccgttggtttaatgcaaatgaatttgcgtattttacagaaaaggttaatttgtctttaaattaaaatttattataaatttaggacaatttttttctgagtgctattttgaaagagttggtaaatgaatttaaaatcagtgaaaacaatggcaatagaattggtggggattatgccaatttgctcggcattttcagcaaagcttttattgaagaaaataacccattgatgaatattgtcaagttgagattggctgaagagcaaatgatcgacattatcagtgaaatgtgccaaacaatcaaaaagataccgaattctaaacagtttttgattgagcaatttaatgtatgcccttcaaaatgctcaataattggctttctttgcctattttgcatttttaattattatgaatatattattttttaaatagtttactattttttaaaaaacaattgattaaattttatagccaaattcttaaagtcaattaatttttagattctcgaattaaaaaatttctgtgataaatgggcccctgtacaccaaaaaatgttgcacttcagtgagccaaaaatcgctaacaatgcgcttgggcattggcttcggcaaaatgtcaatgatgggaaagaattggcggacgaagagcgacaaattgtcaatttttggatgacagttttgagctcaaaaatgcattacctgtgtagcaaatggatgccaaatgatataattatgctaacaaatattggttaattttcaaaattttcatcatttaataaatataaatttatttatttaggaaaattgctg

SEQ ID NO: 3463 - DNA, 1359 bp, Heterodera glycines
ctcctcgggactttgcgcaagtttcgccaacctgtcgcgatgcctcggccacagaaaacaattggccaatttgatactcctcaatggtcaacggcatgacgatgcgactgaaaaaaggaaagcgtaattaattaaggtgtcagaagaatgatgatgaaaaaagcaactcactattctctgatgagcattgttgctgaagtgcagtcaaaaggggaacaaagtgaagaaggagacagacgcttattatgtcagtaaaggacaaatgaagaatgattgtttctgcgcttaaatcgtcccttttatacaaacattttcctacccgtcaattccgtgtaaaaattctctataaaaagggatgaaatttgcgagatccactcattcttcgcatttgcgacttttactctctgctgaacaatttcttctctcgacgacactttgcgcattcaatccgagcacacttcttcacccatttgctagtcccatgtctctgcaatacgtcggcatcgctgcggtaatcctcggaagtaagtgccaaaacaattgttgttaatccatgttgatttgctgctaattaatcgccatttttcagctgccatcgctctgttccaaactgtgtcgctcagcaccagacgacaaatcgccgcacaaaatggccgaagcagcggcagcaaacgccaaagcaagtcgccgtcgtccgcaaaaaccttggcacacaaaatcgctgcgacggtcatcgctgagaagagcctgagctccatcccggacaaagaaatcttgcagctgatggacatcggctttcaactgctcgacgaggtgggctcagcctggatccgggatgaccagccagtgcctctgttaattcgtgccaccactgttttcaggagccggcgcgtgttgatgtgcatgccccttgctacgttttcggtgacatccatggcaatttgtcgtaccttctcaagtgggttttggactcgtcgactcggctttttaacatttcagcggcacttgcaaatccgttgttgttcaggtacttctccgacacccacatcgaaccgcagctgctcaagctccaaccgccgctgttccatttgctgttcctcggcgactacgtggaccgcggcgagttcagtctggaagtcattgcgctgctcgtctcgctgaagatcctcttctgggacaagatcactctgctgcgtgggaaccatgagatcgcggaagtcaacgcggagtgagtgccattggcgaaaagtgccattgtcgtcattcaattccccttttcaggtacacctttcgaagaagaactgagaacgaagcgaggcaagggcatgggcgattttacaaggtgtcagagctaccaaa

SEQ ID NO: 3464 - DNA, 3995 bp, Heterodera glycines
tgcttttgccatgccatttttttgctttcaattttcaattccttttccccctcagctttctgccgacatgaaacacattcacttcgtcacgctgaaaccgaaggctactggagagaaattgagccaggaagaatgacagacgagcggcggaaagaaagaagccccgacgacgtaaatgaagtgctgcatattcaattcgatcacctcccatttaatgatgttgaccattctcctgctgttgcccgagtagatgtgataaataattgctccgttttatgctgtccggatacatatttgaccacgtatatgtcattgttgtattatatgtgtatattgtatatatgtatgtatgtttttgtatatgtacttgttacaaaacgataaaaagaatgtttaacccgcaaaattttggaattccaatcccgcagcgggaccagggacggacgaagctcggcttggcactcgaatcgaagcccaatttttttcgaagctcgaagcccaaaaaatcgaagttttcgaagcacgaagtttttcgaattttttttatgtcgaaaaatatattcaagactaaattttttggcgttttgtcactattttttcactattcgacatttggaaaatttgttaacaaaaatgcaataaaatcaaaaaatacacccccatcgaatcgatctaaaaaaatttcaaaaaaaatacacccctaagaatcgaccaaaaaattttttaaaaatacaccactaagaattggaaaatgttttcaaaaattcttcccccaaattttttttcttgacaaaatttttgatttaaaatgtcaatatttgctaagagaattttataaaggaaatgtagctcatttgcaactgcaatcagtgaataaaaattattttttgctcaatttttggctaaaaattattggccaatttgatactcctcaatggtcaacggcatgacgatgcgactgaaaaaaggaaagcgtaattaattaacgtaattaattaaggtgtcagaagaatgatgatgaaaaaagcaactcactattctctgatgagcattgttgctgaagtgcagtcaaaaggggaacaaagtgaagaaggagacagagggtcggggtcactttggcgcgggccattttggcgccgcgaactttaaagtgttataacttttttcttatccaaccaaataaaataattttgataccattaaatagacctaagtgttctttattagcttgtaaaatattagaaaaaataaattctgtttgacaaaagatatagcgtgcggcgccaaaatggccagaaaaagtcagttttttgaggttttttggccataacttttttgtgtttcaattaaattttttgaaattttgcaggctattagggactatcaagcgctttaaaatgatatcaagcttatttaatttgaatgagaaataaaaatgttatagcgtttggcgccaaaatggctggcgccaaagtggccggttcccggagacagacgcttattatgtcagtaaaggacaaatgaagaatgattgtttctgcgcttaaatcgtcccttttatacaaacattttcctacccgtcaattccgtgtaaaaattctctataaaaagggatgaaatttgcgagatccactcattcttcgcatttgcgacttttactctctgctgaacaatttcttctctcgacgacactttgcgcattcaatccgagcacacttcttcacccattggctggtcccatgtctctgcaatacgtcggcatcgctgcggtaatcctcggaagtaagtgccaaaacaattgttgttaatccatgttgatttgctgctaatttatcgccatttttcagctgccatcgctctgttccaaactgtgtcgctcagcaccagacgacaaatcgccgcacaaaatggccgaagcagcggcagcaaacgccaaagcaagtcgccgtcgtccgcaaaaaccttggcacacaaaatcgctgcgacggtcatcgctgagaagagcctgagctccatcccggacaacgaaatcttgcagctgatggacaccggctttcaactgctcgacgaggtgggctcagcctggatccgggatgaccagccagtgcctctgttaattcgtgccaccactgttttcaggagccggcgcgtgttgatgtgcatgccccttgctacgttttcggtgacatccatggcaatttgtcgtaccttctcaagtgggttttggactcgtcgactcggctttttaacatttcagcggcacttgcaaatccgttgttgttcaggtacttctccgacacccacatcgaaccgcagctgctcaagctccaaccgccgctgttccatttgctgttcctcggcgactacgtggaccgcggcgagttcagtctggaagtcattgcgctgctcgtctcgctgaagatcctcttctgggacaagatcactctgctgcgtgggaaccatgagatcgcggaagtcaacgcggagtgagtgccattggcgaaaagtgccattgtcgtcattcaattccccttttcaggtacaccttcgaagaagaactgagaacgaagcgaggcaagggccatggccgcatttacaaggtgtcaagagctaccaaaatgaatgaatttttaatgtttttgttcccctttcatttcagaggtgcaacaagctcttcaccaagctgcctctgtgtgccatcatttccaagacgttcctctgcatgcatggtggcttgccgcggccagaaggatgggactttctgatgggtgatgacttccatgtgcgtttttcgtgtttccctgtcaaagcctttgtcatttccaatttctcacacatttttcagaagccaaaaaccgacctggaaatcgacgaaaacaacacattctgtgacctgctttgggccgaccccactaacaatgcgcaggagcttcgcctttccaaggattttgagccggacaaaggattcctcggcgagtacggcaactatcgctttaatcaggtggattttggaggactgctgacccagcattttgttgaccgcttttttaatactttactgtcattttcaggaccgcgagacttcaattcagttcaacgaccgctttgcgcaggagttcttcaaccgctttccccacatccgcggcatcttccgggcgcacgaaaaccaaccgaaagggcacagcatcaacgaggcgcgtacaatttgcacggtgttcagctcgcctcgctacatggaagacacggactgtggatctgtgctgcgggtgcgtgctgcttttgccatgccatttttttgctttcaattttcaattccttttccccctcagctttctgccgacatgaaacacattcacttcgtcacgctgaaaccgaaggctactggagagaaattgagccaggaagaatgacagacgagcggcggaaagaaagaagccccgacgacgtaaatgaagtgctgcatattcaattcgatcacctcccatttaatgatgttgaccattctcctgctgttgcccgagtagatgtgataaataattgctccgttttatgctgtccggatacatatttgaccacgtatatgtcattgttgtattatatgtgtatattgtatatatgtatgtatgtttttgtatatgtacttgttacaaaacgataaaaagaatgtttaacccgcaaaattttggaattccaatcccgcagcgggaccagggacggacgaagctcggcttggcactcgaatcgatgcccaatttttttcgaagctcgaagcccaaaaaatcgaagttttcgaagcacgaagtttttcgaattttttttatgtcgaaaaatatattcaagactaaattttttggcgttttgtcactattttttcactattcgacattttttggaaaatttgttaacaaaaatgcaatacaatcaaaaaatacacccccatcgaatcgatctaaaaaaatttcaaaaaaaatacacccctaagaatcgaccaaaaa

SEQ ID NO: 3465 - DNA, 1294 bp, Heterodera glycines
  unsure (1)..(1294): unsure at all n locations
tttaaaaccatatcaaataaaaagtcaattcaccaggatcatcgaggtcagtgaaaatgacaagtaaatttgacggagattccgtttctgatgtattgttacaacaattattgcggcaggaataattcacaaaagaacggaccatctttaatagatttgtcattatttcggaaaggaattaaaaggatatcaagcgtaaagaagcggataaatcttagtttcgagtagatacaatgtgcatgggcttaattttatctcatttaaattaaaaaaattatttaatggcgttatgtaattaaattttttttaaatgcgaattccttctttcgcttttcactaaaatttacaaattctgctgtaactcaaaaagctttattccttcctggatatagcatatattttgtatgagtgcgcctaacaacagtccttcgagcatttcttctacaggaacaaacggaattcgtataacacgacagaggagcagtgctcgcattaattggctgaccgaactcaccacgcgcgattcaactccagttacaaccacccaaacttcaaagggttttgtgtattattcatcaaaatttgagctttaattttttagatttttctgaaatcagcaaacatttagcgctcgttgaggacgaagacaatattaaaaggattcaagcaaaacgagaaaaaggtttttgaaatttccattttaatataaaagacgcctttattgatttcagaagcccacgaacgcgcgttggcttttgtcaagaatcagttattgaactcgcggaaagacgactggctccatcaaccaatcgaagaattgcttggctacgcaccgaaatactaacggaatggcgaagcaatgctttgttactgttggcagtacgcgttttgacgctttggtcgaatctctgttccgtagcgatgttctcgatgctttaaagaaactgaaagttgaatgtgtgacaattcagaatggcaatggtgtaattcctaagcaaatacaatccgccaaattaaatcaaacgcaatgcatcattgacggaataacggtagtctattacggtaaaacaagtacatcattaatcaaatttactgtttcagtttcatttgttcgattacaaagccagcataagggagtatttacaaagtgggttatttaaacaccagcacgataatactgtcaatgccccttttgataagcgagtcccaatgaaaatagacatttcagtataannagtagttttctaantttaataatgcataattncgcaaacatanattatttttttaatcg

SEQ ID NO: 3466 - DNA, 5994 bp, Heterodera glycines
ggggggcattggcagtattacctagcagcgcttatattgtaattatgatattctaattcattaggtgcagaattaatagtgggacatgcaggggccggcacctgcttggaagcacttgagtgtggaaagccttttatcacagttgtcaatgattcactgatggataatcaccaagctgaactggccgaaaaactcgctgaagatgggcatcttctgtttacaactcctagcaaacttggagaaactttggtcaatcctaaattgttcaatcttaaaccccttgagcaagctgatcctttaatttttcgcaattttatggaaaatctcataaataattgttaaatcgtgcaagactaaatatcggaataaaaaatatatattgtgactatatgatcattattttttgtactaatttcaagtgatatattttaaccaaaattaaaatttgcattttatgaagtgacttaaacgtactgaatcttggtttaagaaaaataacaaaatgccaagaattttttagtaacagacgaacgacagacttttgctgtctctattgctgtgtgtttatacttttacttccttaacctttagggatttaaaattcattatattttgatctttgcagtcatttcatttgagcaaaatggcgtctaaagcacgaaaattcattgacgaagcggccaagacggtttttgaattttgaaaacatttgtaagactttctttaaggttgatgatgaagacccttttgccgagacaagacgaccaaaaatagctgaacgtcaaagtcagtatcaaagccgcgcccgtaaacggtttgttctttattgcgctgttaatagacaattgtaaaaaatggattcaacacggctactcttaaaatactacttttgttaaacaaaaacaacttttgaaatttcagggcaatttctccagaacgacatgacatgttcggtaggttatctttaaaattaaaagattataatatcggtttagttgaccaaactccggacgcgcgagaccgaacttacgcgcaaattatgcaagagcaaagatttctgacagaaaaggtccgttattttccgtattgtggaacctaagccagagatttagttttttagcatccaatgtaataatctgattgtgtttatgaatatcttcaggaaaaaattgaaaatgagctagcagagaaacaacagcatggtgaactaaatcaatcggcaaagatgtctaaaccttttgttgctgggactgatttgacttctgttgcatctgaggacgttgaaaatacaccgtcccaattggttcggaaaaagcggattgtattgagcgaaaatgttatttcagcggtgagataattccgacatttaataaatggaattgcaaatttttcgatttgcttcaggaaaaaactccaaatgttgcgcgttgggaggagacaccggctcatatcggtgctggtgatgcaactccagcggcaggcaaacaatgggacgcaactccgtcccaaactcctcgtcgaaatcgttgggacgaaacaccaaaagagtctgttcgcgatggcggtatgactcccgggtggggttctgaaacgcctcgcgacataaaagtcgacatgtcggagcgttctgaggagacgccgggtgcttctaaacgacgttctcggtgggatttgactcctgcccaaacgcccgccgttggttctgagacacctttgaatggaatggatgcaccaactccagcgcatttcactcctaaaatccaaaatggaggaatgactccgtcgctgttaaccccgggagggtcgactccgatcggaacgcctgcgatgggcatgaaaacgccggctgttccctttgttccaatgacacccgagcaagctgcaatttacaagtgggagaaggaaattgacgaccgaaatcggccactttctgatgaagagttggacgcacttatcccacccggatatcgcattttggctcctccatctggtactgtttttaaaatattttactggttattttcctcattccaataactaaaaccttttcaggatatattccaataagaacgccggctcggaaattactgtccactccaacgccaatgaccggagtcggtggttttatgattcctcctaccccggagcgtggcggtgctggtgacaaaggcgttggtggaattctggacacgcagccaaaggacccggagttgccagcacttaagccagaagacattcagtacttcgacaagctgcttcaagacgtcgacgagagcacattgacaaaggctgagaagaatgagcgtgagattatgggttatctacttaaaatcaaaaatggagcgccaccacaacgaaaatctggacttcgaaaaatcacggaaaatgctcgtcgtcttggagctgggccattgtttaaccaaattttaccacttctgatgtcaccaacattggaggaccaggaaaggcatttgatggtcaaagtgattgatcgtattctctacaagttggacgatttggtgcgtccttacgtgcacaaaatacttgtcgtcattgagccattgttaattgatgaggattactacgcccgtgttgaaggtcggccatttaattgttattcccttttattttaatttacttggaaagttcaggtagagaaatcatttccaacttggccaaagcggctggacttgccacaatgatctctacaatgcgacccgacattgacaatgtggacgaatatgtgcggaatacaactgctcgcgcatttgctgttgtcgcttcagcactaggaatacccgcgcttttgcccttcctcaaagccgtctgtaaaagcaaaaaaagttggcaggcacgacacacaggtacaaaaataagaacattttgcccaaatttctgtgctttttgtaatccaactgatccatttgaggaattaaaattgtgcagcaaatagcaattttgatgggctgtgcggtgttgccccatttgaaatctttggtcgaaattgtggaaagcggactcgtcgatgatcaacaaaaagtgcgcacaatcaccgccctttgtattgccgcgttggctgaggccgcgacgccatacggaattgaagcgtttgattccgtacttaagccattgtggaaaggtaaaataaagaagcaaaaaacatcctaaaataacaaaaaaatataggtatccgaactcatcgaggaaagggattggctgcatttttgaaggctattggttttctgatcccattgatggatgccgaatacgccagttattacacaaaggaagtgatgctgattttgattcgagaatttgtttctccggacgaagaaatgaaaaagattgttttgaaggtatggttactttactggactgtagttataatttatatttcgaattattgttttaggttgtaaagcaatgttgctcaactgacggggtggagccagcttacatccgcgaagagatattaacgcccttttttagggcgttttggaaccaccgaatggccatggaccgtcgcaattacaaacaattggtggacacaacagtggaaatagcgcaaaaagtgttttctatattttaagttattgttataattgcaagctttaggttggctctgtcgagattatcagtcgaattgtcgatgacctcaaagacgaaaacgaacaatatcggaaaatggttatggaaaccattgaaaatatcgttgctctgatgggcgcttctgaaatcgactcgcgactggaggaacagctgatcgacggcattctctacgcttttcaggaacaaactcaggaggtttactaatctgttctcctcttttcttatttttttattatttaacaggatgcaataatgctcgaaggctttgggaccgtttgcaaaggattgggacgtcgtaccaaaccttaccttcctcaaatttgcggaaccattctgtggcggttgaacaataaatcggctaaagtccgacagcaagcgactgatttggttctactgtttcttcattttttcttattataaatttaatttttgcagattgcaaagatagcccctgtgatgaacatttgccaggaggagaaattgatgggtcatttgggcgtagtattatacgaatatcttggagaggaatatccagaagtgctcgggtcaattcttggggcacttagtgctattgtttctgtgatcggaatgacgaagatgacgccgccaataaaagatttgttgccacgactgactccaattcttaaaaatcggtaaatctatacaatacttaatttctcctttttccttagcaaattttgtatattggttttatttccaattattcattcagacatgagagagtgcaggagaattgcattgaattggttggaaagattgcggaccgtggctccgaatttgtgtcggccagagaatggatgcgcatttgcttcgaattgttggagcttctcaaggcacataaaaagtccattcgtcgtgcagcaataaacacttttggttacattgctaaagcaatcggtcctcacgacgtattggccacccttttgaacaacctcaaagtccaagagcgacagttgcgtgtgtgtacaaccgttgccattgcaattgttgcagaaacttgtgctccattcactgtgctgccggctattatgaatgaataccgagtgccgggtcattttttgctttatcccctggatattttatacatattattaatatttatttttcagaaatcaatgtgcaaaatggtgttttgaaagcgctgtctttcatgtttgagtacattggtgaaatggcaaaggattacatttatgcagttacaccgcttttggttgatgcgatgatggaacggttggtcacataattaatttttcttaatagtcattgatcttacaattaggcttttttatactcttatcagaccaaagagcaactaatttaaagaacaataattttcaaaagaggtttttaaatatttttttcgggaagatatcttacaatattttccaacaacttattattttatgtattattttgtatttccagagatgtggttcatcgccaaattgccattgacgcggttgcccatttgaccctcggcgtccatggttttggttgcgaggatgcgttgatgcatttgctcaattttgtttggcccaacatgctcgagaattctccacatgtcattcaacgtttcgtgttcgcatgcgatgcgatgcgcgtgtcacttgggcctatcaaagtgctgcagtactgtctgcaagcactgtggcatcccgcgcggaaggtgcgagagccgacctggaaggtaaactgataattgcatagccgaacacgctgtattttgtctttaattcaggtgtacaataacctcattctcgggtcccaagatgcagtcgttgccggatatccgcgaattggttagtcatgcctattctattcacaatcagcagtttgtaaaacccaatttcccgtttttagctaacactgaccgaaaccactacactcgctatgagcttgattacgttctttgaatgaaatcgtatcggtctgtgaatgtttgggcgacctgtggtgaaattctgtaaaacaatgatctaaaaatggtttcgtaaaatatactcgatttgtaatagtagttcgtttctttgtttcttccaacaactggttaaatttgtgtactgtcagaatgtcgtacattaaaagtgaattacaatttaatgcaatttgttcattatttatttatactttgtcaatgtctccttgataaatctgattttctgttatgcggttgaattccattttccgtcctcgctgtttgcgtttgttcagttccgccgctttgcccgcatcggcactgaaaaggccgaatcgtttctacaaaaaagttgaagtgcgcgaagtggacaaagataatgaagtgctttcaaccgcggggaagtcgtttggcgtttttctcgacgggcgttccctccgaacacgctc

SEQ ID NO: 3467 - DNA, 4112 bp, Heterodera glycines
gtctgatcgcccaaattgtctcttcgatcaccgcttctctgcgctttgacggggcattgaatgtcgacctcaccgagttccagaccaacttggtgccctacccgcgcattcacttccctttggccacttatgcgccgatcattgccactgatcgagctttccacgaaaaatcgagcgtggccgagatcaccaatcagtgctttgagccgggcaatcaaatggtgaagtgcgacccgcgcaacggaaaattcatggcctgttgtttgctgttccgtggcgatgtggtgccgaaagtgtgccaattttgaaaaataaaaattcttttggtcaatttttgaggatgtaaattcggcaattgcagcgatcaaagcgaagcgaaccatcgaattcgtcgattggtgccctacaggtgtctctttcgccttaatcatgttggcacaaaaatctttcaggcttcaaagtcggcattaattaccaaccaccgaccgttgtccccggcggggatttggccaaaatgcaaagagtaattggcgaaatcggactttttatgtggggtcactcggccatttaggccgtttgtatgttggccaatacgacggccattgccgaggcgtgggcacggttggaccacaaattcgatttaatgtatgcaaagagagcatttgtgcattggttagtattgttttggatatttaaattatgcggctaattgttaaggtatgtcggcgagggaatggaggagggcgaatttacggaggcacgggaagaccttgcggcattggagaaagattatgaggaggtcggggtggacacttacgtggaagacgaagaggagtactgacgaggaaaatgaacggcgagacgacgccgacggcacttttggcaattggccaaattaatacaaatacaaaacgaatcacttccaattcattttaataaaattcacaaatttcgtatgatccgctgatgtcagaaatgttttgttttatattgaaacaaactttgttaacagtgacgtaatatgagcgaatgacgcaaattgaaacagtgcgtttcaaaataaaagttcaaaagttcgattggatgagtgcaactttttctgtccgtctctcctccttcaattaattaattgattgatcggtcgttttgccaatgttcccccatttgccatttaattttcggcttttcccattatgtgccaactttggttttcgcctatctctctctctctctctctctctctctctcttcattttctgtctttttccctctgtttgttcatctgtccgtcgcgttggcctttttttccatcaaattgtcctaactttttattgtcaactttttgaagtgaactttgacttattcgatcattctgaaaatgaaacttttttttctgttgacaattccctttgtattggccgcttttctccaattttcgtccgcttttttacttccgctagtgccaaataatgcggcgatgggaacggcaaatcgaattgacgaagggccaattgggacagaacggcgcaaaaagcgcgaggaatgggtggaaagttccatctattgttggtacggatgacggaagaaagagggaatgaaaatggggaggaagagtgagtgaaaaagagagagaaaggagcgaaagaaacagagacatttaattaattaaagaatttattcaattaaagaattaattattgcgccgtttattaattggaaatttacaaccattctctgtcaattgaaattttataattttaatatcatttgaattaaatgtctttaataatctctccctccgtccgttctttggcgttccctccaattttcttttgtcccaattgccaattctccgaattggtcctcacaacaaatattccctggccgactgaatggaaaatttaaaacaaaaaaaaaatcagatgggctgaaaagggcgtaccaaacgaagtctttggcgcaacggcctttgttgcaactgccaaagggcaattgtcccccggggcattggggacaacaaaatccggtgccatggcaagagaacccctcacggcattgcttaacaattcttgcgccatttggccaattccatcccccgggcccacctgatcggacgaacattcgctgacccccggctgaggttgccccgccgggcattcgcaacacacccccgaggaaacgcattcgaggcgtctgccggccacgacgcattggccattcggcccgcagcttccgttgctggccaatcctccgcacgaatctgatgatattcttgtgggaagtcatgacaaaaggaggaggggaggaaagaaaaaaaatgggacggacaattcatttcgtcgaagccccgcggacagcacaattggttaacgcaactttcgtcgtggcgacagtcgacacccaaaaaacactggcgatcagtgcgagtgccttcgtagcaaaatgctaagggacgacggatcagtgccagttaatcgttgcccacaacttggcttaattgggctgaccttcgctgagtctattcgggatcagtgcgctgcttctcccaccgatcgcttctcttccgtccgatcgtccctttcctctcgcttctcttcccgtcggttctctcactgtctcaccacagcacgccccgtcgatgcatctgatccgaatcggaattggtctgctcgtgctctgatcaaatgctcgaggacattggcgatcataaacgcaaaagtggcccataaagtgagggaaatgcgcatttcggaagcaaaggccaccaacgccattcgaacgatggactgaaaagcattttgttattgaattgaccgatcatggccaatcgtatattttataaaatccccaatggaccaattggtcctcaacccgaccgaatcagttgtaaaaatccatccgatcggtttgaaccctttctaggtatcagcttcatcctcaaagttcgtcccattctgtacgatcggcttcattccggtcgttttcgtatcaatttccattcgatcgggttgtccccaattcaacgagttttttcccgaaatgcatcggtcggcttcacccccaactccatccgatcgttttcatcttttgatttgtacctccgttgcccctctgatgattgccaatccttcccctttcttcttctccttcgtcttcgtcctcccattgactttgtcttcttcggttgtcatttgatccttcccattttgtgccatctctgcccaaatagcagcaaaatccgctaatacatgcgaaataatcatggggaccgcagttggatgcctgcttgcaaacggtgcgcgagtattgggcaccgtaacgggcgcaaacggcacggccacgctcaaagtcactgtccctaaaaggaaggaattcaaaataacagagttttaaaaaacatccatcccatttgaccattcgttgtcgccgtgtctcgcggggtttgtgcagcaacggcccgaaatgcaaatggctgtccattgtttctggtacagtaccccgcactcattgagtcgctctccgctacagtatgtcccctacagccatttttgtttttaaaaattctaatcgcaaaaaataccgtaaattgtcccccgttttgacaaactccgccagagagaggcgacgaatgggggcccaattcagcagaagggaaattgggggacgataaccttttacaatgggcaaaaagtgatgccaccacaataaatgtgaaagacaaacgaagcggaaaacggcggggaaagcaaaagcattgaattggaggatttaaacgcttcattttttaattaatttcaaaatgatgcgattaaataataaaaaatgaataaatatacaataggtatttgtgcaccaaaatgtgtcaaaattcacggcaaaaaataatataaaaacaaatgcgaagcataaagggaatttttacaaaaaagggatgggggggggataaagcggatgaacaaataaataaaatgggcgggggagagaacggccgattgatttgtcccattgattgattcgatttatgcatttttggcagcaaaaaaatccagcgaattgataaaacagcaaaaaaaccacaaatttattaaataaaataacaacaaaaattaaat

SEQ ID NO: 3468 - DNA, 2412 bp, Heterodera glycines
  unsure (1)..(2412): unsure at all n locations
ggaaaatcaattagcattgaatgctttgggtttataattcaaatccttctgagttgaagcatcccttctgtccgtaaccgtcgaacttcgccaaaagtaccaattattgtcggaggcttctctccgtgcggtttggtcaatgtcaatgtcagacacaaaatgggaggacaaactgatcaaatgggaggccattaaaatgtgaaccaattaccgatttgtcctccccccctctcagtaagtcttctttttggtcatttcctggccaattgtctctctgcttacttttccaattcggtggcccatcgtccgctgagttggagctgttcagcgccaaagtcgtcgtcctcgttccagtaatcttccgtcaaattcgaattgttttcgattgtcgctgatccgaaggagtcgctcaaattgtcggcggatgttttgcgtccgttgtgattcgccgacggacgtcgcctgtggggcggaaattggcgcgacgcgcaccgcggggtcgaaaggcgggagagctgaagcgatgcgcgaagagtgtgccgaatcggcacccactcacttgaataccaatcgaacgctgtcccaccgctccgtttccgcgtttcattcgctgcgcttcggtcggtgggcttttcctttttgccgaattggccaggcaattgctcagtttggtgctttccgtgccatccgccgagcggatcatttcgctgtcaattctttttggaaatattccaatttgtttttaatattatttgttcttttgtcctctctcactgattatgacaatgcgtcgacacgagcaatgcgctcgaatctctgacatttttgtggtaaatgtgcccaaattgttttgccaatttcttttttgtgtgcctaaaatgcgtcgatttgttgcgatttcagaggataaatttaattaattaccttttaataacaaaaacaaaaacaatcggaggaaaaaaaacagcaaacagaacgaagagcagcgaaaagacttttaaatgcaaaataagcaaataaatgatagttttaagtgttaatttttaccaaaaagtgccgaacaattcgcaaattttggtccttttgaacataaaattcgcattaattgtaagagagtgctgctgccccccgccgccgaccaaatttctgcagaaaattacaaatttttaaaaacattcttttagggaccttcaaaggcnggtgattttgtattccaccaaaatgccagagtccgttccgctttttttgccattgatctccgttattatcaccgatgacatttttcagctcgaaaatggctcgctttttggaaaactccttcaattattacgctttcatcgtgtgggttattctccgaattccaaaccatttcctgaaaattattattcttttttttaccaaatcctttccatcgaaatgccttttcttcgccattgtcccgaatgacttcaaatgccatcgtcgcttcttctcccattaatctgtccgttaatattatttgcactcggaatggctttccaaattcttaattattttattaatttttctttccttttttttgctatttattatttaaatttgcctacccaattgccattgttggacattttttgtagggcaaaatgatgcaaaaaacattccttgtggccgttctgaaagtttacatccgcaaaggcatttagaagtgccgttgtcatccgccgatggattttcgaaggtcaaattgcggacagattggccaaagccaagcgaagaaacggccaaatccggcggaaggtcagccgctgtcattaaaaagcgcaaataattatgctccgttccgttgggactctctccgatggcacttttccctttgcattattcccccctcccaccttggttccgttggcactctctccgatggcacttttccctttgcattattcccccctcccaccttggttccgttggcactctctccgatggcacttttccctttgcattatttgtccccctcggcactcccctcttctgccgaaagccgcttttgtcattactttgcttaaacttctgactgttgtccgttcaatcgaatttgtgttgcttcgtcggcaatgcctttaatttttgtttgttttgtatcattaactaattacttgtttaatgaccttgtcctttttcgaattccactcgattcgtttcgctgacaaaaacattttgcccactcggaccattcgctccactcccaaagcgcatcaaataaaatatttccatttaattaattacttttcaaatattatttttccattttaaatttgtcccattttctccaataattcccccccccctttccctttgcttttatttttcagttcgncatccgntcggatcatcccacaactcaaatttctttttccttagctgctttacccc

SEQ ID NO: 3469 - DNA, 2946 bp, Heterodera glycines
ggtcacattttgctaaatgttcagctgtttcacaagttgcatctgaagggctctttcattagattattttaaccatttcaataaaattcttgatttcttaattcacctctctcaacgttccacaaacaagacatccaaatttgagaattgctgctctcaacttttcaatttctcttttatttgggctttgtcggacatgccatttgatacattcataaaatttgatgaacaaactcaacaaagaattcagttaaaaatgatctgacgctccaatttgaaaatgcttaaagacaaaaggtaaaatcttcttttaccattaaaaggggggggaagggccacttaaatgtagttttccattcccttcttggataggcatttgccagaaaaaaaaaaggaaaggccccggccaacccgaaactttacccccaatttagttttgtgttaattttttgaaaaaatgccttttaaattttcccaaaaatttttttctactgaaccccccccaaaaaattttaaatttttaaaaaggtttaaaacaaaattttttcaatttgaaatattttcaaaaagcaaaatttttccaaaccaaatagggcccaaaaaaaaatatatatgaattccgactttttttttttttcgcgggcaaaattggtcccccaaaacaaagcttttttttcaaaaaaaaaaatttttatataaatttttttgtgccccactcccccccccccccccccacacctttctctttttttaaaaccccacaaaacaaaaaaaaaaaaaaaaaataatatttttttttctccaaaatttttccccccctaaaaaaaaattcccccccttttttttttgtttttttaaaaaaagaatttttttcacacaaaaaatttttatttaagcgaaagaatattttttctttttctttctttttttttttttgtttttcttctctacccccctcgcccctcccccctctccttctttttttactttttttcttttcttttttttttttttctcacttcattttcaataaaaaaaaatatttttttttttttttttataaataaaaaaaaaaaaaaaaaaaaaaaaaaaaaaaaaaaaaaaaaaaaaaaaaaaaaaaaaatatttttttttataaaaaaaaaattttttttttttttttttttttttttttggtgggccccccccccccccctttttttttttttttcccccccccaacaaaaaaaaaagggggggggaagtttttttaagggggggggaaatttttttttttcccccccccccccttgttgcccccccccccgcgagaaaaaatattttttttttcccccccaagaaaaaagttttgtggggggggttttttgggggcggggggaacccactaaaaaaaaaagaattttttgtgggaaaaaatttttggaatgcgaaaaaaaggggggaaaaaaaaggggggcctcggggggggtttttccaattttttgcgcccggaaattttggaaaaaattttgggggaatttttttttggggagagcacaagaaaaattttttcccaaaaaatttcccccgaattgggcccgcttaaaaaaatttcttaaacaaagaaaaaaattttaaaaaaaggaaattaataaatttttcaaatgaaagcaaatttttttttcattgagctttttaaaacgggtgttattatcccaaaggaaagtccaagcaactcaattattttttggacatttgacaaaattccaactgatggaaagggcattttggcaaaatgggaaaatggccgaaacaggcgggagatgaatttgtatggcaaaatttgggggatttattgaatccattcggaagacgaagtaataaagggcggactaaatgaaatgaatgttaattattaaaaataatcagccggcggcatttcttttgggttactcaccggcagggaaagccgatacaaaccgggcgcaaaaaaatgccaacattcgaattccatccgaattcgcttcgtcgcccttaaaattttcctgccaatcgctaaaaataaattagactttttaatcaaataatttttttttacaaaatgtgcccaattgaaagattttcaacgaattcaatgaatgccgaaattccaaatttgcttcaaaaaaacattcgacggagaaattagtctctaaatatttttaaacaattataatttatctgccaaactcacctgaataaatttcgatatttatggtgacctttggaaaagttcgatcggactaatgaaagcgatttccgacacattaaatacaccgtcacaatttggttcaaataaatcccgtattttcttaaataaaattttcatcaaaaatttaaccaaaatttaccttattattagtggcggaaccattcctaataaatacgagtaaaaaagcgaaaaatgctagtaaatttaacattgttatttgaatttattaaaatattagcatgcgtggtatttctatctaaaatgatttggaatggacaacaaatgaggacaaatgaacaacaattggggaaaaatgaacaacaattggagacaaatggacaacaactggggacaaatggacaacaattgaggaaaaatggacaacaattgaggacaaatggacaacaattgggggacaaatggactcgcgtggatccccccccccccctcccccgcgggcacatttttggcaatgagtgatgaagtgaccctttcactccgtcgcaactttccacggatgggtggtgggaattgtgcccattcatttgtttgtgttatgttgattgatcggtcgttttgccaatgttcccccatttgccatttaattttcggcttttcccattatgtgccaactttggttttcgcctatctctctctctctctctctctatctatctctctatctctctctatctctctctctctctatctctctc

SEQ ID NO: 3470 - DNA, 2860 bp, Heterodera glycines
gaaataagcatattctgaaactctgagcataaaaaatcgaagttgatttatttgcggcacttttttcaaaaacttttggggaatcagtgtccggcggtaccgatagatgtccccgggaacattttttgtaatttttaatgcgatttgttgagattggtccacaaaaatggccaaattttgtgattttcgagcaaatttttaagaaaacaaagtacttttaggggctggcggtgccgataggcgccgccaggggaaaaattgagaattttaaccatatttttagcagattttttattaaaaaattattaatcagggctgacgatttttctcgagcgagactcgagagttttagcactacctcgcacatcgtttcttcgcggcactgcctttttaataaatgttatcagtttttcaggcgagttttaccaaaattttgccaaaaaacatttttgtaaaaaaaattttcggctggctttacgacagattttgggtaaaataattttaaagataacattaaaagacaatctaacaaacaaattcataaatcataaaaacttttctcagtgacgaaatgatagggagccgaaaactgaacctaactttccttctaagtaattactagggctgggatttttatgtgctaaaaatcctgaaatatgtaataaaatatgtgctaaaaaatgctgaaatatgtgctataagcccaaaaaaatgactcattctttatcattttcgcccgcacaattgcaaataaaaaacatttggaggtgtttgggggtaaaattagtccttttttgataaattgtttttaaagataatttttccatcagttgagtaagttcagcaagaaacttcgatatccagtaacgaattaatgaagaattcgattttcggtacacgaaataaataaagaaaattttgaaagagcctctaaaaatggcaagaaagttgatttttaggggtgcatttttaaattttttgtgttttcttagatatttttttcaaaaatgccaaatatttgcaaaatatgtgccaaaccccgaaatatgtgcgatatttatttatatgccaaaatgccaaaatatgtgtttttatgtttttataagtcgctctaattcgaaaattgttcggagaaaatgttatttttgggcttctctcgccataactaagccgcagaaaaaatatgtaaaaacataaaaatcccagccctagtaattacatattggattgtaagtaaatgctgatgttaaataaaggaatgtgagcaatttcaacagaaattgagcattcagtaattattgctcatatgtaaatgctttggctaactttgttttctataataattgcctaattagatgttcctaaaatttaaccacccttttcatcagatgcttcaatttatcgctgtgtttcactttttgtgagttcttctttaaaaattgttttaaagtacgcgcctttctttcagttttctttgggttgttttgcctttgctttccgtctttgtgccattttatttatttttctacactaaattttggtggattgtctgtttgtatttcatttggtttctttacgactttgacacgccaagaagaggatcaagaaattgggtgctttttgaatttaatttttttttaaagtttcaaataattttagttatggtacaaaaattcctttgtatggaagcattttgctgattattttccaatcaaattgatcaaaactgctgaccttccaccgaacaacaattacattttagggcactgtttaatttatattcattaaataattttaatttatatcttattttaaattgtgtatttgtactggcattgtttgtttcagatgccatcctcacggagtgttcagtaccgcttcgttcgttcatctttgcacttctgcgacggggtttgggcagctttttcccggattgaaatcgaacattctgacattgaatggccaattttggtttccatttcgtcgcgaaattggcatcggattgggcatgtttacggagacaaacgcggcaaaaggacaatcaaattgtccaaagtttacccaatttaaggtggggtcgaaagttcttcgcacagtctcaaattcttgctgaataaccccggccgaggccgtctcattggcattgtcatcggcggtgctgaggaagtgctggacgcacacccgggaaaacaccacctgaacataatgggacgacgcggattctgccgattcgcgttgaaaacggggcaagtggaaaaggcgcaaaaatatgcacaaaatgtgcaattttataagtaatattttctgatttagcacccctcttgtgccttcgtacagttttggtgaaaatgatttgtttgaccaattaccaaacccccgagggtcccttctgaggacagttcaggcaacgcattctctttctgtttctgactttgcacttcttcatttagtccaccatcaagaggaagtgtggtttttgcattccgatcatcaacggatgttgcggaatctccgatcgctttggtctgttgccacgccgtcgttcgatcacgacagttatcggtgaatgaagagacaatgtttacacaaatcctttgattaaggtgccccgattgaagtgaaacgcattggcagcccaacccctgctcaggtcgaccaactccatcttcgctattgcaatgcattgaatgagctattcgaagagcacaaatcgaaatatggcgttccaaacgacaaacatttgactgtccattaattaaatgacttttaccatttaattgtttgtttattttttgatttaggcatgtaaaataatttataaaaataaattgatttctttcttgtcttttcattttccgtt

SEQ ID NO: 3471 - DNA, 1443 bp, Heterodera glycines
cctatcatttttttgacaaaatctatttaacagatctatcagtttcaaaaaaaatttcccggacggcgcctatcggcaccgcccggggcccttttaacctgcacatcaccaaatttttttttttttggaaaaatgtgccacaagaaaatatgttacaaatctgagttccaattttgcttgagtaaatcatgataatttaatatattaaaaaacaaaaatttatcgtaaaaatcttatttttttttgtaaacatctgttagaaatcgagcttaaatttcaaaattcgccaggcggcctatcggcacctccggccccccaaaaacctattttttcttaaaaaattagccaaaaatctctaaaatttggtaattctttagacaaaatctgtgtaatttatgccaaaaggaattgaattgaggcgatacatcgactaaaggaatgtggagccaacacatcattcataaaaattaatttttttgtgagattttttggagttaattcaaatcaaacccccgcccccgtgggggcaaaattttcgtgcccccgtccccgcgaaaagccacccccgcccacggggtccgaaccctacttcaatgcataaaattttttattttaaaataaaaaaggaatttgaggatgaatttattttgtaaacgcttttcacctttgtctttgcccaccatatgccaatgccatcgttcgtccttttcctttctttgccatttcgccgccctttgggcgtccgttaaaaaaacgacgcgttgaacaaaaataatgaacagcagcagaagaaaagagaaaaaaggcgaagagaaacgcatttgaaatcagaaaataaatttaattgtggcgacggaagggaaaatatttattaattcgttttcctatcggcccaaagttttaaaaaggccaatcaaatggaagggcaaaatgttttttgttttttatttgatggatgagcgaaggatggacttaaaaaacctgttaaatcaattaataaaattcaaaaaaattgagtttgcctgtgggtacgttccccgtgtccccccccccccccgaccgtcccaataaaaggtgattggagaaagcgagcgaatctaagggacagtgccgtgggcacaattatcaaagaggaaatttcatatttttacaatcacaaagtgtaataaagaaaataaatgttatggccatcggccggtcagtcgtcaaatgcgtttgtttctgctaatttcccttaattggcgcttcgtcatgcgtttaccccgcggcgtttcccgtcgcgccgccggccacggcaattgccacggccactgactgtgcattttgttgcggctgttggtatttgctgcctctgtgcttttcttccgacgaatcgtcgcctcggtctgaaaattgcatccgttccgtgccgttcgtccggcttttcccctgccgctcacttct

SEQ ID NO: 3472 - DNA, 1176 bp, Heterodera glycines
atttaaaattgggagaattatgaagagaacgaaattccaaaagggtataagcaaatgatgtcattcataggcccaaaaaaattttcggaattcgaaattccaatcccaaaaaatcttgaaaatcggaataccgtgccttccctggtataaagcaagtggcattcacaaaggtcgttcagctcattgtttgtattcacatattaccgttggataaaaaattccaaaatgtttcattccccgtcattcaaccgaaaaggcatttactccttttgcgtgcgactgcgaatgcgcagtaatcccttctcttcccccccccccctcttttcccccatttaaatttccccaaaaaatttctttgtttttggcgccccgcccctcttcgccttctcttctgttgttgctgaaggtcatttgttccatcattctgttgccggtcaaaagaattgtgtccaaccgtctcttcccaaaattcccatcgcttttcatttccaaagccacaaaaaagggggagggaatgaatgaattcgattgtttggtgtttcggactgtcccctcccatacataaaatgcctcccattgtgcgcagtttcccattcccaacgcaatgaccgaccgaacccaacccattcattactctttgactccattccaaaaaaaaaggattttttgccaaattcaaccaaaataataacattctccaacagtggtgtttctcatttttctctgcgcgttcattgttcacctaaaaaacctgtcggtcactgcgttttgagatggcccacggcagcgaagggacgctgaccctcccccggagggagggaggggcgggggcactgctgcggggcaatgcgttgtgtcggatggggatgggccgggggcggaagcgccgacgttgtcgcctgctgctgctgggtgttctccaaatgggccaagtacaggtcgtcgtaccaatggtgggcaactcgaaacaaaacctgcacaacgaagggacgttgaccaataaagactatttaattcataattgaccgcccttcttcattgttagcttcccacactcaaatttgctccctcctcttgcctcggggtaaacgccgccccgctcgaccgctttctccaccgccaaaaatgctacttccacaagtcaggagccacgctccttgcactgattgagcgcct

SEQ ID NO: 3473 - DNA, 1745 bp, Heterodera glycines
gtttggggtttcggactgtcccctcccatacataaaatgcctcccattgtgcgcagtttcccattcccaacgcaatgaccgaccgaacccaacccattcattactctttgactgcattgcaaaaaaaaaggattttttgccaaattcacccaaaataataacattctccaacagtggtgtttctcatttttctctgcgcgttcattgttcacctaaaaaacctgtcggtcactgcgttttgagatggctcacggcagcgaagggacgctgaccctcccccggagggagggaggggcggggtccctcgttcccccccccccctccgccccaatgattgctaatgctccctcctcctcgccaacctttcgccgccgtcgtcccattctccgcttcttctgtttgcgcttcgcccctttcgcagaagtatcccttccccccattgtgttgggtcggcggaagagtggacactttccgccgtcccttctcattaatcgctcatttgggggccatttatttgtcccctctttttttcctcccaaattcgtttcatttgccattcctttagctcttcaatgccctcctccgcgccgtccctccctccgcgccattcctttcacccacaaaagggcaattcgctgtcgtcccctccgggcagcagttcgaccagcacagtgccaattgccgaattggtcaacggagacacgtccaaagctctgtcggtggacagatgcgtttactttgaacctcagtcatcggcacgagaaaaagtggaggaggacaaatttgggggaagagagcagcaaaagggtgagggacaatcaatcacttcttgggatagccaaagcagttcacaatcagtagcaggggcttccatctcgtcttttgcctattctgtcgcccttttgtctttttttgtcaccctttgtccttttgtatattttggcccgtttgtccttttctgtcgcccttttgtccctttttgtcatccttttgtccctttttgtcgcccttttgtccttttgtatacattccttctccttcctttttaggtctccgccctttcttcttcggcgattcccccaaattccgtcgtcctccccactctttcccgtcccaattcgatgggtcgtccatttgtgtcgatgcaaatgcgccaatctctccgtcttttacggacattcgtgccgtcaggcaaatgcttgcgcggaagagaacctttggcggcaattcttcacggacaatttcgatggatttcgattcggagacatcggaggaaacggagaggacaaattatgaggtgaaaaagggggagaaaatgattaaaaaaggcaaaaaagaacaattgttgagcgattgcatctcatcgcaataacttttgtttgtaaattccccttttttatttcctttgtttctcttttcgtcccctttcgtttggcatcaaaatggtttctttaattttgccatgactccgattgttcccttctctctcttcctctctctcccccctctcttatcccctctttccctccaatttccgttcatttcgtccgtcacttttgcccccccctcccctctcacagtttgagtttgtcccttttgcgtcgaagaaaggaaggcagaagaatgaccttgattttggttggtgtgggttttgcggagaataaaattaaggaaagcgagcggaccaaaggaaaaggcgccggtgggcgacggatcgaccggagggattggggggggggggagaa

SEQ ID NO: 3474 - DNA, 2940 bp, Heterodera glycines
ttttgtctgatcaaatttgaatgatcagtcccacctttcctccaccactgcttctgttgtacattcaccgcgacttcaaaatggcaccaatttaatggcggaggagggcggaagcagccccgaggggacgggtcaaagtcaaatggacgagcaaatggtggggggcaacggcgtaatgccaaaaacggacgtcggcagaggacacagcggcggaaacggcgtttcacgcgaatcgtccgccgttctctcaacggtacccacggaaaagcacttgttgtcggatcggtctcttcttcctccgtttctttccttttccatttttaaattcgcataatcattttcaattagtgctgcaaaatttaaattaatttttaaccgattattttattatttttttttatttttgcgtttttaagcaccgaaaatgcaacagaaaagcggagaagcaaacgatgggcacacacaacgccaatcggacggagcaaaagcaacgaaatcaaatgacggagtcaccgattgttgtcgcacgacaacaacaaacgcaacagagccaattcaacggggcacaattcgacacgcaatcattgcaaagtcgaaggtgcgagaatggcattttgactaataaatgaaaaacaaataaatgactaggcaatttgtgtggttggccaatggacagaaaaagaaaattttgaaattgggaaaaaagggggagggggggaaatggtgttgagaaacgcatttttaaggaatatccgatcactgggtgaacaaaaatcagaggagaatcatttggaaaatggcattatttgataatttaggcgatttgtcaatgtcataataacccaattccttcggcaattgattcccttgccgaaggagcaaaacaattgggtcatcgtaaacgaagaagttacagtcattcattcattcattcattttctgatgaaaaatggggaagcaattagcaaaatgattattaggcaattatttaattattggatggattttattatttatcttcacatatattagccttataattagcccatttccgtttaattccctagccgttcccgttcgatcggcaactcccaaaaccccaactctctccccccaaatgtgtgccaccatcgccaacattcctcggggggcttccggcacggcagttgcaccaatcttagcgcattggacggctccaacaatggggcagcagcagcgggtccgctggtgttgtacaatggcggagtcattgatggcgagtgctctccaacaacgatggcaccgcaccggcactcaatggcactgattgacccgccggtgggagggggcggggaaggcataggcaaagggccaagtgccaacggtggctaacaacgacacctcagatgccgtcgcccttttggtgccatcagccgatgctccacccccacgcgccgcctccccccttttactattccgccgccactttgccccatccgccgccgcctccgccgatggatttggtcactttccgacgcgccctcaaagtgcggccaaagggaaaggcggcacatggaaaagcattgttttcttttttgaaggaatcggaacggatggaaaaggaaaggcaaatgttggcgggcgagcgcggagtgtgcgccgcgtgctgcgacttttgctgcggcggctccgccgtcctcctttggctcgtactcactttggtcgcgctcggattcctaagcttccttctcatcgccatttactttctttgaaattgaaataccaaatgcaatttaatcgccagcagaagaaatgcagtaaatacttcacttcaattttcatttccgattggacaatcaaacgcaaattgaactttttttccaataagaattataattactattttcgtttgttgaattatattcgaattttaatcaattttaaaatgacaaatccactcgttttcaaaatatctatattttgtttccgataaacatatgtaacatatatattagtataataaatagtctctgatcatgaagacccttcccccaatccatcatcaaaaccgaccattagttaaaatattccataaaacatttatagcgcaaaaacatgttaaaattttacaaaaaaaaacaaccacaaacataaatgaaaaaattttaaaatgttagacaaagcaaaaatcgtaacaaattttgatttaaaaatgttagtacaaagtaaaaaaattgttaaaaatatgatgagacgaagaatgggtttgtttaatagcctatttcacaaattgtttattccattctgtcgttgtcggcatgaatgtgtccttgtccctgtcctcctccgtcctccccgtccattctttcgtccatttcctccaaatttgcctccccaattgacaacgttacattatcaccccggcctgtcgcaaactcgaaaaattattccaaaatttcagccgttgcgccacctgtcgccggcgttgtccccccaaagctgaactccgccatggttccgtgcccctcttgccgctgaacagtccgctcggcctgtgccaaattggccggtgttgccactgcgctttccctccctccgctgccgtccctttcggctgttctccctctgtcgccgctcaaaaaggactgaactcgctgaatatgttgctgtatctgttggatgtgctgcgtcatcgacactgtccctcgcgctatctctacggatccctcggcactcatttcctccgcaatcgccgctgtgccttcctcgtcttcgtctccaatgctcaacggaacggtgccatcctcagacaactgtggggcagcggacccggcacaatgcttcaaaacccccccccccccccctcgttccccacttggtcatcctcttcctcttctcccaagtcgtctccctgtccgccgatgtcctcttcgtcctcatcaaaacgtagtggcgcaagaa

SEQ ID NO: 3475 - DNA, 3743 bp, Heterodera glycines
  unsure (1)..(3743): unsure at all n locations
ctgaaaaagtgtganaatgaaaatcatcaaaaagctatgaaaagagggatttgctaaatttgngggagaggggtctcaaaattgatggcattttagtattaaggaagaaaaacattgacatttctatgcttgtccatagattaaagaggtcttttcaagataatagcagattatatgacataaattctgctgatcattgatttattcaattgaaattaccccaaaaaacattcaggagcgggaggctcaaaacatacaattaattaattataattaaatgaaatggattggtgggctaagcaattaaatcgtccgtttgttgccccggcaatcatccaatcaaggagggattttataaattctcaaggctaagggaggcgggtgtccaactcagtgaaatgcttaccaaaataatttgatttaattaaatcagagaatttcttctcacctttaaagaatcaatcagttttttccagtaaaattttttattataccggagatcaaaaaaaatcgaattaaaacaaaaaatgattaaaaaagcatcggctgatcagtcttctgtcggccattgattgaatgatcagactttgtgcgccccgtgttgcgaaatgaaatgctgtcgttgcacaaatgtgctggcattgtacacgaccaattcaaaccaaatgttaatcacctgataaacaaaaatgaaaatggcgtaaatttaaatttaaatttgaaatgtaaaatataaaagtgccgaaataaaaaacaaaatgcccctaaaagcttttacctgaacaaataacattaccgctccgatacatccggtgaccaaacgcgggtactctaaaccgttgaaatgagtttattaattggttattaattctcaattttttcatttccgtcaattgctcatacgcatgattgtctcctgatgttgaaagtcgctgaactcattcagccaacgttgccaaaagtgcgggacgagcagaaacatggcagccaaaaccaaaaggtacagcgaaccaacagcaacggcaatgccctaaaaaagccgaaaaatggaattaaataaatttaaaaaagtattggcgattaaaacatttgcgcacattggccaccaaaaagggccaataaaggcgcgctgttttggcataatgcgcatagaaaatggaagccttaaattggatcaatttaatgatttgagaaaaggtaattattacgtaagcagcagccaaaattaatggaacagtggcaaagagaaaacggcccaaaatgagcaaaagcaacatcagacaaaggcaggcgaaaatgccaatgcaagcgatgatcaaagcaccaatctaacggggaaaggcaaattgaaaagtgatcggactgatcagtcaatggggaacataagtgaagttgtttgactgatcgggagaagttgactaataatttaaattgggatgaggaagttaaaaaatataaaagtgatcagactaagcaagaatgattgagagaaaatggtcaaacttaaaagaggtggcaattttaaagtgtacggaatgaatcagtcattgggcaataaaatggtcgaattgaatcaaaacaaatttaaggacatttgtattataagagattttccgcttttgtttttagcgaatcacctgaattttgatcgcacaacagcagcgatttcgtgggtcttcgtaaagcatttttctgagaatttattcgaagtaaaataataattttattcaaagaaatttttaaaaataaatgcttacatttagctataaatacagaacaattaaaaatggaaatcctttcacaatttttgatgacacaaaaggacaaagtcaaaatttggcatttatttgacttgactttggcaaaaaaaaggggggaagcaattaaatttaaaaaatgaattttaaaatagaaaaagtaaaatgtaaaacagtgaatccataggatttgtgttactctggccttttgccacataatctttggttgttttgccccgattttctctcccatccatttttctttgtctgtccaaaattggcacaatttccgcaaaatttgcaaaagtgggctccggcttttgatgcattgaaatggatttttgttcgcctcgggggatgaaaacaatgcgggaaaaaaatgagtgccctcggggggcaattggggaggggagggaaagggcacttggccatcggaaaagcggaaatgaaacggaatgagacgggggggggggaatgtacgaacggcacaaacagcagaagatgaacgagggatgagagacgatggggaaaaaagagtcgagacaaattgggcaaaatcatttccggcatttaattgccacacaattgcccaatttatacttattcaaaaaaaaattgtgaaagaatgcgatagaatttcattaaaattatttcaaagaaaatattggaacaaaataagtggtaaaattaatttgcagaagccccgcataaaaataaataatgttggaaaaccatattcacaacgaaggcgtaaaacagcaaatctcccgcggagtgttggcattttaatttggccaatttcgccaacacttttcatttggcctttgtcgcttttcctctttccgcaaaggacaaatgagccttggacaattgagtccccggtactcagtccaaaattcggtaaaaaccggcaaataatttttcattcattcgacacagcaaaaattgtgccaatttttgacagcagcggcggcacacatagaagcagtgtttgaatgacaaagtaaataatatttattggcttggcaaatgcttcttcttcgcgagagcgatgaagcggctgtcagcaaagagtgcccatgggcatttggagagatggaaaaaaggggaaattgtgaaatttggttttatgaagagaaaaacggacggacgaatggacgacgagaagggcatttggaggggaagaagaacaaaacggcaaaaataaagaaacaaaaaagatattcaataatgtatatatgtctacataagtacggtataaaaccaattaaagggcaattaagcatcgaatgggtcgggcacaattaacgccggggcattattatttccggttcgttccgacgtgtttttgttagtgtgtgaataaactcattatcagttgaatttagaaaatggctttttcttttcaaaaatcccttgctaatggatttgtcaagttttacaaattgtgaaaaaaactcattcatattattatatataattttaaaaaagtattctttattcatttggtcttttggataaagcaaaaaacaataaaaaataaaaagcaaattttagtgaattaaaatgacaatggcttttttatattttgaaattcgaagctaataatcttttaggctttgtatatgggaagaaaatataaggcaaagaagggcaaacaaaacgaaagaaagtaaaaggaaaaatgaaaatgaaaagcgaccaaaagaaaaaggaaagtaaaatttaaaattaaaattaaaataaaaataaaaaataattgattttactcaaataataaaaaataataataataataataaaagaaagaaagaaagtcggctgcgaaagtgaagaaagaaaattcgctgtttttacttaatgtttccaccaaagtaaagttccgttggccgccgctttanattcaatttgttggcgccttcggcctgtgacagctgactttattcgtttcttttcgtccgtccaccaaattttgcgaccgatgga

SEQ ID NO: 3476 - DNA, 3245 bp, Heterodera glycines
  unsure (1)..(3245): unsure at all n locations
atcgaaagggagccccnaggctaatncgggattttaattataaaaaagaataacagtatttttgctaaatttccgccagtaaataaaaactgaaaaatattttattgtatttgttaagaaactagggagaaagcacgatctggtttctttattaacaaaagacccatttaatttgttttctttttttgaaattgagattaattaaatttataatttaatttttaatatttaaatgcgcgagcaattaaaatataattttaaaattttccctttttaattactaatttatactcataaatcagttttccatcctatcattatttgcgggtccgttttccactcacaaatcacaagttcagatgcggcaccgggtccttccttcactattggacttgctgtgaagattacccatttgagtgctgcttccattttcagccctgggcaatgtaccgtaattcacttttaatttaaactttttgccaatattttaatgattttttttattattttcattaattttttctcaaatttcagcgtttttctcgccatggtcgctgttattctcgttgctgttttactgttcggaatcggccgatttcttatcgcaatgcaacgggaggaaagatgaaagcaaaagtaaactgaaagattgagaaatattcccataattttttaataaaaaaataaataaaaataaatggcaaaaatttatattaaaaaaataatggcataaaattgaagagcacaaagcaagtgatcaatgatcagtcagagcattttgttgggttcacgcagttcaaaagtgaacacaacggcaccgccgtcgcttttaatgcgcgatttttgcggacacaaaatgcaattggaggaggaaaccaattggccgaaagcaacgcattgattggctaagaaaaatcacataataattaagaaatgttttgatcaaaatcacccaaattccattggaatccgtcagttgtgagtcgaagcgtcttctgctcaatcgggaagagaccgcaagtgccggtgatgcgttcggcatccaattcgacgagcatttccccctcaaatcggacggaaagcaatcattagcgaaattaattagcactttttcaaatcgaattttaaatatccaagggaagtgggttttctgtttttacctccggcagcacagtgaggacattttcattgtccacagcaaacaatggcacctttttcatggttagaattctgaattaattgcccctcttgggacttaattaatgacgaaggattacggaattttgccttcgctttgatcagtgttttccagcatttaatcactttttgggtgatcaatcacttttttataatcaatcgaaaggcatccgccgacactcatttatttctccactctctgctgctgttctgattagtctctgtttctacctgtggccattgctgcacgtgcagcagcaaagcgtgcaatgcgccgaggacgtggtcaaagcggccatggaagccgccgagcaaaagaataccggacaaattgggatgcttaattggtgcaatttgggtgtgtccaattaaaatggttggctttttctcctctccgtccgtccgtcccctcactttttcccccaacgcttccaatgccttcgtcagatccgtgctgttctgatccggtacttttcgctgttcgcagttgccaaaccctccgaagtggtgccgtgcctcggcactgattgagtcgaagtcgccaatgatcaattcgggtactttgagttgatcagtgctgtcatatcattgttgatttgaattattttggcgttttgttttagtttttgtgaccctttattttattttgttttgtttggggtatgtgtgatatatgtgctcttcctaaatttgtaattgattgctgtgtgctgttttattaattggaagtaaaagaaagcagtgaaaagagacggcgatttggttttggatttgggatacaattcccctttcccattggactattctttttcctacgacgtggcgctcctgtacaaaggtggctcagcagtggcaataaacgacaaatttggacgagcaacgattttaaaaggaaaagtaaatccttctgcaatttgtaacaggaaaagcaaatcctggtctctggaaaagggaaacaaatccctactgaagtttcttcattggttgtggaccacaaaatcagtaaaacgggaaaactaaatccctcttcatatcaaaaaaaaacgcagcttcgaaaaggaaaagccgtaaagtgtgaaacaaatcacgaaaatttgtcagttcggtaaattaactccgtctacaaaactgacttcaaaaccgggaaacgaaaatcccatttcaacatgaaatttcttcgtcaacacaaaatttcgcccgaggaaaattggaaagacaatcgcaactttttggtttcattacaaaatggtggatgcgaaagtaagaaagaacaaaaacaaatttgttctttggaatttctcctcactctggaaaaacttcccgaactaaatggaaatgaaggacgagagcaaatacggacatttttcaaaaaattttcgttagctaccgaagaatggccagaaaaacgccgaatttcagcactcgagtgcaaagtaagtggaaaagcggaacgttctttcagcgccgctgcagtgaatcggccggctaaaaggagctaataaaacgtcgtcgcgaggacgcgaaaaaatgacaaaaaccaaaacggcaagaaaaaaaacgtcgtaggaaaaagaatagtccaatgggaaaggggaattgtatcccaaatccaaaaccaaatcgccgtctcttttcactgctttcttttacttccaattaataaaacagcacacagcaatcaattacaaatttaggaagagcacatatatcacacataccccaaaaaaaaaataaataaagggtcacaaaaactaaaacaaaacgccaaaataattcaaatcaacaatgatatgacatcctcgccctctacaaagcgatgtcctcagcgcttcaaatccatcgaggggcagtaagggtggacaatcagcagtggcacagaccaacatcataatttgacctgtaaaatgtgcgaaaaaaacgaaaactacaattttgaacaggcctgatagcgtgacttgacgcagctttattcgtaattgtgccatcaacggctgacaattttcgttctgtgtcggctttcaacaacttcgtcgttggacctgttgatt

SEQ ID NO: 3477 - DNA, 2707 bp, Heterodera glycines
  unsure (1)..(2707): unsure at all n locations
cgagttttggtgcgcaagtctcggagtgcgctagggggctgggcgtcgggaaagtactgctcaaaatggcgtcagagacaaaattccttcggcgttcagcttagggggtggtgaattgatgtcctgtgaaatttgaagtcaatcggacaagggctatgcgagttttagctctcagacacccccacccccagttctgtactttgctaaacattttaaaaaaatttttatcataattaaaattgcaaaaatgaaaaaaaaacacatacgaaaatgataactgattggtcctcccttttcattgttggttctcggcatattggcgcaaaatctcggcctcgcgttcggcgcgctgaagaagcgcggcttcgatggtaggtgctcgacggtgtccaaaaagaaaacgaatctgaaaaaatgtgatgaaatttaaaaaaatgataaattgaaaaaaaagaagcttacaattttcaggtcttcacgccaccaattcaagagcaaatcctcctctgcgtcttcaatttgtgcacgcaactcggcgtcttcatctggttgttgatgcgggtgttgaacattgtcgggttgttgaaagggacggtccgaaaattcatttggagacatttttgtaaaatgaatgatgaaaaagaatgagtagctttgagaatgctccatcagcttgagtcattatctattttgtcatactgaagagagagttcattgtcagttttctctaattttgcatcattttgttgcgaaaaatattggtggttgtcgagggatatttttcatttcttccattactgtttcggcttcgctgggagagaggtgaccgtgacttttaagccaccgaattaaaacgaaccaaaaaagcaaaaacacaggaaatgcaagaagataatgagaaaaaagcagtacatgcaaaagagtttcattatgctcttctgggggattcaaaatttgtatgtcgggttttgttgtattggtgttattcattttaacattatataataatatttttatttatttatattttatccaagctttgagtcggtcacaatgtgccggttataatcaaccataatcatttggtcgaattcacccaagacaatcatctccacgccaccaagcggaattggtgaattgaatgtggctcgtacgtttgtcgtaccgcttctcaacagctcaaatccacaactgtcgtcaagcgtggaagtcaatggaatgacaaaaaagatccacccttttttgaactgggccattgaaatgtcaaatgaacgttccgagttagccattccgagtgcctcatacatgtcaacaaaggcgctgacaaagtgatcatttgaaaaatttagtttataaggaacagctgggtaaactacgccaccagcatgtaccgaaatctcacgcaaatcaaacggctcaaacatgaagggactcagtttgtaatcaccatgaaatgctgaatttcctaccaacgctattgtcacacgtcgaggaatggttgcactgaatacattgtactcaaattcgtatcgaccaacactgatgaatgacgacttgatttcggtcttgcgtactgcgtacgtggcgggttgtttttcaaggtttttgtaaaggttcatgtttagtgagggttggacctcaaccattttggcataaatcttgacatcgtaaactgtcatcatttgcttttaaagtttgcaaaagaaagacatctttagccttgtaaattgtgaacagcaaatccaaattgtttaaaagataaagctcctggtttcccagatcaaagtcgagacgagagaggaattgtgcattttttccacccttgaaaattttacaacgctctttgaacccctcgtctgttgagtcatcttggtttatggtgtgataataccctgttgaaccaagaaaatttttcttggcatttattggaaagcttaactcattagtgatataggccttgaatgggtataagtttccgctatcgtatacttccgtattgccaaccgtaacttttagttgctggacaaatgtttgaccaatcccttgaatggcagagacactagtatccgcatcatctatcgcaacccatttatcgtttgctcccggtttttcaatggacagttcgagataaagatatatccgagataaatcagtccacaaattgtcactgtacagtcgaaacaggtacggtgattcttgcgtgattgttgctagcggaagcacctgacgaaagaatgaacgtacaacagaaacattggttggtggaactaagaaaatgttcagaccagtgttaattgctagtggactgctgtcgctgattttttgtgggcaagtcatttttttaatagattcctaatgagtcaacacgaagacgtttatttttggtcttatcaaccattggtggcccgattgacgattgaagtttatttatattttttcgccttattttttcaattttgggagccgagtcttttttgtatcgcttaaaatcaaaaccttgacccttctgagtgtttatgttgttggctgctttttcgagaagattctttagtcctgccttactcacactaacgagagactctttgaggttttttccctcagcacattggtgagtactcgatttcctgtttccattccctgacgtccaattgcggagccattttgcttntcatcggcagcaatatctcataagacttctgaacactgc

SEQ ID NO: 3478 - DNA, 2226 bp, Heterodera glycines
cacaaatcgggaacgtactattggcctgtcctcataattaaaacaatacaattttaaattaaagaatcaattttaaaataagaatcaacaattagaaggaatagacaagtcaaaatatgaacacagaagctttttaggcacttgggattgaacataatatacgtttttacaagggacccctcagagggtcgatgctgttgttattcctttctgtcgatgccttttccgccggttgtggcggcggggcaatgcgtgcgggcggaggctcaaacattctctcggtcaaatacccggcaacagaagaggagccaccgctaggaccacctgccgaatgaatgaatggtttacacactagcgaattcatcagaaactataaattttctaaaatttgtccagatagcctattatggcacaccaagccatctaaatttttttttgcgaaaaacagcgacttccgagtgtttgccgacgatctgtccgactcactacgatctctctcacccgttatggcttgtgtttgagtgatggtaggcaaaaacaagtcgtgccgttggtctcggtactgtgcccagatttgcgatttttgtagcaattgcgtgatacgttcaccaaagtgtgcgtctcttgagcaagctttgagtgcgtcggcaatttcagcttttgcagcggacggattatttactcctgaaaagagattaataacgttttaaattgatttgaatttaaaggaatggaaaatgtcccaaaaagagactcacctggtaacgaactgcccaacattttcaacaagtgatcgaccattccgctcaacaacatttgttccgccatttcaggagtacatctttgagagagcattttgagtgcatgggccgactcccgggccaactcgggctgcattcgcatgcaaaccaaaagcccttttggaagagaggggacagcagcgaacgcagaagcacaattcttaaacagcggaaatgaatttaaagcccaaattgaaaatttatgactagtttcaaagtgtaatgaatttgtgtgacaattttccaatcgttaatatttaccaaattttctgagagttggttaagcactctgagagcagatcgcgccacatcatcactgagggtcgattgcatcgcttgacaaaattgtggcagatatccttgtgcagggatctaaagcatacgttatcagaccaaaatcattttttaattttgttataaaaataaaataagaatatacaaataaaaaaaagcaacagtggttcagttgtagaatgctcgcctggccatgcgggcggcccgggtccgattcccggccgttgcaattcttgtttccattattcacatagacagataacttttttataattgaattttaagtcagctatcaataaacattaagatcgcaaacatttttattgtttgtttttgcactgcattctgcattaccatgtcagtggtcgtcggatggtgtgctgccagcagaatcagtgccttgctgacctggtccaacacatttcgccatttttgcacttcttcctcactttgcccctttttcttttgatggggcaattgccaaagttccaacaagcgctctatcaattccgtagcaaattgacgcgggtggcgaacctttgttggtttaaaaatgggaaatgcatcacccacggaaactgaccgcccacgaagggttagcgatgaataagcgcaagaaaatgccaccgactatcaattctccgctaatcacttcctcaaaagcgcaccgattctcaccaatgatggaattctacggaaacaaaaaaataaaaatcagaaaattataatttaaagtattacggaattccacttggcatttgggtctttctgctgggcattgatgagttcgtccaaacttcggcgaagaatttgccgaaccccatctcgcatagtgtcgttccaaattagctcgggattttcagtatttgtatcaaacatttgaatcctataaagggatgaatctaacgatttgaaattggcatcaatggaacaaacgcttgtccaggattgtctctcaacgcatcggcaaaggtacttggcaaaaagcgggccatacatcgtgcccattttggcccagtcaatttatctgcttggagtttggcaagcagttcagcggataatattcggctagcacttgatgacccaggagaaatttctaaataaaaatagaattaaacaaacatttaggttt

SEQ ID NO: 3479 - DNA, 4568 bp, Heterodera glycines
  unsure (1)..(4568): unsure at all n locations
aaaaaatcacattttaaaattagaagatttcttggagactttaattctgtaaaattttctcgacctttgtgaagcttagaaagaagagtgagcagaagtggcagctgaatggagcaggcgatgtcgctgacgcactctttgttgttggccgcgatcgaaatgatttgcaatgccttcagttggatggctgatagcgaatgaacacgaagaaaagcaaaaatggcggaaaagtggccaattaacagcaattcaatgccttaaacgaaaaataaagaaagaaaggaaggacaaaacaaaacctggattcatcatcagcacattacgcaacgcctcgagcaccatccgaacccgttcctggagaggaaagcgacccccggaagcaccgtttagattaacggtgccaaaagtggaagaatgcgtcgttatttccgggttggaagcattggcgttggcaaaccgtccccagtcgacagccgggtgctcctcttccaccacaaattcggttgtcaaatctattaaatcggcctcttcggttttcgccggcttaaataaacaggttagtatagtagtcaataccaaattctcattgatttttttttctctttcgctaatgccctgccgcccgtacaaaaaatactagatgctttttgatcatttcctcatttaattttttaaattgatggtcctatcctttccccaattcttactactaaacgtaccttgggcctggacagtgttgcaatgttggttccgtttaatgaggaccctgctggtcttgcgggtaaattcaagggtttcggggtggtaatcggtttctgcttcactgccgcaggtcgaacgacgccttcaccgataaggagttcctccacatgtttagatagatagtccaaaaagtccatgcacgtccgttttggttcctttaccgtaattaaggcaataaataaatacttttaataaaataccagcagtctgaattccggttgagcgttgtaaatacgcacgaatatttcgccaaccaccaattctgttgcgtaaatactcagtttgaattcggcaccaaacatttcgctctagataaaaaaagatgaattactaaatttgaattaaattaaattaaatacgttctcgtgtgagtttctttgtttgtccacaaaatcgagcagttcagcacgagtggagttgtcccaaatcagataggggtcttcggtgtttgcgttgagtaatttcaacacaaaatcattacggcactgttcaacattgggcttggcattggccattccctcttcgtcctcatccccattttgcccttaatatgataaattttaaaaatataatgtatatttttgcactttcaccaccgccgttgggagctttggctgatgagttcggctgttgtttctgctttacattctgtgctatttcatcgtcatcaccaaattgtaaaacattaacgggcaaagcaatccgagccaattgcatttgacggcaaatgaatggcgttagcatggcacgcaaactttaaacggtatcataatggagataaattcagcaatcgtttgcctaattgtaagtaaccaccttttttgtactccatcattgtccggcgtgtccggacgaaagccggccaaacaggcaagcgcttcacaacagttgcgggccagtcggttaagtaccgcttggtggttcgtcttctcggaatgggcaaccccttggaattggtatgcgtttattttcaatttggctatatttatttgttatattgccttccaaccaacctccttcgtccaacgtgtaatcgaagcgaaaaagatgaggtaagagttgccaaatgacacccgcttgaaacagttgcgtctgtaacaatgtgcacactgaaaaggcacaaacgcactccgccgcagcgcaagccaaccgatggagagacttaaaagcatactctgagtaattttgagcaaaaagcaaatcacttcgaatctaagcagttggcaaatgctttggaacaacgttttcatttctgcaattttttcacggcacgcatcaaaacgggcagcggtggcaaaacaattgcacacgtgagtacaaacttgcactggcatttcgctttcgagtgaaccagcagtaatcatcggaacacaccgctcaaatgttttgtacagagcctgaacacagcattaggacttatttatcgcacagttaatacattcgcccattagtacatacatctaaccctccgtcccgtcgcaactgctccgcattcaatgacgaactccttagcgtccaatggcataactcaacggcagcaaccagcaattgaccaccgtcctccttggttcgagcaaacaatgtgtcgtcggacgactcgagatcgatggttttgataagttgggtatacccggcatatttgtatggcgaaagcactaaagaaaattataaatgattgattttgcaccgaattgctggcgaaccttgtaagttcctcttgtatacaatgctttgtgcacgaatgatgatcactatgcgattcatgtctggcgttgacgaggaattggctctgaccagcgtcgatgtgaggaattcgtaggcgtagttgatctgctcaaactgttcccgaccatccgggtttttgtccgggtgatacttttgtgctaatttgaagtaggctcggcgcactgccgatgcgtctttccacccgccagtggaatccgtcgtggacagccccaggcgttcacaagcctgctcaacagacattttcgccggtttgcgcgtgatttcatcatgccaggcggagagacaggcccgcaaaaaatcgacaggctcgcgaataggccaattcggaaagcggtgattatcagtcaaatggcgaaggtaatagaaatggcagaacagctcttcttttagttgtggataatcaatgggaggaataggacaatatctgacaaaaataataataataatgggtttgaaacaaataaaaagtttttggttttcaatacctgtaaagtgccttaacatttgaagaaagtctggacgaaaaatcggacacatgaagagcaatcttttcgatcatattccgtcgcatttcactattccaaatacattcgggattctcaaactctcccagaaaaacttcggcatatttttccgctccatattcctagaccaatttttgaaaaagcaatacgaattaaaaattcacctcgaggtagaaaatatttgcttctggcaacattgggcaaagcaccgaacgggaggcgagctccgacttggaaagagttgaacggaatgcttgtctcaaatgagtgtctttgaggaagcgagcaaccggcaaaatgttggacccattgtacatcaagataaagaaaaatatgcccgacaaatacagtctcgaaatgtaagggttgtcctgcatgacatcgttgaccaaagttgcaactcgttgcacaatggacgggtcgtaagtaagcaacaactgcaccaattggtacagcaacacgggttcagaaagcacttttttgattcgaggcattggacgaatgacagcgtctgtctcatctctaaagcacttttaagcaaaaataaaaaattgaacaattgacacttaaatgtaatttaatcaaaaagttaggggtagtctgggaattgaacccaggacctctcgcaccctaagcgagaatcataccactagaccaactacccacatgataagtgcaaaggaatggatttactaatgataatcatttggtgaattattgctgtgaaaaaaatgaaaatttactgatttatcgccaaaccaccaattcgttttattccctatatgaactaatcctctgaggtgtttattggtgggggtttacctggatgggaagaaagtgcacatttggatgagagtgtcgaggatcagtgagcataggtcagtgaggttgtaaaggcccatcggcagtgtcgttggttcatcgtcccttctttctattacggcttcgtccccaattcctcggtcaatggttgatgaagcgcccagttttgcattgccgacacaacaaacggtccaccgaaattgggaaactgacgacaaatggcaccatttgtccaatccttctgcccaaatttcactcttctcaaaaagcacaccgtcgcggtataaacgcttcatctaaaatgacgacaataatttaaattctttattggagtaaaatgattcaacttttttgaacgaaatcggtccttggcgttggccctgccggtcgttgtaataccattcttttggctcagtctcctcacaatgtgccgcatctttggttgcctcaatcacatttgtttggccgtgaagttttgctctgttggtatgcaaatgggccaagactgcaatgtcgatgaaaagtgagatcaaatttgcggagatcaattcacgtacattttgtttgtcaagtgaaagcttaaatattatgggaaattaattaaagaaagagtctgttttaaacaatatttggtttaacattatttattnnntcntctcataattacttataaagctaaattctagtcaaatggttatttttaaataaattttt

SEQ ID NO: 3480 - DNA, 3704 bp, Heterodera glycines
catggttattgggtcgtctcataattattaactaaaccctttaaataaaatggttattttaaataaatctttagagtacatcaaaatggacctgcccacactctacacccatctgctaacatatttccccaaatttccttatgtttcaagctaaaaatgaacaaatgctttgattatgataatactataattattatgaccaaataacatttcctcaaaagtaaaataaaccttgttaataaggaacaagaagtggtccctttcagcaacatttgtgcatttggccaacatttccacaatgtgtcgagtgtcagcgaacggtccaatgctaatgcaatgcctttcgtagacaagtgccatcgctcgaaggcaaatgcatcgcatttcggtacgttgagaaagtaaaaaacgatggtagattttattgaaaaagtcctcggggcgatggatgggcgttgcactgttcgaactgttctcttcggtcaataaaaagcgaagataataatcaccaattcgaatttcgtccaatagtgagtcataagttacctaaaataaaataactttattaaaatgacaattttaatcaaaacggtaaccaccgtaaattccgagtggttccatgatacggtagttccgggttgaataaattctaattcctgctgcaattggcgccactcattctcaattgattgtcggaattcatcccgagtcttttcgttccaaattaaatcggcacgggcgtgattttggccaaattgatagctaaaataagttaatgggacggaaataacaaatgcaaatcgtaatcaaagaatgtaacaaatttacaataattaggcaattaattatgaagcagaagccacgcataccaaaacaacttccaatttgcagtcgctttgaccagtcgccttcgcttgcgaagcacgactggcctttgctggattttctgctgctggtgttcctcacgaattcgattgctctgtaaaaagttgagcttctgttccaaattccaatgttgcagcaacgagtcgagccttgcctccagcgtcacttgcacatttctgaaacgagttgtttttcatttaaaatggccataatccggaagttgctcgaaagacctgaattgatcctgaagctgtgcaaacggacgctctctctccgaattgttggccatttccaaattattgcgaatagtcagcaagtcacgttcctcggccaccgcagaggcaggcacatgctcattcgaatccaaataatcaatgagccctcggggctaaagcactttttaaaatttatattttggcttttttataccaagcatcgttgcagcaaatccttcgctgcttggttttccgcaatccaaagtgccaccaaatagccgctgagttgtttgttggtaagaacgcgaaggtctttgccagtggaaagaagggccaactccaaatgtttgagaaaggctccttcggtgagggccaaaagttgcatttgacgactgatctaaagacaaagttggtaaaaccggattgtttttatgttccgcagtggtccaatagcaaatttttaatttaattttaaatgatttaatttattatgtttaaaatgtagctaaaatgtacaaattaatcattttatgtttgatattgccactccctcctctttttcagttatgtctcttacatctctgcccgactcttcgatgatcgctcgcatgaccatccccgcccccttcacaatggtcatagacggatgctggaaaagtttgtaaaaggttcgtccccgctgtgcgaccatcgccaaaatcgaatcgaacgtatcgcccggggttgtctcactgtacggggcgcatacggtgaatgtgagaaagtccaacatcgaggcgatgaccaacgcacctgggcaatcattttgaaaaacgataactttggttgatttgatttgtttaccagtcccccttgccacgtgttccaccacaagttgaagcaaatgttcaacgaaggcacggctggagagaagtgattgtttgttcagctgctcgatgcgcaagtcgaagttggcatgcattggctgcatcagtgcacataacagctcaaccgtggcatggtcaatcgcttcgcagcgccgcttcagcaccgaaatgaccagcgaaccgagcttctcgcggatcctaaataaaccaaaaattacacccaaaaaagcaaaagctgccatggatattttacttgagaagtcaaacgaattgcaattaactgacccgtcaaccgtagtgaatgcttgaaagcctgtttttgaggcgaagagtctgtgaaggcaagccaattgggcctcaatgcgaatgatcggttcggtagtgtctacgacctttcaaagtcttaagttggtgaattggaattatctcagcagatggcaccggggcgtgcacattgttgaccactcgctgcgtctgcaccaccgtgtcctgctgctgctgcacaatttgttcagataagacagcgtccaaacaggcaacaattgtctttgatttgttgtcggtgaaaaaccccttaagtattgaaaaacgaattaatacccatttccatgtcaaattctgggatagtttcgacccgaagttaaatcacctcagattgggtcgagtgatacagaccattataaggaatattggcattgaaacgtcgaaccatgtcaatacgttttagaccagctgaaaattggtatgtccataatggcaggttaatcaaattaaaaaactcacccggcacattgatgatatgtttgagcagaagaacctccgaatcttcgtccaaactttgtccgaattgaagcattcgcattgcacggaaatgcctttggcttgagatgagatggacttggtaattgccggaaccacgaattccatccaaaagggcagccagcatagaatccctgaaaaataaaaaggaaaatgaatataaaaaagagaaaaccgttcattggaactgaatgtccgctcaacgccacattcgtaaacaatggtgaatttttgcgggtcattaatatcacggacaaggcaaacaatctgaaaaattaaaaaagtcgagaactttagagattcatagatttaaaacatggatttattaagtcacttgagactgaatgttatttggaaaacaacatagaattaacttatataacttaatcaaaaaaattttatgtgatttttttctacaagtctatttaataatttcgatttggtcagtttccataagtaatattattgtcgttgaacaattagtgagggttttgtggaattatttgagttctaattaacaattattggaatgggaagaagtttttctatctaatgaaatcatttgcatacattagaaaacaaaaaaaaaatcgaaagaacccctctaattatgcaacaacctaataatataatggaaatgaaaaccgtgatatgaaaacaggcagctttgatttaaaataaaaaaaagatttaaatataacaatttaatgaacatcattacaggacaacttatgaaaaatgatgccacaaattccctttatttttgttgtcccaccgttcggagtgatctggcacaaatgacagcgtaactgatcgggtctctctctatgatgcacgactcgctaaggcataacaatcgccgcgtggacaacgcattttgtctggcctccgacgacgccccgctgccgcattttgcagt

SEQ ID NO: 3481 - DNA, 1908 bp, Heterodera glycines
ccatttaattaaaaaatagttttaacgatttttgggggccccgaaaaagtgtgtgtgtgccatgccattcacatttcggcactttatgggcctgtaagcccaattttgccgaatcggagaagcacatttaccaaatatatatgcatttttttcttccatttcacccttgggagacatttcgtgtgccttttatttgtgccccgtccgtcggcatttcttggacaaaaataatttactttatgccaagaggggagcttcatcgcatctcatctcatctgcagacggagtcatcttccgttttgcgatggatgaatagacagaccagcggcagagcaataaatgaagaggaaattaaatattttttgtacccattcagaaaagaaatgaaaacgaatttcaaaaaataaataaaaattaattttgtaatattgaaattaattaaaatgccatttttacattgaatggaataaatcatgaaatagacaaaattaatcgaaaatattttccaatggaataaattcaatttaatttggatgaaagagactttttgatttatattctgtcccatactatgtatgtgtacgtacatacattgattgaattgtgataaaaattttttgaaagaatgtgtaaaattatcaggaatcaaatttgttaaaaaaaattctgacgtaaattataaatttatttatgaaaaaatcagatgaaaaataaaaataaataaaaataaaaattacattttttaattttacagttaaaataaatgattattatcaaaaaaaaattgatgaacatataatttccctaaatgttgaaagtgcaaaattacagttatttaaaaaatatgaaattttttgtgttggtaaaagatggaaaacgtgtatgtaataaatgctatttttcccacattggcactgtgtttgttgtgtgaaaggtgtgccaacgaacccactcattcttttgctcccgactcagagcttgggcacattccactcgggaaaagaagactccccgtttttttgcttcgagaagccggcgaaagggtgtaataattcgagaacaattagtgaaggctgctttggcattggcatttttgccttttttcgtggaaaattttttacttcccttataaaaataattggctaaacaattaggaaaataatgcatgagtgtaaaactaagaaaataaagaattttcttggaaaataaaaataattaatttttactaaaaattaagttaaacttttgggaaattttaaaattaattataattaaaaaatatataatacaaaataattctatttgaatgccttaagtgttgcaaaaatgtcttcttccattttggaaaacgtacatattttccaacaaaatcaaaaaaagaaatgaaagggcgatgatttaagagcccccattatccatcctttcacaaaatgactttcttaagcctaagtcgacagcaacaaaaggaggaaaagccctcgtcgcgcttaacacttgcgcttcggcggcacagcggataaacggggggaggggggggggggcaaagggacgacagcggcgggcgggcggcgggcgggacccaccacgggggcggaccattgcgctgacgcattatcgagcggctttgagccgccaagcgccgcagaatggcgacgatgccgtggtgagttggcggcaatggagcgggtgggtggggggggggggagactccggcggcgatgccgagggacaagaaaaatgagaatgggccaaattgtggcagctttacagccaggaaatgccacccctccgccctcccctctttcctcccatccccgatgcctatccgccgttgttcgttagtttttgagatggggaattaacattttgttggtagtgaaaaataaggggtgcggaaatgcaaaaacc

SEQ ID NO: 3482 - DNA, 2344 bp, Heterodera glycines
tggggaaaagagtgaacgacaacggttaaatgaaatattgttgcattgacaggtaccggaagaaaggctctcggaagcgatggttccttttgaatatgcaaaattaggctagttatttcatccgccaactctacttcgttgcgatttgggagaaagggcaatgagtgggggacgggaggaagtggaacagaaattggaataagatggaagcaaattaaaagggtaagttatatgagagcttgggtaattgttagccaaaaggtcagttctcggacgttgactctctcacatttcattttcgcggccgctttcctcgttgcatccggccaaattccttccgtccaccaaatggagcaaatggaattgcaaagggatgggcggcaaattatgggaagaaaacaacaaaaattgcattttacatagccaaacgaagtgagtactcaatccgatggcttcggcgaagggacgcgcggagtgttatctcctccgatttccattaaatccaatgctatcgaatggtgtctcatacaaaacgttgcgatgagactccggcggcgatgccgagggacaagaaaaatgagaatgggccaaattgtggcagctttacagccaaggaatgccacccctccgccctcccctctttcctcccatccccgatgcctatccgccgttgttcgttagtttttgagatggggaattagcatttgttgggagtggaagataaggggtgcggaatgcaaaaaccatagccgtttttgaatttaaatttttttccgaaattgtgtagtcctctataaatttgaaggccgtgattttgaattcgggtgaaataatttttattttattcacaaaacatgcatatataataattaatggtggagaatataaatcttggcacataattagcataattaggatacaaaagatttgtcactaatgacttcgcacaatttttgttgtgttttatttttaattaagaaaaggatagaaaacagactcagaatttgtcagccaaaaaaataaaagtccttcaacgtcaactgaaaatattattggttttaaaggtattttaataacactaattatcggattttctatggtataattaaatgggattttttgtgtagcaattataaaacttttcataaagactgacaaagcgaaaacaattttgacaattttgtcgagagcaatttaaaataaactcaccatgataaaattgatactaattaataagcaaattgatgttgtttcattcgatccgttatttgtccaagacaataattaattagtcacataataaagagatttacatatttatttttatggaaaattaaattatgtttaaaaaaaattggtacaaactcagccactaacgctaatgtaaatttaacggaaaacggaattccgattaacatcaagcatacttaaaaatgattgtttattatgaaaatattgcataatctgataaaatgatattccaaagaaagacaaataaaaaaaattatgcgtggaaaataggaaacttccgagccaacgctaaaatataaataataaaattatttaaaaaaaataaattaaaggaaatgtttatgaaatactccttgaagacagagtaaacaagttgaagaacacgtgaaaaaatcagcaaaaagtctatctgtatatgtgtaggtctacaacaaatttggcagtataaaatagaggggcatttccattagcatctatcctcaaggcttccataaaaatttaaatttcatttttataatccaatttcataaaaagtgatcgtaaaactgatttggcaatgatcaagatcaacgggtcaacctttatcattgtgttcatcttgcacagtttccgtggtaacgccgtctcgcataaccatgtggcaattgaaggtaataaaatatttaaaaatatggggaaaatttcgggtgattaaaaattaaatttttattaaaaaattttccatattttttttactagtttttgacaacagtaaatagtcaattttcggcattttatcttaacattttttttttgtattttacatggggattttccaaaatatttaggaaattttaaaaaactttaataaaaaacaaataaaaatatttttaatcctaaattaaggcaacaaaactgtgctaaattatgtggaaaatgcggtaaaaaatgagaatcagttgcataaactgtcccaatttgccatcgaatgggccataaaccatgcgcttgttgttcgcacaaataaaagattttcagaagggaaagtaattaccgtaatgtatgtacaattgacaattattttttctaaaaatttaatttaaataattttaaa

SEQ ID NO: 3483 - DNA, 1325 bp, Heterodera glycines
  unsure (1)..(1325): unsure at all n locations
aaatcaaacaggtaaaaaatacaaaatataaattataaaagacaaaattaattaattaaaatatttttgcaaaaatatttgaaaatggcattatacattttgaaggtggaggtgaactgcggtgcaattgccagtttggcattggacagcaaaatcactgatttgcacaccgcgatgctgaaaaaagttggcataaatgcgtccaaggatgttgtgccggtcaacaagccggaccaggagttcatcaacatgttgcacttggcttggtaaaaattaaataaacatttcttactttgtttattaggcttcgaattaatgatttttaattcgagactcgtacttaaaaaagcgggaattttctcgcctctttacggacaacttaaaaagagtcggaagacaaaatgaaatattcaatgaatttgtagagtcaaaaaatgagaatttttgcggccaaactaaggaattggcctacaaatcaagagccaaaaaacaatttctcgcatggatctttagacttcaaaaatagattttcatggattcattaattgctcagctaaaagcatttaagcaaatacaacgtataaatttaggcaaaaattcggtgatccaaatgccatcgttgtgatacttcacttcatcaattcctcgccatacaaccttgattacacaaatgttgaaatggaattggcccgtgtgtcgaatggccaaataaaaatggactttgtctcattgaaagagggcaaaaggtagcaaattcaaattattaataggaatcggattttagatgattttattaagtcgcaaaaataagtacctaaaaaatcaattactaattattagggctgtaaattatatggaagaaaaattttaaaaaatgcgcataaaatatgtaaaaaaaaatcccgaaatatataagaaatatgtacaaaaacctcaaatatgtaccaaaatatgtaaataaaaaattatatggttttttggataaaatttttttttacaatggcgtgaatgttgaaaaaatgccataaaaagatatggttaggctttgaataacgcttcagctttttaagaaatagtaatccctaaatttattttaaaaataatttaaataaattttaaatttcagactgaatcttgaccccgaaacattcacacttcgtttggatggccgtgttgttgctgttgtcaactccggaacatctgcacttggctatctagcgaatcgagccgaaatggaaactcgntaaacaattgaactctcgacggcaattgtaaaaaaaatttagtattntaaatttataattatttttttttcagaaagcgcc

SEQ ID NO: 3484 - DNA, 2340 bp, Heterodera glycines
aaaaaagaaaatttgcagctgctgtcaagcccgcgttttggacgcttttttccgcttccgagtgacgcgcgcacaattgatgcatccgcgaaacattcactggcatgtggcactggaaacagacgaccatttgaccgaaaaaataatacaggtaaaaaaataaatcaaaattaaatttttttaataaatgatttattttccaggatgccattcaaaatcccggcaattatgtgctcaaaccgaaccgtgaatgtggcggaaacaattatttcgatgatgagattccaaaaaaactgcaacaattttcgcttgagcaacgggcggcacacattttaatgcaacgattgcatccgttgcaagttaaagtgggtgaaagttgagcccggcgcgggaatttgtaggatagaaaaattttgaatattcgattttctcttcttaattgtgtccgggattcctaattggccgtaatggatgtcgggtttgtgatcaacgacccccgaaaatcctagaaagggtgtttttcacggcattttaaaatgtttaattttttcgaaatattgggcgaccaacgccagtataaaaaatttttggttccaattgctggaaaatggattttttaattagttttccaaacaatttagaacttctttttgcgaccatacgctaagccaacattgtgcaacaccagcggcgagttgggtgtgtacggttttctgatgggcaacatggtggacggtacggtagaccgtaatgtgcaaagtggtcatctgttgcgcaccaaattggcccatgtcaacgagggtggtgtgattgaaggcgccggtgttggggacacgccatacttattctgaccaacagtatacctcaatgctagcagcaaacaattttgtattagacaaaattttggcatttttcccgatgaaattagtgtccaaaaaatgatgaatattttgtattagtgttgatgttgttttgattactaaatattcaataaacatacatatattgttgatttgccattttgttgttgtgaataaatttggcaaatgggaagaattattttttaattttctttaccattgtgaacataaaaatcaagttgataactaggcatacgatttttaggctctaaaaactgccaaaataggtaggctttaggctctaaaaaaccccaaaaataagcactgtattcaaaaaagtaaaaaaattaggcaaaatcagtattgagataataatttttaaagcacaaattcttgtcaagaaaataaataaataaattttggagatgagtttttgaaaagtttttcatttcttaggggtgtatgtttgaaaaatttcgggtcgattcttaaggatgtattttttgaaaaaatttttaggtcgcttcttaggggtgtatttttcgtttttattgcatttttgttagtaattttgggcaaaatgccaaaataggcaaaaataggctcctttcaaatttttttaggctttataggcgctaaaaataaaagcctagaaaataggcactaataactcgaaaagtagcttaacaacagccgaaaaaacatgtttttcatgcatttcagaccatagggagctcaggaaaaaataggcttttgcctataaatattagccctagtaataacctagaaaatgattattttataattatatttgttgaaatattgatttgttttaaatttattatttataaatcaaaatgaaacaacaaaatttaataaatatataatgatatactacaactaataatgaaaaatattgaaattattataatattttaaatttaaaatttaagttccaaatggcctttatgattatgaccagggctggcagatgaaaattttcaaaagcctcattttgagtcaaaaagcctcattttcacaaatttattcaaaacacatttgaaatgttcaaatgttatatttttgattgtccaagatcaatttgagcaattttttgttagaaataagcattttgtgaaattctgagcacgaaaaatcgaagttgattttttgtggcgcttttttcaaaaactttcagggaataaggggccggcggtgccgataggcgtcgccgggaaaaatttttgatttttattacgatttgttaacaaatttgtccacaaaaatgttcaaattttacggttttgagcaaatttttaagaaaataaaggatttttaaggtccggcggtgccgataggcgccgccgggggaaaaattaagaatattgactatatttttagctgattttcattaaaaaaattcttaattttgtgattttttggagaaaaaaatggatctttactggattttataaaaaat

SEQ ID NO: 3485 - DNA, 5187 bp, Heterodera glycines
ttaaatttcaactggtgaatcatttaggaattaaatcatttacattcttttaaaatgagtgtaatgcttaataccgaccagcagaagcagaatttggacaccaaaacatctcaggtgaagaggacatttagtgatttaaacaacaccttatttatgggtgtaaagtctgttggccagggatagggagacctgaaaacaatgacattcagaaactcgaagtgatagaaaagtgatttaaaaaaacaaatttaggaaaacggccaattgtcagattcacacgaaacggcagttataaaagcgccgagtggagggaacagaaaagtgccaaagaactgctggaagaaggttaacattgacttggagtacaacacgagcagagaaatttcgaggaggcgacagttggcatggcgtggcgaaagacgcggcggcgaaacgtacggacggagggatcagccgaaagagcagaggaagggaagcgcaagagtggcggaagaaagcagcgccaggaaagacgaagcagccgaaaagagggacagaaacgaggcacaaaaagagacggcaggggaagcggaagacggacgagcggagggaggaggagacgaagagacggcacggaagaggacgacggccccgacaggcggcacaaagacgaagaacggaccgaatgaggacgggacggagacaggcacggaccaacaacagcaacagtcgagggactactggtaatggcagacggggaaacggcacggcatttggaggggggtgaaatatggtaattataaataccagtgtcatttgtcaatatttttaatttaagtgtcattaattttcgtttttttgcagtgccgggccaagaacgacaagaatgccttatcggtcgggcggcggcggaggcattggcggaccgagacggtccggcggcggcacagattattggcacaagaaaggcggaggaggcggcagtggtcaatcggggagaggaagtgaagacgacagggaacgacgtccgggcggcagttattaccaacagagaaatgaccgatggcagcggaatcaccacccaaatgcaccgccgccactgaatgttgcacaacgacgggcgcggggtccgttgcccgactgggacgaggtgaactttgtcctttctatgttatatcatttatcgtattgcctcaggtgcaagaagtcgcggaagacagctttgattacatggaaataatggagagccaatattcgtaagattgcgtatcattgaagttaatctaaaatattgtattaaattcagtcaatactatgccctttccgccgtttccccttttgacccttcgcttggagtcattgcttcagtcgcacatccctcgacacctatcatttcgtctgttgccgttaccgccgcgcatgccaacgtggtcagtgcgtcgaccgttccgcccgcctctctcctgtcccccaccggtctcatctcctttcctctgacttctcccactgcgcttcctccgaacgcggtcgtcgtggccacctctgaccaattcccgtcctctacgggcgccactcagttcactcccgtcgttctgactgcgcaattcccttcgaatgcgctattcgccacgcgaccgccgaccaccgctccttttatcgacgaacaaaaactgaaggacatcgtgcggtcgcaaatgtttgtacacctagccaggcccgtaaccgaaaaatggatttggcaagggttttttaatgtcaaaaacccagactggttatgggcctgatgccacgtagagtaaaagtgttcttttcgttaagtgagtactacttctccgctgacaacctccagaaggacttctttttgcgccggaaaatggacatcgaaggctttttgccactcggtttggttgccacttttccgcgcgttcgttcacttacgctcgaccagaatttcattgtctccagtttatgtgacagtgacaacgttgaactgagcgaggaccaccgaaaggtgctgacaattacagtctgatcaacatatttattaattttttgaaggttcgaccccgtctaaatccgcaacaatggcccctcgtggagtcggcgacgcacaccgaagcgcaaaactccccaacgacggcgagcggtgctgttgaagaaattgctgtggacaacgaggaaatggaacaaaaagaagaccagcacgaagaaaaggagggggcggaagagggaaaagagttggagcgaccgcagtcaaatgaacaacagcggcaaccgcagccaaattcatccgaagaaatggagacaacaatcggcacatcagaagaggaacagagacaaagcgagacagtcgaagagataatggaggagccaaaacagcagcaaaaacaggaggagaagggggaggaccaagaagggtggaaggaagtgcgcaccaagcgcggaaaccgcaagaaacagcagccgaacaacaaacagaacaagggcaaggagaacagcacacaccaacctcaggtcaaacaatgacataaaacagagacgaatcatctggaaaagtcccaattttcactttctttaggttatgcccgtcggttgggtgcaaagtacaaaatgattcgaagtttggaaattggcgttatgtgatggtcagcgcgggcaaatattattattttattctttttttgattctgacttgaaatgccttccgttgtttgttttctttccttttttgcgtattagcatcccttccgttgttgacttccatttccattattttatgctgtttctccatgaaattatcaccgctcatcgaaaagaaaaatcaaaaatttaagtcacattttactcagtctttcgagttttctttgctctgtatttcgagagaatgtcatggcaaaacataaattacaaaacagtttaatttatctccctcccctccacgaaaaatttactttcgattgccacccacatatatcatcaatttgaaaattgcctatcattgtataaaaataaataaaaacattgtttgtatagactaaacttcatccactctattgaattcatgttttttgttggaagttttattgtaatcgaaacctcctctggcatttttgaaaagggaattattgacttttaaattagtgctttcttgtttacagtcgctagttcttgttcaactttttatatccaatttaatagccaaagctatttaattttttagcaacaaattaaaatacaattagtgatcattccgaaacgagatacacttcgaagaacttagttgtgtttaaccacaccacaaaatatttgaaacaaaaatggattaaatgcttttattcagaaagggtctggcaacaccattttcgtagaaaattaatcacatcgtgaccgctattcagcggttgatgaaaattatttcctattgtaagttctgttgttgtcgtttctgcgatggtgatgctgagtattccttggctgtgatattagaggtgggggctgcccgtacggcacgtgagactggatttgtggtggcgggtgactagtaatccaattttgcggtgggagcggcggaggcgggggcattgccatctgcccaaaactgaacaacggcacgggctgctgctgctgttgcccgttgtaaaattgaccctgctgccattgttgctgatgttggtactgcatttgatgttgttgttgtggtgagtttgtgctcatgtgccatggaagtgtgtgcgctggtggcgatgtttgcactgagaaaagagaggccggacaactgcgacggttgtcgtttatgtggtggttgagcgtacgatggcccgccatggagagatttgcacgtgggatgtcacgactgtaaatgtcaagtgctcattgtctcacgagacaacaatttgacgatgaacctgaatccgatttggggttggaaggagccgtgccgtcgttggtcccaatcgttcggtttgagcacacgaggcaattccttgatgccgtccagcctgttggctttgaagatgaagtgcattgggaattggggatctcggaactcaacctgtgcacaaaaaatataaatcgaacattgtaaatgataaaaaccgaaccataatgcaggtattctcctgaagagatgcaatttattgaaacataggctatttgtaaaacaactcactttgatgtcgccaaactccaacgaatttctgaacagcgacctatgcgcctcaccaaaagcgagtgcttcgacgtcataagacacttcgccagacatcccatacgctttgactgcgtcgatgtgcacccatttcttttcttcgtcatcgacaaattcaatttcagtctcgaattctaaatctcgatatttaaagaggaaatgccttaaatggcttaccctgtttcggtgcctgttcaggttttgagatagcttcttcattcgcttgttcctcttgtgccgtcgtttcttcggttttcgctatttgttcgctttcacctatttttaattaaaaaacaattttatatggcaaatgattggtagtcaaaatttaattttaatttaccattttccgcctgttgagtttcctcggcttctccttcagtttctcgcgtcccttcgcttgtttcttttgtgtcatcatttgttagttcatcttttatcgaagttgtcgtcttttgggagtgcacctcataaacgagcgaaaacaagttgtgtttattgccgacaaaaagacggtctggtccggtggcattccgcgcaatttcatcggttgtgagagtggcgtacacctaaaatattttttgttttttgaaaaaaaaattgtaaaaccgagtcaagtgcatccaaaagacgtttttcctcgacaaatggcagcagagcgacgccttgccaagcatatttcttcccgttcagatcaatttcaaaagtttccgggtaaaaatcaattatcggcgaacttgagtcggtcatcagccaacgccacccgtcaggaatatgagctctgcaaatgaataattataaaagtgccagtcggggaacaaaacaaaacatatcaacacacctgctagcagaaggaaacacacccattaactgctccaatggcttgaacggtttcgtgggcatgttgaagtcgggttggaaatcagggatcagttcaaaatcggaggcaaacggcgcgtagtgaaggggtagtaccatttccagctggcacatccctaaaa

SEQ ID NO: 3486 - DNA, 3545 bp, Heterodera glycines
tgagtcagtttttaatggcttcagtattcgaatttatcagttactcaaaagagtgtcaaataagatcaaagtgaattgtttgtgtagttttattttcaaataagcatcataagccatccgcgtttaattgctctaatttaaattccaaatgttaaaatgccacctcctgtcggtctcccgccgccaatctgcgcatttcctcgcccgacattcgcttttgctgtccaagtggcattggtgctatcaaattggcattgtacggcataatttttgccattgcctgccgttgttgctgctttcgctgtttctttgattctttgaagcgcaattctttgagcttaagttgcttttgagtttgccatttctgtttaatttctgggccaacctgtctttgtttgaatatttcgtcctcaaccttcccaagtccgcccatgatcttcttcactctttcgatattcactatgccgttttcagtgagccagctaaaaatgtttctttaattcataaaaaatgattgaaatttttcgcacccgccagcctgataaaccatgtccttgtacaacttcacgagacggtcgatggcattttcacggatttctaacgatggcaaatgggggagaaaatcgttgcccacaaaaaaacacatcatgacctgagaatatcgtagtttcagaatagagactttgctttgaattacccaatcatcaatggctctctccaaatcgaacggaaatggcaaatttggcatggaaagttcacgctccaaatattcccgaagcactggcagacgtatgaagatgaagttcttctccttcttcaacgggtccgcttggtccggcccggtctcggcacgtgccaacccttcacaatgttcgacctcgtgcccgtattgaccgcaaagttcgcacggcctcggttgattcggcaaaaactcttctcgaattatgttgaaattggactcgtgggtggccaatccaagcatgataaggtcggcatcggcgccacaaagacagtgaacggtgttcgggtcatgcgccggcgaagcgcgctgacgtcggacgtagtccatgattttatgttcgccctcacccggcacattcgcatcggaaagaataacctaaaaacatttcattgttcaaaaataaaaccaaaacccagtaacaaaaaaagaacctggatcttttgccatgccgggtcgtaggtgatccgtttgtgcacgtaatagcgaagggcaacagaaagacgggccataaacggcgtgccgggtgttatgcaattggagtcaaagtgttcctcttcctttcgcggtggcggcaacggaattccttccgactccaaccgcttacgcacattttcgatgagctcgcgcttctccgccgcttcttgtgctgctcgaaaacgacgacttcgctgttggttcatctacaaagttagggttttgagatctttaaagttttgcgatgctttttatttccactcaaaaaaacctttgctctgggggcgaccccatcaactgccatgtagagaagttttcttggccgaacgatggaaaagaggcggtcaatatactcgaagatcaaaatgaacatttcttcctcggtcttcggcgcgggtcggtcttccggatgtgtgcacggatggataatgccgttcatgtccaagtaaagattgtcaaactcctaaaaatgcatcatttactcattgaatttttcatttgtccaattatctcacttggtaattctcatttggttgagttgcatctattgggatttttactccgtcaatttctcttctgcgctgttccaccgcgtcaacaatgatcgacacatactttcgtgaaagccaacggaaaaaggctggaactcccatgatacttcagcaaatttgagtttataaaataagggtactatcacttaaccggaaacaataaaaaaatattaattgttcaaagtgtaaaaaatattgtaaaacttataaaaatggctataaatatggcattaaaactattttagaagaaaaaaacatgatacaactaaaatttactcatttttagcgaaaaatcaacccaaaaagcgaaattttggcttttttgcttatttttgacataaactaaccaatttaaaaaaaaaaatttaatttaatcaatattctcgacaaaatttcgctaaaaatgactttttggaaaattttctggtctttaagggtcaaaatccaaatttagatgtttttcgtgcgtttcaggcctcccacagtccaggaaaaagatatagatttccatataggtaattggactccctacttattaggtatattgcaacttatgcaataggcgaaatactttttttaggctgaaattagatttttcagcatgatcgattttttttctcttgcagtgtttagaagaatccgtatttttttcggccgatacggattttttacggactacggatctttaatccgtaatcctgatcccgatccgtataaattaagacacggattacggattttttaaatttataaaaaatccgtatctgtatttttcctggatacggatttttacggagtacggattttccggatttttggtccgtaaatccgtatgtgtgcctagtccgtaatcccgatcctgatccgtattttctcaaaattccgatctctaatttccgcattttgaaccaattcaaaaactgttttaaagttgaagcgctttacaatttttgatggcttaatagttttatcagtgtataagaaaacatataaaagtgaatccatattttattgttttattggaatccttttcatccattccccttcaatgatccgtcattcggtcaacaaatgtttgctgccacaaattacaaatcggttgacttccaatttgtccgccatgtgtctttcaacggctgcagctgacaataaagttgtttcaaaatatgacgactatcagaaggaaatgcgtcttaagcaaatcgaacgcgcttttgacgaggcggtgagtcaattgggcttaattttcacacattcgaatttgtcaaaagattagttcagatgcctaaactgttgcacggctcctacaacaatttgatggcgttcctcgacacgaattccttccgttttgaagacaaagtttggctctttgagtcagagtgagtgaattgcgttcttatgagaaaaaactaattaaaacaaaggcaattttagtagggtaatactggagaattggtgtcccggagaaaaataaatttaaatttttcttttctaaaagttgttaacatatttatgggggttttctgggtcgctgatcaagaatatgacattaattttgaccaatttcgaatccctgacccggactcgaacaaaagtcgaaattcaaaattttcacacaaaaaataagtttgaattttcaactttttgtccgggattcggaattggccaaaagcgactccgaaaaccccagaatgcatgtttttcttacataaaaatttaaaaaaatagacaaaataaaataatttctcgaattccgagctcagatccgtaaccagcgt

SEQ ID NO: 3487 - DNA, 1254 bp, Heterodera glycines
cagaagcttgaaggggtttatgcatcacatttctctgatcactgtcgccgctcaattttgttgcacgcatatcgaaacgcaagtgagtgacgcaattgtaacatttctattcatttattctgttttcttttttagattttgaacatttcgcccattttggaggatggcactgttcgccttcgttggcgtatttgttacctcggcttgctgagcatgctgaacttccgcaattttaaccgccagtacagactgaaaaatgtaagtgaaatttggttttttatttttccgcatttcgatcttttcagttgaaatggtacgacggttactcaattttttacgtcaatggcgagggattggtctacaaagtgaccatccagcggacaatgcccgacgactcgctgaaaattgcctcgcttaaggacaagacgaaggagttcgtccaacgggtaatgacagaaaaatggggaaagggaaaatacaatctttaaaatgtgagcttttgttaagatagaattaaactaaaaatttccatttttagaagattttgccgaatccgagcccaaactgtgcgggtcagcaccagcaacaacagttcacttcagcaaattgcgcttcggaacggccgccgcgacaacagagaaacgatgggaggaggaaggaatgagtgagtgaccaatgatactgtaacttttaattgttctttttgtttgattgataaattttttgcttttctacttttctcattttgcccgttttggtatttctataactcatttattgttaattgttcggtcggaatatctgctcgtccttttggctgtctccgttattcgctttaaatgatttccggtcaccgttcggttggcagatgtttgctgtctctgccacaatttgcaagtcggttgattcccatttacggccatgtccaggcacaatgtttccacttcatgaaaaaacaagtagaaatgtactgaattgttaaaattggtcatttcaatgtaaggtcaccgtcgacccagaaattgcaaaactgagagagggcagaaaacggcgtaaattgacaaaagcaatcaagaagctggcggagtacagcaaaaagccggtaccggttgaggagattgaggtcgacctacgccaccaggcaacgaagggacagagggaacggacggacaacggagtacaaggacgagacgagaagaaagaggcatatggcagaaagaagttgctcaagcagtacgcccagtcgagagccag

SEQ ID NO: 3488 - DNA, 737 bp, Heterodera glycines
  unsure (1)..(737): unsure at all n locations
attgattggactcataannactcaatagagccaattattttacctagagcggacatcatgtggattaaacgttcaattgatgcccaagagaatgcgttggaagtgttgaagcaactctctcccacactttacgaagcggcggtacaactcgacgagcgcttattctacacacaaattcaaggtataggcctgttgtactttattcaccatccaacccttttacaaattaaaaaaaaaattaaatttttcgtgtgaaggtccaccaatcagtccgccgattgacaattacaattgcccagacggggagtaccaagacgtaaccaagaaatgggagctcccgatgctagaagaactggagaagaagttcggcacgggacgattgatcaaaatgccggaatttaaaaagaaacaaattcaaatgatgcgacaaaaagcagaagaagaggaagaaaaaatggcgataaaggacccgtggctgaagaaagacacatcatgtgctgtagaggaacagaacgaaacggaagtacaattggcgaaggcgtaaagcgtacccgaacacttagaaattcattacatgtattttaaatacccatttcgaaaaagactggaattgttttaaaaagccggactaattgtaagttggacagtgcttggcttaatttctcgaaaacaaaaagcgtttctttgaaaataaaatttaaaattaaattgcattcaaantataataaaatcggaaa

SEQ ID NO: 3489 - DNA, 940 bp, Heterodera glycines
cattactattctaataccgtagtctgtccatcccttaccgtaatcattttaaccattctgttataataccgtagtcaatccccccatcatatttttaatgcattactatcctcatactgtagtctgcccatcccttaccatgtcattttaatccatcagtccctctcttaccaaatcattttaatgatattgttatcatacaatagtcagtccctccttcaccgtattcattttattcattactattctaataccgtagtcagtcccatcccttaccgtgtcatcataattaattacagatattataccgtagttagtctctcccttaccatatcttacttaatgcattactattctaataccgtagtcagtcccatcccttaccgtgtcatcataattaattacagatattataccgtagttagtctctcccttaccatatcttacttaatgcattactattctaataccgtagtcagtcccatcccttaccgtgtcatcataattaattacagatattataccgtagttagtctctcccttaccatatcttacttaatgcattactattctaataccgtagtcagtcccatcccttaccgtgtcatcataattaattacagatattataccgtagttagtctctcccttaccatatcttacttaatgcattactattctaataccgtagtcagtcactccttcaccgtattcattttaaccattctgttatcataccgtagtcaatccccccatcatatttttaatgcattactatcctcatactgtagtctgtccatcccttaccatatcattttattcattactattctaataccgtagtcagtcccatcccttaccgtgtcatcataattaattacagttattatacccgtagtagtcgctcccttaccgtattcattggcttccttttcttcat

SEQ ID NO: 3490 - DNA, 6532 bp, Heterodera glycines
  unsure (1)..(6532): unsure at all n locations
gttccgatgcctttttttggttctgatataaaaattgcgtaattttgtcaaattgtcgaagttcttcggcatcttttaattaaaatgcattaaaatgccattttaaaatcggtctgtcattcatcggtcccttaccatattaatttaatttcttcattactattatcataatatataattcattttacttttttaattacgaatcgtcttttaccatataattttatcagtctctcccttaccatatcttacttaatgcattactattctaataccgtagtcaagtcactccttcaccgtattcattttaaccattctgttataataccgtagtcaatccccccatcatatttttaatgcattactatcctcatactgtagtctgtccatcccttaccatgtcattttaatccatcagtccctcccttaccaaatcattttaatgatattgttatcatacaatagtcagtcagtccctccttcaccgtattctttttaatccatactattctaataccgtagtcagtcccatcccttaccgtgtcatcataattaattacagttattataccgtagttagtcgctcccttaccgtattcattggcttccttttcttcataatttttcttcctcaactcttttctcttgcacatttcgtatcgatgcgcccgctcgtcaaaatggtaattttcctccaatttgtgaatgatttgtcccaattttatcaaaaatatttccaattgttttgcgctgaaatttttgcgcggaatgtgcgcaaattgggcaatttggacgaatttgacgtcaatttgcacattttggagcccaattcgcatcgatgggacggacgaaaaattatttttggggaatttttggagaaaagttaactccaaattctgaagaaaaaagaaaatttaaaaaaacaaattggcaattgatcaaaagggataaaatattttatggcgaaaaagtgccaaaataaaatgggaaggaaaaaacggaaaaaccagttaaaaatcgacaaaaatgggaaaatggacttccaatttcttaaaattcttaccaaaatattttttttcctgaaaagcttccccagctcgttcatatttcattgataaaagggagtttaaatttaaattaaaacaattttggtttttaaaaacaattaattgaaaatgcaaacttgacaaagtgcgcagtgcagcgaattgtccgcgcatttccctccggcgccgtttccgtcgcaatccgcggaagtgccgaaaattaatccgtggtcaaatccatccggcaaaatacaaattgtctcgaatttgttgtccaaatgtttgataaagaagcgactcggaaattgaaattgcgccgcgtcggactaaaaacgaaaatgacaaatttaatgctaatatttataatttgtagagaccggcggacaggatcaggattttgtatggatttctgaatcctgattccgatcactttaaatatcggaatcccgacaaaatcaggattttaatcccggggatcagcctgttcccaattcctacccctgattatgatctgatcccgtcttttcaaaatttaggtctctctattaattagtgatgttttagcaattattacccattcattgaatattcgtctcagttcgattagcgtttctttcccatttttgtgcccataatccgacgcttttcctcccattttttccttaaaatgattttaattattatttttaattatattttattattctttaatttttaaatttttactttttccttttcctctaaatttgttctctcaaattctttgactgaatttatttcttgccatttttctgatggaaataattgcgaatttttctcactaaaatttattttgtctttcttttcaataaattccgataaatttgtgtcgctttgatattgacaaaaaatatttttgtctaagaatttttttaatttaaatttaatttatttattttaatttattttacccaattttcgctgtttttccgacttttcaatttgttccaaatttctttcaaattcttccaaaattttttctcttttttcgacaatattcgaaagtgccaatgttttctgtttttggcccaatttttcccaattttctattcgtcccttaacaattgcaatgccaaattttcgaaagtgcaattttcccacaatttctttccaattttcccattttatattttcattttcctggtccaatttgtccgatttgtcctccaaattcgtccccaaattgtccatttcccccgacaattccattagcagctgaaaaagccttttcgaaatgccttcataagaatgttttgccgagtatttcatctccttcagtctctcccactgatcggaaatgctttttgttttgtcgctttttctctgaacgtccagccattcgatcgcttccaatcggttggcaatttcgttggccaaaatgccaacatttgccaattcgattgcgcttgtcattttggtgtcatcgttttgctgttcttttgccgatgcattgacaatttcggcatatttcaatgcgaggaactgatcagtggcaaagttgatcagttttgtgccttccttttcgccttcgtcttcctcagtccccatcaacccttcatttggcggttctgtctctttttcctcctttcccttaccatttcctcctttcccctcttctaccgtactttttgttacagtaattgttttcatttgctcttttctttctgtatctcttcccattgcaaaactctctttttcttcttctgctgttgagaatgatcttctttcttcttcctctgtttctctgctgtttttcccattgtccgcttttatttcgttttctttcgtttctttgtttccgtttttgctcttttttctcttttgttttttcttttttgcatttaatttcgcttcttcctttttctcttcttcctcttcttttcccgctttttctttttcatctttttcctctttctctttttctttttcctctttttctttttcctctttctctttttctttttcctctgtttcaaaatattttattgccaatgttttccaaatttgctctgtcgtttctttacccaaatattctggcatatcatttacatcaacaaatgattcataaactggaattaggtaattaaagtaaattttcaaaaaaagaagaagctggttgggtagttaaatcattaaagcgagggttgataagatataaaaaaggcggatatgcctcgcctcgtaagcgcaatggttgatctgcccacggattgggttgacgaatgggttcgattaccacccgccgatgcctaacattttgccatttcttattctaattatctaaagtacaattgagcggtaccggttaggtgccgtgaaaatttttggaattgcgccgatttcttaacagattttcattgaaaattatagcaaaatttaaaaaagagaattattttaaaaattggccaaatgttcaaaatatccctttcccctttcccaaattctcatgaaaaatcagctcggattcacattcttaccagtgtaaatttaccggatagtactggtaccgccgctattagaaaaattgaaagaaccggtaccgtaccaaaggtaattaattactggtactgctggtaacgctaaactctaatctacagtaatctcttgtccattttctttttcttactggtttttaatatttttttgaaaatggcgttttcctccaccaatttgctcagtgtttcaacattcttttcgcccaatttgacttcaaatttcgcataattttccccgtttttgtcactttctttcgcttttcctttcacttttctcgtccctttcttttcgtcgtattttttctgtgctttttcaattattttccgaatttcctcgtccattgctttttcacttttcatttgctttccctccaaaactttttcaaaaaataaattcatttcactcaaaaaaatcgattgataaatttgaaagtttggcatttcgtccagcggttcgtcatgccaacggtcgtacagttggtaaaacaaaaatttgtgccgcttccaaacattggcacattttttccgggcgatggtcgcggcggaattggaaattttggcatcggtccattggacaaaaatgaacaaatccaacttaaaaagtggccaatttttaattttaaaattgcatttaatacctttagttttacattcagccaattcattgatttggtgatggtcaaaaactcaagataaagtgaataaagccgactttcatttttgaacactgaaataatatcatacattttattttataattgttttaatttcttttaattgggcaattaatttttctcttttttatatattatttttcttttttacaaaatgctaagccatttactaaatgctattgtcaataataattaattggtgataattttcgaacattcattggcctccgtttgctgcgttttccacaattctttggccatccaatcgccgtccctaatgtccggcaaaatttcgctgctcaaaaacttccaaaatcgcgttgtgccaccgcttttttcggataatttacgtaaaaattcattgaaataattcaaatattcgtcaaaaaatccatacacttgtactctgaagaacactcggttcttctcaaatgctctttatttgtaaaagaattaattataaaaatatatatcataagtagagaccgactaaaaaggcaccaaaaaccgcgaaaaaggcacccaaaaattgaaaaaaaggcacgaaaatcccgaaaaaggcatgaaaaaaggcatttaaatctttttattaaggacttttagggagcaaaaacacgtaaaagttaaccaaaaaattaattttggtcatttaaatgataattaaatattttataatttttttcgtattatgaaatttataaaactaaaattttctatcaagaaaaaaatatcaaattttggagatgaatttttgagaaatttttcatttcttaggggtgtattttcccgatttattgcatttttatggaatttttctgaaaaaaatgccaaaaaaggcatttaaggcacgaaaatcccgaaaaaggcaaaaaaaggcataataaaagtcgacgtagaagcctcaaaccaagtggaaaatgtgttatttatgcttaatatatcgaaactagtgcgcagaaaaaaaggcatatgcctcaaaagtcggtctctaatcataagagaagtagttttatgaaatttcgccagtggtacggtattttaacaaaaaaaaagattctgtgaaaccatgcccttacagtagtctaatgggggaaaattatttggcaaattagccaggcatatttaaggatacgactcagccgcggataatcgcggatcatttaatgaagctcatttttcacatttatggactgacatatggaacaggagtagtgctcatccagggctgaacgcaattatggattatgaattacggcatttttggacaccttaattacgagtaccgatttccttaattgaaaaaattacggattacggatttccgtaatttaaattcagttagtgcagccctgggctcatcagcacggtgcaaccaaaaaaatcaggaccttattgttacagtactgtgtttctgcccattcccacatccaataaattagaattaaaaaagcaattgtttggcctgctgaactcccccccccccctcataaataacatttttacaatcttaaaaattaattatgagtgacaaatgataaaaaggacaattaagtattaaaagtttagtcaaaacgtagaaaaataataatgagcggctattcgaactttaaattactcagttttattcaatacttaatccaacagcaaaacaagaataattcttctgttttgtttgtcaacggggaaaaccactaaattcataatctatttggaagagccgtgctaatgaggggctcaatcttcttctgtcaaataattttgtgattttttttcctaaaattgtccgcaaatgtctgtaggccctttgaggggtgaggattttaaaatacagtagggtcccgtggtgactcttttgtccaccttttcacatcctcctccttctcgcattcgttcgggtgccaatctttgctgaatttttgcactttttgctccaatattttgcctcctttcaaagtgtcattaattgtcatgaaaagattgaacagcgtacaaaatgccttcagcagcagaacattatttgcatggtttgaaaggtgtaaaatggcgaaaaaatcatttctcacggttgaaattttctcaagaaaaatttcacggacaaattgaaattttctgaaagatttgttttcattcaatgcgacttcttggcttttaatcgcggtgagaagcgagggcgttgagcatcgaatctcgagaaagtcggctcttgaactgccgctttgggagtcaagcgagattcagcaacatattggtgaattgttttggggtcagaccnntgcag

SEQ ID NO: 3491 - DNA, 2915 bp, Heterodera glycines
  unsure (1)..(2915): unsure at all n locations
ttttctatttggggaaatacttttgctcatttttggttactgtttggtctaatgtctcattctcgagaataacaactgaatgaaaatttattttgctgtgtatgaactgctcatatattgggacaacaattgtacataaacataaaagtaattcatttatttttataaataaaatttaaattaaaaactctccatttaattatcatttacttaaatataatttatttattttttatttctctcaccgtaatgcataactcgggggaaaaggtcctccaatctcttcaatgcaaagtacgaaatgttcgaaatgatttggcttttaagcgacgaaatgttccgctcggagccattgcaaaaagtgctccgaattatgtgggaatgcgaaattaaattaattaaggagaacaattggaccaatttgacaaacgaatggtcctcgcgtatttcggcaattaattcgcttacattttgttcattagcgcaatttaatcgttgccattgccattggtgttcggaaagtaaaaaaattctcttaaatttaacccattattattattttctaattggccaattaacctcaaggctaatttgcttatccagtggctccgtgcctaattccttgacattctcctccaacagcttcttccattcctcgcttaattcgatcagttgcgcatcgttcactaatttgtgcatgaattggtaaatttggcacagtttcccctccaaattttggtcatcactttttggcactttcatcagtttattaaatttgctcatataaacaacaatttcgtccgcaaaaatgtcattttccacataaaattgtgcatatttaagcagcttttctgccttttgcccatagtataaaagtgccgctccaatttcgacactttttgtcaattcattcatttccatttccgatttttgcttattctcttcccacaacaactgaatgtactgctccatcagtgcataggaatctgaaattaatattaaattgtaactcagtcaaattttctttaaaattttgctaaattttcccgaaaatccacaaaattagcagttttttgataaaaatttgctaaaaatattcaaaattttgtcatttttttgacaaaacctgctaacaaatctcattaaaaattacaaaaattttcccggcagcgcctaatggcaccgccggacccccccccccccaaaaaaaaagtttttgtaaaaagcgccgcaaaaaaagaaagaatttattaaaatttaaaaaatatttaatttggccaaccaaaggtcatgtcaacgcggtccttttctgccgaatgcaaaagggagaactctttgtcggggcattcatcgttcattggcaatattgcagaaaacgattccggctttatttgattattttttgaatgtgccgtgccacctttgaatatgtgccaaaattggtcggccaccacctttccctcgtccaccacattttcctccatgattttgacgaatcgtttaaagcgcaaccgaatgaatgtttgcccctcaaaacattgtctgagctgttcgcttccgttgtgcaaattcacaaaatgttccgtcagatgtatcagcatcgttttcgtcctaattgccgtcagtccgtcgtttgtgtcgccgcggttttccttctccaaaccgtacaaaatgccgtagagcgattcctccaaatttgccgtcttttggacaattattttgtcattttcttcaccgattctgaccatgttcatcacttcaatgaacgatttccacaatttctctgtttcgtccttcttcgtcccttttttgtgaaattcggcaaaaagagaaaatattttactgcaaattatcgcatactcaaaaaagtcttggatattgtttttgccttgacagaaaagcaattcaaaatagccttgcaagactaactcatcctcaaagcctgaacaaataaatacaaaaactaaatggaggaaattttttcaaaatattccctttagtctgaccgactgtaacgggtggtaagggtgtggtggtactgtaggagagcaaaaattggtgttcgtttttttcgactttcttaggggggatggtggtattgtagtggagcgaaatttcagtcgttttggctgtggtacggtaagcgttaacagaccgaacaacaataacattaaagcggatttttaattttaatcccacatttgcctctccttctgctccaaaagtcttcgtcttttttaggggagggaggggtactgtaggggagtgaaattgtcagtcgtttcgggcgcggtacggtacgcgttagcagacttaccaacaacaaattaaagcgattttttgtttttaatcccccatttccctctctcccctacacgctccgaaagtgttcgtcttttttcgacttttttagggggtggtactgtaggagaacgaaattgtcagtcgtttcgggcgtggtacggtaagcgttagcagaccgaacaacaacaacattaagcagattaaaattttaatcccagtgttcgtcttttccgacttttttaggggggggggcgataggtatgtgcgagagtctcggttctcgattcccgactcgggaaatttctcgggtttttcgcttcccggtctcggttcccggtctcggttttttagtctcggaaaccgagaaatttttacactgttaaggatgaccctttcggggagtgggtcgccggtaaagggagaaaagaggaaaaattattgaaattttgaacaaattttctttacaaaattcattaaaaatcccaaanaattttccccggcggcgcctatcggcaccgccgtgccaaaaaattcctcaaagatttcaaaagtttacctaaaatttggcaagcaaaaattggcctttttggtgaaaatctgttatcaagtcg

SEQ ID NO: 3492 - DNA, 1426 bp, Heterodera glycines
caaatcaaaagtgtttactcaattggatttaatgaaatcgttgaaagtccgcttttaaaattgtctaataaaattgtcagctgccaaaaatggcacagattggagagaacaatttgcataaatttatcctccttagcaaattctttttcaatttcttcaaatttatccttaagtattttaatgcgctttaaccaatcggccgactttttcggtttaataattttttcaaattcctcaaaatctttttttattctccggtgcagatgagaagcagacaagcgattgatcagaatcgtttgatcattaattgacaaattgtcatcgaaaagcaatttggcgtaatattcatccaaacgattggtgtcgatgcctgcggaaacattgaaaaaaaattgtttttattaatttattttgaatttataaaaacaattaccgaacaaatttttcgaaaaagtttgacttgccaaaaataaaatataaaaagaaaataaaggaatgaattggcaattatttgatctcatctctgtgacctaaaagaaaatcggaaaatataaattatttaaataaaattattaattaatatatttacataatattcctttgcattagtaataaaaaaattattaaagatggcaaggaaattgcattttataagaaaaatcaattttagtattaaattgttgttgtcgtcacccgtgacgagagaacatttattttttggccaatttttttcgatttattggagattggatttgaaatggatttccatattttccgtattttccatctgtcactttttattcatacatatttcggcttgtcacaagaaaattcgaaaaatccaaagagcaaaattttcaagaaacacattcctaaagaccaaaaattaattcagaattgtcaaaaaaacttttttaaatgttcaactttttctcttccccaccctctctctctctcttttaatctctttctctttcgctacttataagtgatttcaatgggtgctatgtcgttatttaaaaaacatcataaagggctttatgatgagaagctcgaaaaatttgaaatttcgactttgttcgaaatcgggtccggggttctgaattgggtcgaaatggttatcagaatcggattctccgactctgaaaacccctaaagactttatttcgagaaacaaattcttgaattttttttaatgtaaagtcggcactattaccacgcatttttggaaattgcgggattaatcccgcgagatccgagttccgcgaaaaattttgagtttcgatcccgtagtggtatccgcaaatctgttttgtgcgggatctgcggggttcgcattgcgattttttgaatcggcgaaacggatatggagcgatggaaatcttgtatttctttttctttccattttgccgatactttttcatgt

SEQ ID NO: 3493 - DNA, 4050 bp, Heterodera glycines
  unsure (1)..(4050): unsure at all n locations
ccccccccccccccccccccagacatcactccgctcaggaggatccatcgccggtggatcgatattttctttgcngggcattncctgaanggaattgattcattcatttgcccgtcactgatcaaataggctttcatttcactgaatgtcaanaggacagtgcgcacgaatcanncgnccattntggacatttctgatcaaatggcctttcgcataaaacgttctttctgatcgtccccttctctcagccacacgtcttggccaacaaaggncaaatccctcgtcgaaacacttcgcccanttgaccgcccgtacggttcggtcgcaattgtctcgcccagcaaacccatcaaaaggctcgtctttccgcaaccgaccggcccaatgacgccgattagcattcccttaacggggaaaataaacaaatccaattggattcattttttgtacctttttcccgttaaaatggacattggagacagcgcttttagtttcgttccacgcaaaagaattgccatcaagtccgagcagtacttaaacattggcatggcattggtcagtgttcagcaacggaatgaccgctcaccccctccctccgcttgggtgagaatgttttggcgctggtcaccgcaacggatggcgaagaatgcgtcaaagcgtcgtttgctgaccattccgttgataatcgcactgagcacccacgggaaggcgttcactgaagggaactcaggaaggaaagtgatcgaccgaaacaaagacaaagcccacaaggcatgatcagaatgctgatcagggaaagggtcgtgaacactttggcagcggtgagcaattcgcccaaaacgacggaataagtgacgagcatcagcaccatgattacggtaggggcggatgcctacggtggaacatacggtaacagccaacccacggcagcaccaacccaaaggtacacacagacggcgtcgaggtatttcattcccttcaaattagccaattcacgtgacctgaggtggccaattttggcttcgaaaaaggccgtccaattgttcagtttgaccgtacgcattgaccgggacaattcggttactgtattcaaaaaaggaaattaaaaacattgggggggggggaagcagtacagagtttgaccctggcatccttcatttgcatcattttgttggagaattggccgactttggaggcgatgtatttgttcagagggattagcagaagagagacgagaacaccggcgagaaaagccattccgacctaaggaggagaaaaagcggaaatgacaaaggcacaaattaattatttggttttgtaaaatcaaatgccgaagaatttacgtatgtaatttagtaatgctcgagagtctcggtctcgactcgagaaaagtctcgggttttttgtctcggtctcgagtctcgggaaatttttggtctcgagcatcactaatgtaattaagcgtaaaattatttttaaatatgcttttgagcctcgcttcgttttgttctgtgttcgattccagtcccttatgactgaaaaccctcggccttttttgccacttgcctcgcggtaaagcaaataaagcgcaatcgcaaaatttatcggcatactccaaaaagctgaaacgaattttattggccaattaatttgtcacaaaccgtgaaatgcgaccataaggccgccaacacggtcaacatcttcaaaatgacaattcatcagagaaaaagaaaatgaaaaacaattaacccaccgctggacatcaaattgatcaaattgccggacgaaaacttttcggtcaattgaaaggctgggattcgcagcaatttttggtagacggcgagaagaagcgcactctttgcgcgaagagtgatcatttcgatgtaataattgaactgaaagtcgcagacggaggaaacgaacagagagacggacatcagagcggcacaaacgtagcccaaattcttagccaagaacaaatcattacggcacaccttcaaaaagccaatcaccacggattgggaagactcttgaagcgaagtgatcagcaagtgaaggagaattgggcctaaggggggaaggggagtgaccagaaaagattctgctgatcagttgatcagtcagccatttagtccaatcacttgcgaatctgaacgcgtccccagtgaatcggacaacgccgatgagcaaaaaggtacgcccataggcacggaaaagggcttcagcgaatgaaaattcggcagaaagcagccgctgatcggcatggtcggattggccatggcagtccccgaggatgtcacgctgaagcctgggcaagtggaggctgggcggaagatggaacacatcgtccaccttttggagaaaagacaattttaaagggggaggggggcggcaaaagaagacaaaaacaacctgggaaagatgaccctgaaagcccttcctaagcaggggatttgtccagcagaagaacagctttgacagccaattggagtgctcgtgactgcacaacaaaatgatcggaggatcatcgccattctgatgatcggacgaagcatcgccaatcggaagataaccaaaattggaattggacaacaacggaatagaattggaaggacgacaaaggcacaaaacaaattggcaaacagagcaaaggagaatggagagaaagaagagaatggagagagttgaagagacggaggggccaaggaaaagccaacgattgagcgagaggagggcgaacagagcgcagaaaagagcatggagagacagcgaaaagacggacggcacagacgatacactgaaaagggaaaggcattggcaaaagtaagacgaagagacggagagagagaatgagagagagagggaggaagagaaagagagagagatcatcctgaccaaactgatcagctgctaaacacaagctactcattatcaagtgatcagagcagggagcattggtcaatgattgattacccgtaatcacaactgatcaatgaatccaagcgtcaaacaatgagaaccaatcagaaattacttttagtgaaacgaatgctgactgactatcgcagctgatcaatggtaatggcactgatcagttgacaacgaatggcactctcagcctatgatcaccccttaatttaatccctcaaataaattaccaaaatcaccttttctgttggaatgtaataaaataaaagagggcattcactgcccaaatgaaagcgaccaaagaataggcaatgagaaggacagaaggaaatggggaaacaattaattggagaagggcgacggcacagacaaaggcggagagaaaggcgaagagaagcgacgaacgccgggggggaaaagcatcggcagcaggggaagagagctaaaaagggggaaaaaggaggggataaagcaaaaggggggggggatgaagcatccataattagctaattgttggcataaaagggaccgaaacggcgaaacggacaacgacggaacaaagaaatgcgaactggaacagcagaagcagagagaactccctgggaaacggacgaaaaatatcagaaccaaccatcaaaacaattgtgatgatcattagaggctttttggaactgatgcaattagtggaaaaggtctggtgttccttgtccacccatatagccccgacccacccgcacggagaaattggcaaaaggaaaaactgttgctgtcgtttttcgatgttacagtcagcactaccgtaacattggagtcgacaaaaagcccgaagggaatccattgttttgcgtgaattactgagaagttaacttttactgacaagaaaccttccacaagaaaatgtgtttagtcgcaaaatcgactttattccgcaacacttcgctttaggtttaagataaatcacaaaaatttaggaacaaaaaatccgcgcacctaataaataatttagagtaggaaatgataaattcatcgattaacgaactgcggatgaaaatgctcataatattcacataatgactatttggaaaatgtatgctgttgacagacagaggggggggggggggg

SEQ ID NO: 3494 - DNA, 4032 bp, Heterodera glycines
aagcagccgctgatcggcatggtcggattggccatggcagtccccgaggatgtcacgctgaagcctgggcaagtggaggctgggcggaagatggaacacatcgtccaccttttggagaaaagacaattttaaagggggagggggggggcggcaaaagaagacaaaaacaacctgggaaagatgaccctgaaagcccttcctaagcaggggatttgtccagcagaagaacagctttgacagccaattggagtgctcgtgactgcacaacaaaatgatcggaggatcatcgccattctgatgatcggacgaagcatcgccaatcggaagataaccaaaattggaattggacaacaacggaatagaattggaaggacgacaaaggcacaaaacaaattggcaaacagagcaaaggagaatggagagaaagaagagaatggagagagttgaagagacggaggggccaaggaaaagccaacgattgagcgagaggagggcgaacagagcgcagaaaagagcatggagagacagcgaaaagacggacggcacagacgatacactgaaaagggaaaggcattggcaaaagtaagacgaagagagagaatgagagagagagggaggaagagaaagagagagagatcatcctgaccaaactgatcagctgctaaacacaagctactcattatcaagtgatcagagcagggagcattggtcaatgattgattacccgtaatcacaactgatcaatgaatccaagcgtcaaacaatgagaaccaatcagaaattacttttagtgaaacgaatgctgactgactatcgcagctgatcaatggtaatggcactgatcagttgacaacgaatggcactctcagcctatgatcaccccttaatttaatccctcaaataaattaccaaaatcaccttttctgttggaatgtaataaaataaaagagggcattcactgcccaaatgaaagcgaccaaagaataggcaatgagaaggacagaaggaaatggggaaacaattaattggagaagggcgacggcacagacaaaggcggagagaaaggcgaagagaagcgacgaacgccgggggggaaaagcatcggcagcaggggaagagagctaaaaagggggagaaaggaggggataaagcaaaaggggggggggatgaagcatccataattagctaattgttggcataaaagggaccgaaacggcgaaacggacgacgacggaacaaagaaatgcgaactggaacagcagaagcagagagaactccctgggaaacggacgaaaaatatcagaaccaaccatcaaaacaattgtgatgatcattagaggctttttggaactgatgcaattagtggaaaaggtctggtgttctttgtccacccatttagcctcgacccacccgcacggagaaattggcaaaaggaaaaactgttgctgtcgtttttcgatgttacagtcagcactaccgtaacattggagtcgacaaaaagcccgaagggaatccattgttttgcgtgaattactgagaagttaacttttactgacaagaaaccttccacaagaaaatgtgtttagtcgcaaaatcgactttattccgcaacacttcgctttaggtttaagataaatcacaaaaatttacgaacaaaaaatccgcgcacctaataaataatttagagtaagaaatgataaattcatcgattaacgaactgcggatgaaaatgctcataatattcacataatgactatttggaaaatgtatgctgtttgacagacagagggggggggggggggcagaataaatgtgatgatgagtacgtgcaaaatcgacaatcgccattttaaaacacgaatcccacaaacgaagaagctcaacaattcgcagtcgcatttttaaaccgaggcctccaacttagcgtttagaatgtgatcgggtggtagacctgcaaaattgaaagggttatttttaaaattcaatggtaatagttcaacacacattaaaaaaagggggggggggagtcagcgcccaaatggctggctgtgccgataagcggtgtatgggaaaattttttggaaattctcccctctcctttataccccctcccctcggtgtaattttacggcgaatgatagagggggggggggggagatggaggaatcgcctccacactttttgtatgcagtacaaaataaattcaatgtttaacaatgttcataaacctaccattttcatatcgtttccaaattctgtgcaaaaggttctccatgtcggtgcagtactgtttcacatcaaaaagtgtgcttgtggtgcgtgcctgaataacaattttgaataatcacaagacataaattataattaaaataaaagtttaaagtttgaccttccaaactttagcacgcgtttggttcaggctgaaattggaagagcaattatcaaaaacattaaaaattttaaaagggactgacaattccttgtcggtgcccaatttgacggctattccgatgtactcgtctctgtcctttgccaccaattcaggacatcccaacgcaaaaagttggctggaagcaacgcgcgaggccaaggtttccactgaaattcgattgaaataatagaaaaataattattcatacgtggcattgtgaccataggagttccggtccacagaatgtccattcccgttgtgtgtccgttacagagaggcgtatccaaacaaacatcggccagctgaccacggcgaacatgctcctctgaaatggaatgcccaaacaattaatttgataaaggcatacctttggccgcaacgtttgaaaagaccacccttttcgggtcaatgcctctttgcatgcaaaacttgagaatgtgcggctctccgtggtaagggaaacgcaaaagccataaaatagcagacggaacctgaaaagggcatcagaaagatagcaatggagaaaagaaagtgctgaccatcttcagaatctcacaccacatccccagggtaggcgggtcgatcttgtaaagctggttaaagttgcaaaagacaatcgcatcttcgggaagaccgtattgctgacgagaagtcacctacatcgaatgagtgtaatatattagtaaaacaaagagttaaataccaaaattgtctgcgggacttcttccccggttgccgctttcacatgagtgttcagtgttgtcagtccgttttggacaggcactccgctgacactggccgcgattagtccgcttccgatcatttgagacaatggctccgtcgaagtgacttcgacgactggcacgacaacctcagtcattttcacctctctttcgggtccgtgttgaacttcggcttcgcgcacaaatgtctaaaaaaatatttatttccatttttgttgttttgttagcaattgcctcactttgacttcacacgccgcgctggacaacagcgactgaagagcattttgtgttgcgttcaccaaagtcacgcagtctctctccggcaattgtccgtccttgtccttcactatcactctctccgtcagatgagccaacatttgtgagtggtcaccgatgaaaaaagtgtgtggcatataggccaatttttcgctgtatgcataagcaagctcaatgggcgaagtagtctcatcggttatgatgtaatccatgaaaggggcgcccgaagtgccggggtaaccaagccacataacctagagaaacccaatcaaaaaatcattcagaaattcttaaatgtttcaagacctgaattggggcaggcctcagtgcgaatatttcattccttgctcctttcgtgtatccgttcatattctgtaaaaaaatggtcagatatttatagagtacctaatcaaactcacgatcagaatgtggactccatccttgctgatgcgatcagctgccattccattgcatggagtctgaaacacatttaagcattgcaaaagcgtaaatcgaataaagaaaaagcatcaccgcagtcaggagggcaaaatgttcactttcttgcatcaattttgccga

SEQ ID NO: 3495 - DNA, 3976 bp, Heterodera glycines
  unsure (1)..(3976): unsure at all n locations
ggggcagtccccctgaaccngatgcgcncagatttatggggagaccgatccnttccggaatagcttcactatagcctgtacttaaattctgcgttgatttttgctccccataattgtttgagtaccccaaacggacacttgaaaaaatcgatttatttttgttttcggggcagtccccccgaaccgatgcgcccagatttatggggagaccgaatccttcgggaatagcttccctatagcctgtactttaattctgcgttggatttttgctccccataattgtttgagtaccccaaacggacacttgaaaaaatcgatttttttgttttcggggcagtccccccgaaccgatgcgcccagatttatggggagaccgaatccttcgggaatagcttccctatagcctgtactttaattctgcgttggatttttgctccccataattgtttgagtaccccaaacggacacttgaaaaaatcgatttttttgttttcggggcagtccccccgaaccgatgcgcccagatttatggggagaccgaatccttccggaatagcttccctatagcctgtactttaattctgcgttggatttttgctccccataattgtttgagtaccccaaacggacacttgaaaaaatcgatttttttgttttcggggcagtccccccgaaccgatgcgcccagatttatggggagaccgaatccttccggaatagcttccctatagcctgtactttaattctgcgttggatttttgctccccataattgtttgagtaccccaaacggacacttgaaaaaatcgatttttttgttttcggggcagtccccccgaaccgatgcgcccagatttatggggagaccgaatccttcgggaatagcttccctatagcctgtactttaattctgcgttggatttttgctccccataaatgtttgagtaccccaaacggacacttgaaaaaatcgatttttttgtttcataaatattttttttcagaaagtgctctaaagcgcaccaaattttatttacaacttaatttagcactctgatgctttagtatcaaaaaggaagatggagaaaaaattttttaaaaaatttttccttatattttggttatatcgttttgcttttggtggggtgcttggaacagtggaatcatgcgcacccgtccgatctggcaagttaagcaacgattgctgactagccaaaaggttcggtgccgtgatgaaacgaaccagcactgcttaccccgcggcacccggcacggtcccccgaaggaatggatttaattaaattctctccttcggggatttttttccattaggtcgtccgttagcgttcgattgctctagtcaatttttaaaaatttttgttgaaatatttgtcgtgctctgaagggcggggggggngggggggcggtgtggcatataggccaatttttcgctgtatgcataagcaagctcaatgggcgaagtagtctcatcggttatgatgtaatccatgaaaggggcgcccgaagtaccggggtaaccaagccacataacctagagaaacccaatcaaaaaatcattcagaaattcttaaatgtttcaagacctgaattggggcaggcctcagtgcgaatatttcattccttgctcctttcgtgtatccgttcatattctgtaaaaaaatggtcagatatttatagagtacctaatcaaactcacgatcagaatgtggactccatccttgctgatgcgatcagctgccattccattgcatggagtctgaaacacatttaagcattgcaaaaacgtaaatcgaataaagaaaaagcatcaccgcagacaaatccacaaaatgttcactntcttgcatcaatttttgccgaaaatttgtgttgtcattcggagacagcgcataacaaaagacttccacgcgactgcgattgtgcatcccggggatggactgcatcagatgactcgtcggatgattacctaataaaaaaaggggttcaatggctaataattgtcagagagagagaaagccattttgagagaggcattaaatcgtttattaagttttaaagtaagtgcttattgccctatgcctttgattttctaccgaaatcagacgaaacgtatccaatcctcaaccgttggtggcctaaccgaatactcaatttgtcggggtaagtgtacgaaggtttatgaagcacttgaatcttctcaatgcataactgcgcatgacgaccagcaattgcctataaaagcaattttttaaaatttattccaatcactttaaccattcgctgttcgtggcttagcggataaagcatcgaatggtgagggtgcacagaagggagccgtctaaaattggcatggctatggcgaattttttcttttcattttttacttcttctgcaattggtcctcaacaatgctcaccaatttcttcattctcggctcataatcagtcctaatttattaaacaatgacgcattaagtgttaaaacaaaccaatcgcaaataatctggagacaatgtgccaaattgcaaaaagcatccggaaaatcactttttaatttaagcgcagtcgaatagctggattgaatatagaaatacaattaaatcgaaattccgtatcgtaattcccctccccccccccccaatgcacctgtgaattgcctcggggatgtttcccgcatctttgtgaatgcttgccaaattgctgtgcgcgtccgcaaaagcggggttaatttgaatggcgcgagtgtaacattggagagctccgttaatgtcgcccatttcctttagagtgttgcccatatttgagtaagcatcggcaaatgtcggcgaaattttgatggcttctttgtaatgttcaattgcctcttggagtcggcctcaaatttcatgaaaattatactaaaagggatgcatgggaaaccttgctgttgtaaaatggacgccaaattgctgtgagcagccgcgaattcggggtaaatcttaaaaaacgggagattaatgccgaattgcaaaggaatgccgggcagaaaacattaattaattcttttgccactttacctttaatgcttccaagtaaagtcttgtcgcctcctcaatttttccctgttcgcgcttaatgttggccaaattgttcaatgaatccgcatggtttgggcaaagtgaaagggctgataaataaattaaaaatataattagcaatttttgcttattgtaaaccggtattataggcttgttcagcctccgtcacgagtcccttttcttttaaagcatttgccaaattgcaataggcgtcgggaaagttcggctgcaattcaatggcacgtttgtacgtctcaattgccaaatcgagatgggcctgttcgtagtaaacgcaagccaaatttccatgcacgacggcgtggtttggatttaatgcaagagcacgcaaatacgcggcgacagccctaaaggaattcggtaatttaccggaatttatgtattttctagccccctttattaactttacctgtcaaaaattcttgcttcctttagcacatttcccatgttaatgagcgcatcaatgaaattggggtccaatgcaattgctttctcaaaatgatgcaatgcaagccaaagctcgccttcaaaaaaggtttttattcaaaaagagaatattgaagagaaccctgcgcgttgaatacgcagcccatatttgaccaagcaacctaaaagggatgaattctttgtaattttaggttaaagtacaatataacaagcagtcgtgtgaatggaatctcatttaatttaaaaaacaattagttacaatgatttgtttaaaaaaaagtcttacagcaaagtgtggctgcatctcaatggctttcaaataacaaaccnttaaagaaaagttttaaattatgaaagaaatgcgacgacgaacgacctttgcctcctcaaacctattcattgcctaaattcaaat

SEQ ID NO: 3496 - DNA, 1006 bp, Heterodera glycines
  unsure (1)..(1006): unsure at all n locations
ttcctaanagttagtttggctaaatttttgatccccacacatcgaaatacaacaacaaaggttaggaaatcttctacttaacttgtcttggcaaatatttatattgattagctgctatctttcaatggcataaaatagcaaaatgccattaattaattaatttgccaagattttgtgacattatgccaaggaaggggtgatggatagttcaaaaactcactggtcacccaacgcgtggatgcccttcacccaatggacggacataaacagaaggcgcgacacgctttcgcagatcacgcggaagtccacgccgttcatctgcagttgaggattttgttgctgctgctgttgttgctgtaggtgctggtgatggtccaacatcggtggcattgacagttcaaatttggcattttgtgcactgatcaccggcgattggagcgatgccggtgctggcggggaattgcttaggccgaccccacaaccaccgccgacgccatgcgacgatggcatggcaccgccgtcaacggagaaagcggtggacgagccgcgcgaggaggcggtcggcgaatcgtccaactcgaggaaaagtaacggatcagcaccagcagcagacgatgccttaaaaggatgggcaaattgttaaaatggtaaagttagaactgacatttggaaaaagccttgacctggattgcatgtagaagtggacttggatttcccggacaaaaatccaggaaaatcaaggtccaggaaaaatccaggcttgtcatgtttctggacctggatttttttcatattgtatttgacctggccctcgatttgattgactaaaattcagaaaacccaggtgtccgaaaaatggcctggaccaggatcaggaaaaatccaggcctgggccaagtccaggtcgagctctagataaaacaaatcagttgggggttccaaattatcgagagcctaagcgaactcggatntggtgagcagttccttgctcttgngcgccgctttc

SEQ ID NO: 3497 - DNA, 3068 bp, Heterodera glycines
  unsure (1)..(3068): unsure at all n locations
aatgtgccgggaccgatggtgccacaaatgtcacnntgaggagaggggcgnggtgaaagctttctttgaaatttggtagtttttttttatcatatttcattaaaatttcaaaaatttccccggcggcgccatcggcaccgcgggaccccattttaccaacaaaatcctgcttttctaccgggcgccgaaaattttgaaaaagaatttacgtttattgtttttatttttttgaaatttaaaatcaaataaggaatagaaattttcggtaaaaattttattggtttagttttgacacattggctctaaagatatgtcaaaatttaaaatataattaacaatttattcaacaaatcaattttgctttcgccgcgtttaccatcgctgacgacgaagcggcatcatccgagcatgaatggggcggtgatgagcaccgcttgttgttgccaagcggtgcgtaccgactcgttgccgatggttgtgccgccgcggcagcagccgcttcgctgctagcaccgccgctttcacttcctgacgatgtcgtatccaccaaaatcgggtgatggtggtgctgatgatgttgttgtgttgggaccccgccggcaaccgatgccgaagacgatgacgaagacgaagacggcaccgcctgttgttgttgttgctggagacgcaaggcattagccgatgccgcaatttgctgctgctgaagttgatggtggcggttgacaaacgcgagcagtccttgctgcaaattatacgcgctgctattgctggtggcggttgtgttgctgttgttctgctggttggccaacagattgttgttgtggtggtcccgtggcggtgatcggagctacaaaattaacgacaataataccattgtgtcgtgccataaattgagcctattagccggaggcaatttaatcattctaattgacttattgttaattgacatgccaaaaaatgcaattgatccagttgatcaattcttaatggctggctgatgtgttgatcaatggatgcattgaaatttgaacaaatcacgggaaatttaagatttgaacagttttttcttaagctatggctttgaacagcatatccttgagaaatatgttgatgacttctgaccttgatcagatcagttcttattttatcgatcgcttctttgatcgccccctttgtttttgattcgtctattcaaaattttaattgcttcagccatgggaaattttaattttagcaggatactttgatcatcaaacttccttgaactctgtccaaaaattttatcgcgagtcccaactccgggatttgaactcaaaattttattaatccctcaatttccaaaaaaatgcgagattgcggactggaatccttcaaatcttgcgcactcccggcttcgattagaatccttttttgatcagtcttcacttcccctcacccatttgcttacattgcgcgttgccggtgcgtccgcggtgttcagcctccgccgcttcgttgccgcctgttgctgctgatggagcagcagttcattgatgccgccaccgccgccgcttcccatcggactcgcgcaccttttcccattggcattgttctgctgctggtggtgttgctgtctgtataagctggccgccagtgcgttgaccgattggaacgcgttgtggtggccaaatgggaccatcgtcggcggtgccataaacgcactggcagacgacgaatgggcaaagccggcggtgccgaactcttccccggccgctgccgattgcacacggttgtggtggttgtggagatggttgctgcgggacgacccgccaccgccaccaccgcccgtgtatcgtcccgcgccgctttccatcacagctgcaagcgatgatgttggcggcacgtccgttgaggacggcatcgaagaggcggtgccaccgctcgatgcggcaactgccgccgcggccgccatcattgccgcattcattgggcgccgttcagcttgaactgctagataaaagaaggtatttacacggaaaattatgcactagaaaagtctggcaaaaaaaaaaagatttttggcattatgttattttattaaaaaagaaaagggggacaaatgcccgggcgccgccgtttggacccaattgtaagttaatctttacaaaaagttgggaaccgtaccaaacctatcgattttcttagcttatgttaaacatagggtttttccaaaaaatcttaaaaatgcttctatattttcagttaaaaaactcccaaaaaatgatggtgcccatattttgtgattccatttgagggggatcggaaaagagcgcacattcacttttcatgccggtcgacaggcactttttgagccgacaaaattggcaccgattccgatggaatttggtcaccggacaatctttggagccacggcacacataggcaatttgtttgcgaatggaacgcttgaagaagcctaaaaaattactgcctaattaggtaatcaattagggcgatcattcgctgattgaatccgttaattattgagaggatgctgatctttagagagatgatcagcatttaaccaattttggcatcattataggctaattaaattccgtgggactgacctttacatccttcgcaactgatggccccgtagtgacgacctaaagcaaaaagcaaattaaggcaaaaaaactaaatgggattaaaaaattttgtttaataaaaaaggcattttccaaataaatttcattttaatttaataatttattttcggtaatggcatttattaaatttcgaataatttaaaccattcattttttgaacaaaattctagctatgtttaatcattaattgggacggtattttcttaattcctttcactaaattatattacggtactttgtctaataaatgaagcaatgaatggcattttccaaaattttttggcatttttcgctaatttctattccttaccggatgctttgtcaccgcacaccacgcacagttcgcccgacccaatggtgctgccaccgccgttgaccgatgttggcgacccgcccgccgacgactccttgtgcagc

SEQ ID NO: 3498 - DNA, 2431 bp, Heterodera glycines
tgggccatgggctgctgctgtttggcaacaaaatggtgctgatggtgttggggagacatgaaatgatgctgaacggggggaggtgaaaggttgtaaaatgggggcaaaattggactaaattgggtgggaaatgggcaaaatttgtcaaatgtgccaacttttttggccattaaactcgaaatagaaaattaatgacagtgcacgaaaggaggggagggtggggtaattagaaggaaataatttaattattagccataggggcaaaattggaaatttaataatttgcaatttttggaaataaaatttgcaatatttttttatcatttaaaattctcttttttagtgtaaattgcataagtattttggatttttataaaaaaatccaataaattaaaaactatattttttaaatttattagagatgtgctaatctctactgacaagcattgacgtctttttctgctgaatacaaaatttgatcacggaacttaatgacgaatatgacgtcgtagattaaacatacagacaaaagttaaatttaaaattggaaattattttaatgattcaccaccgtaaaatcattcttggcatttgcccctctttttggcattcgaagtacttgaaattttttctctattcaaacgattatcactcaatgtttactccatcgcttcttcaaaatggctttaatggttttaggcaaaaaattgaatttttataaatgtttttttttgcaatttcaaaaagatgtagtacagtagtctgcttgctctttcgaatgaattcgataattctaatcatttctgggattcgaaatgagagtcaattaatatattttaaaaataaattttaatttttaatttttttaaagtctttgtgtcaattttgatgcctagttttattcctttttttcaattttaaattcctatagagaaaagatgatgattgatgataacatgttatcacactgtattctaaaaaacggattaatctgttggttataagccgacgatttttgtaatattttggagagagacatttcataatgcctttgacgtaaaaatgttggacaaaaaaatgccgaaaaaggtaacattatgtgccattttgggaaggcctatgattagccctgaaaaagagaaagaagagagagagaatgtggcacattagacacaaaaattgcattaaaaatgctaatgccgtgcttcttcatcggacaacgaccgcggcacatccaatgccacaatgttgccatcatttaacatcatttttagcagctttttgtcaccatttatggcacaagtccgaatcatatgtgtgtgtgaatgtgttaatgtgtttaaacaaagaatgaatgacgccagcagttggcgttctgcattttcccacaaagttttcattttatttttattctgcgcgagaaaatgacaaaattggaaaatttgttcaattatttttaattttatgcttccatgggataaattaaaaatacataaataattatagtgtcaattaaataaattctcattaagaaaaaaaaacttaatttggccaagtgaaagagggccaacagcagttagcggaccatttaattgcggacattggcacggagagccataattggaaatggatttagtgccaccacatttaattgagagggtgtgcaaaattaagaaaggtgttggttgggtggggaaggaaggacacgtgagcgagcagcaggaatgggccaaatgcttgaatgaaaagaatgaatgaataaattaatgtgcgtgggggcgcgcgaattgcgcaagatggcctccattaaagccaattaacgggccacaaagagcgaagaccgccgtggccaaacagagggggagggagggaatggcatcatcatcagcttatattatattaaatcatggcattagcaggaaattgttggaaggatgaagaagacgtggcagcagacaaaattaatattaacaaaatgatatttggtgcacaaattgcaaaagcaaaagtgggggatgatgtgtactgaggagaggagaagcctttgggcgataattagccgatggacaggtaaaaaatgtgaaaattaagcctaattttaatctttgcatttttatttggacaatttaacagtgaagcccaattaaggcaaaacgcccaatgtccaacggcgggtaattaattatttccacgaggaattcccaactctttttaattaggcggaacggagaaccaaattaaaaaaatgaaagagcgacagaaagccaacaataaaaaatgggggaaaatcactgattggttggcatcatttaaaaaagagtgggggagggaaacggacaatgtgcaaaacggaagataatgatgatgatgatgagccaggcttggaaatgaaatttggacgaaatggacagaagagaatatcggcggaaga

SEQ ID NO: 3499 - DNA, 1337 bp, Heterodera glycines
  unsure (1)..(1337): unsure at all n locations
acacttcccctgccagtcggcgaatccgtcgttttcttcgccggcggcgccgtcgccgccggtgccgggcgatggccgccggtgaggcgctggcaattggagcaaatgtcggcggcagcggcgatagacaaaacggcgacgacgacgatgacacaccggcgctgctgctgggggaagaggtcaaagcgccaatgaaccgacgaaatttaagcaaaattcactctccgccattcatccccgtccattcatccgttcttcattcgcttggtttactacaacagctaccccccccccccccccaaaaagggtcaaaaggacgcgcagaacaaaaaaaagggggggggggagaaattgggcaatttaattatcggtgatcgaaaggaattgtgggaaaattcgcgaaattcctgatcagcagcagcacaaggccagtgattattggctgtggaagatgatcagtctttttgatcagatcaattaatttgctgactgatcattggttgggcagctaggctcggagatgcccggtctcggttctggaaccgtgaaatttctcagttgtttttggatgtataatcatccccactcccggggtcaattctcagtgtcttgatttcttgtatctcggaaaatttgactctgatcagcctaataattgctcctcacaacttatcttattatcactaggtgatctcttcagatgatgggatggagagaatatttttgattacttttcgcaatcttttctgcccgatcagagatgtgttgtaataaaaattacctaacaaatggagaagaattaaaataagtgtgtgccccgtttagagtttcgtacactgaaaacgcctcagggcatggccaattaatggaggtgtgtcatcgcagcagcgataagtcatgtgataaaaaagcaaacaaaatgcaccggatgtgcaatttgaaagcattgaaaagaattagaattgcaattcttggcaccaatggcggcaaattggtcactgaaatttggtcatcctctaatcttttaattagcccttaatgaaatttttgatggattttgcacaattttcaattttaggcgattaattttacacaaaagaactatcagatttgatcaaaatgctgtaatctcaaaaaaccattcgtttagggaggagaaaatattgaaaagacagacggataaagcattagtaatgataatgatatcagaagatgctaataataataataattagtgaaccctattngagtgagaggngaaaggtggtcttggngtcgacacccatcccgcgtggcataattttaaccttttttcattgctcaaattagttttgatt

SEQ ID NO: 3500 - DNA, 3373 bp, Heterodera glycines
agacatttgtttgtaccctggacatggacaaagaatccattttggcaaagtgccgccaaaaatcgagaatattttcgagaaataagtgccgaaaaagcgtgattcgaaaagtcgagaatcatttgaatattctcggcactgatacagaaccaaaaattttttgcaaaatgtcactgtgaagcaacattttgtttatttgtccagcatttcggctttttacagttattaatcatttggcgttttgcaataagcattttcaaatttgaactcactttttggtcaattttttgatcaattgcgcctgacgctctgagctgctccaacgccacaaatgggttctgttgctgttgctgctgatgtgctcgttgaactgcttgctgctgctggtgcaaccgcaaattgttcaccacctgaatgaaaattgcggaaaatttgcaggcatttcatactgtattcattggctgacagattacggtaaaatttttaattaggtgaatgagaatggtaaatgctcattataattagagctaatatttttaggtttttgcctattttttcctgagctcccagtggcctgaaacgcacgaaaaacatcttttttggggattgttaagctacttggcctaaaaagcctaaaaatttttgaaaaaacctacaaaaatgcaataaaaaaaactcctaggaagcgacccgaaaattttcaaaaatgcacccctgagaaatgaaaaatttctcaaaaattcatccaaaattatttatttactttcttgacaataatttgtgattttaaaaattaattatctcaattcgatttggctcaattttgttgctttttgaataaaattttgtcattttacacccctaaatttgagactttttagtgccttttttctatttttagtgcctattttgggggtagagcctaaagcctacatattttggctggtttaaagcctaaaaatgttagccctaattataatcagtaaattgggaagcgtgagctgagaatgagagtgatcgacccattcactcactcattcattcagaggggtccaaattttggattggacttcaaaacgacgccaaaaaattgcctaaatttaagcccatagcgcccaatatagagcgatattattgttattatccttaattatggatgattttatgcaaatcgccgccaaaattcgcgtaaaaatcacataaaattatttatttctttcactacaaaagtttgacaaaaattttgttgtacgatgaatggtaaaattaaagtggaagttattagcgctaatttggtagttagctaattatttctgctcgcgcattttttgaggccaattaattaaaggtcgtgccgtttttatttgtctgttaaatgtgacagaacactgtgccggatttgttgtcgttctcacattttctaattgttagtgcttcgatttttccagacagaccaaaagcggcaattccatcgcctcctggggaaaagagctatgaatggccaaattggcattattaaaatcaatcggtgcaaaaaattaacgcccaaaaaggaaaacgattgatattattaaaattttttatgtaaaacactatgccaaaaagctaagagatgaaaatttgaaattggccaaaatattgtgccaacaacagcgcatacaaatgaaaatggcacaggacacaaaagcgtgccgtctaagccaaatgaacaaaaaaaaacacacaacaaaaatccatttacatattattgatggcatttaaattttttaggcacacaaactatagagtggtatttatggcgtgagaaagcacagctttaatttgtttgggtgcgcaagacggtctcagatattttaaaataaatttttagtataattattttaaaaagctaattcaataatactggtgggggaccagtggcccaaaatttccggaatatagaatctctgatgcggaacttaaaaaaactgaattacaacgaaagtaaaaccactttaatcacccattcattcggcatttaaatatgctttttgtatttttgaatttgccaaaggatgtgataaagcccaaccgattgacaagcatattatttattttatagcctaaatttcattaaaaacacgtaaaaatttttcactaggctattttgaaacaaatttttgtaaaattttcatgctgtgatagatgagaagagagagacctgtggaaatgaatggttggtttctgggaagagaaaaaaaattgaattattggcacaaaaactgacccaatccgtcccataagcaccaccttatgaaggaacggtttctgtgtctcaaaacattttttggcactttgacgttttcaaattcctttcaaaacacaaaaaaaaacagttcctcaaaaaatgcgccgcgtcgttcttttccgcccacggcacggaactgaggtgtggtggcacttttttatatgagcttatttttttttccactgtacttttcatccatcccattgagctgaggccaccagggattaggccaagtgcggttctttggtggcattttttccggttcaaaaagtggcacggcaccaccggcggcgccagaccgagggaggcttatcacacaaaataccaccatcaaaaaacgtaatctaagctgtttaccacctgccagcgagaaacggtgcataaaaaagagaatgccgcgccgcgctcaggtgggcgagtgccatgccaaacgagggccaccaccagaggccggacatttgacgactttgttgtttttgactgactcgtacttatgtacaaatgttttttttgtgtttggcaagtggtcatggcacggattatcttatcaccgtccctccccgggacccgtgcccccgttgcgcctgggggcaattgacagacccggggattatgccaaagggtgggtgagtggcgtcaatgggtccccccatcccccgaggggggagggataaagcaaaacattgtcacagacagagagagagagagaaaaagaatattcagcaacaaagcaccgagttgaactgtgggatatgctaatgtcactacgtatgcactcagtacaaaacaaaatcaaatgaatgactgaatggcttctcactacgacaatgggttttttgttttgagaaaaatacggaaaaatgtagttttccacaccaatgggatacggtagggtgtacggtcgggagtgatttaaaaaagacaaaaaaaaacaatgaacgagaatagtctatttttacttagttttgtatccgtgtccgtttgtataatccgccctattttccaacgttatttttatagattttgaaattggcactacaaattagtgagagatttgtccaacttcatttaaattatattttttaa

SEQ ID NO: 3501 - DNA, 6737 bp, Heterodera glycines
tctattaaaatcaattattgtgattttttgaaataagcattgatgggcgaaaccatttccactaattttttgtaaattaaaaaatgttctaaggaaattccttgtgtttggccggttaaaatatataaaattcatcggtttgactgagttgaatacaacaaaatattttcagatacacatataacaaaattatggcaaagtgtacacttagtaaatagttttactaacccaaatctgaggttagttaggaaataagtttcgtacactttggcacgtgtaagctctatgaatttaagaagtctttacagttgacttaaactttatatgtacgtaaacttttaaaaaaagtaaactttaaaaaaaatgtcagttgagtcaattgtaaagatttttgtcctattcccattttgagactcacattttttatttgtttgcaaatcttatcggtctgctttgcgaccatgatgagatttgtgcacgtgccggtccgctttgcgaccatggcaacatatcggtctgcttagcgaccatgatatgtagtgctcacgccggtctgctttgcgaccatggcgaggctggtctgctttgcgaccatagccaaccgtgtcggtctgctttgcgaccatgacacagtgccggtctgcttcgcgaccatggcacacatatcggtctgctttgcgaccatgatatggaattcaagcccagacttgctttcgccttagcgttgcatgtggctgggatgctctatgggagcaccaatttctggccttgtatcccaactgcactgtttatgaacgaggattgttctttgattaattagcaaagctaattgttcgaaggtccctcaatcgaaacagaaggttggctacggtgggactgtcctctgttcatcagcaacgcgtctgttgttcggagttccctgcccctggccatttagtgattggtgtaaacaaagagctataagatttggttcgctgactagcccttcgggtttatgtagcaccaacgtggtttgctgacattccctacggggtttatgtcgcacaaatatggttcgctgacaggcccttcgggcttttgtcgcgcaaatgtggttcgctaacagggccttcgggcttttgtcgcaccaatgttgttcggtgacaggctcttcggggcatgtcgcactcattctgcactcttgtatgggatgtgtgagtcgatccatggctgatggattcggcgcgacgactacacattgtggcaaagaaagatgtctgataaaattcatatgtacatttgaataaattttatttatgtgtgcattattggttaattttacctcatatttttgccaccttttcatacatttatcattttgttgtttaagatgccttcaaaacaacataatttacgtatgaagatgaaggaggaccgacggcggacggagaaatctgtcagcccaggtcgctcacccgtcccagacgggagtgcagatgagaatggggtggtatcacacccgggcaacgtaacgcccaatattagtgctttgcaattaagcaccccggcttcttccattggaagtaaaagaaggggcagaccctcaaacgccggaacggagtcaattacggcttcgcaacacagtgtgtcatccgttggcacacaaattgcatcggccactcaaaatgatgagtcatcgcctcgcaacaaaaaagggaagatcgacgattttgatcgacccatgtctgctcttgaggcaattgcttcgacgccggtttccacacaaaggaaccgtggagggcgaccatccaaaaaaagaggcggtcatgctggctcaggcaggagcaaagctaatgattccatgagcgagagctcgtcaatggaccagagctctgaagctatcacaaatgtggttgttttgccaactgtgactgataaaataaacttcagcacagtgcaaatcaatttcgcaaccacgcgaaattttgcctgtaaaatttggaagtgggcagcaattggcctttacgaacgtgatggcgaaacagcgcttgccccaaggtctggtccaagattcattgaaacgtgctggaatgatctgacccagtttctcaatgacggctttgctgccacatatttggcatacttggcaagcatatcacaacgaaaagtggtcgttgttgacccaatggtatgggaaaatggcttggaccgtgtcatgcaatataaaaatatgacatttgggtatgacccaaatgttcaggcagaagtcatacttttgccagtacatttccctggacattggactctaattgtccatgatgttcaatgtggtactcattttgccgactctttgcctaccccatatggcagattggatgtgcaactgacggacaaaattataaagatcatttctgacattttgccgtccacagtgttgaccgggattgttgatgtccaaaatcttacggcccaacacgatggaaatagctgcgggtactttgtgtgcctgtatgctgaatcatggcttatgaacaaccgcacatttgttctgccagatttatccatcaattatgaaaaaaagcgcattttgtggcacatcaatgagctgtatggctctgataatgtgccatatcatccaagggaaggggtgccaactccttgcccaattgtctaccgacatgcggatgaagcgcagtcgacatccaaggccgttgagtcaatggaagttgatgacaatgatgacataatgatcatcgaaccacagacaagtggacaggctgctaatgccattctcacccaagcccaagtggctggtgaaaaccaagttgactcgcttgggttggtgtcggagtcttgcgcaccgcaagagcctattgcgcaggctgacgatgtaatatttgtcagacctaagacgcctacaaggcgatcagtgcgcataggtagacggcagtctgcttcgattagccgttctccttcacctgcaccaagacgtcgtttatcaacaaatgctgttgagcaagtcactgcatttacgcagcgttgctaccttgtccacaagggttggtgctgtgctgcagcagcggcaaagcattatccagaatattcaaattctggtaagcttggcgacaagaagtgctctcattgtggggcactactcttcccgcacgaggacagtagcctttgctgtcgtcagggaagagttgttttgccaaaactcaacccgcatccaaaagagcttaaagagctcatcgcatgcgacaaacaatcccgcgagggaaaggagtttgttcggcatatgtcgcgttacaacaacttgctccaattcgcgagtgtttcggctggaaataagccatgccctgctggcggcccgatggctgtaattctcaacggggaattccatcgccgcataagcagcatgcaggctggcacaacacagattcctggctttggtcagctgtacattctggatccagtcgaagccatggagcagcggcgaaaaaatcccacctttacgggagggaaaatcacaaacgatgaagagtttgtgcagggtcatcagcttaatgatgagacccttgaaattttggaacaaatgatccaagaaaatcacccggctgcatctgcttacaagcaggctcgtgaacagctccaagagttgttaagacaacaaaggactgaagagctccggttcttcagaatgactttgttgaacgagcgctcagctccgggtggtttgaaagacccgaagttgcatccccaccaaataatcaccccctcaacgggtgaagggatgtttgcaattcatgcagatcctactggtgccccggcacctaaagggatatgggtcgaaaacaagcaagggcagttaaacgaaatagccccgttcagtccatggactgatagcttgacttatccattaattaagcctaagggcgacgatggatataaaattggcataccatatgccaaacccgcacaaaaaaagcggagaagtgatcaatgtgtcgatctgtttgacactgatacaatgtccgatgatgacatatgcgagaccgagtcaattgcatcgtcagatgccggatctgaagcatcgatgcagtcagtgaccagtcgctatgacaaatcgaaaaaatttgtctccctgcgagattactgcaagtattatctcgccataagggatgaaaatttggagtggcattaccaccacattctatcatgtggcggtggtcttggccagcgctgggttttggaccaagcggccaaaattgattggcaaattgccacttttttgcgccgtccagacatggacctgcgcataagcactccaaaaaatttgctgctgtatttggtgaatcaatacaataagcagcaagctcggcaaaaccccaatgcacaacaaaagagtgttgatgacattggcagcgttgttcgcctttctgagagaaatgtaaattctcttcagtattggaaaaaaatgtatgaagactgcaacaccatttttgcgcgttgccatgacgcaaaaaaggcgcggctcttcatcacattcacgaataaccgtgagtggccagagttcaaggagaacatttacaaaaatggtcaaatgttcactgatcgtttcgacatgtggatgcgtgtgtggtccagcaaaattgctgttttccaccaggagctctatgaaaagagtttcttcggaacaatccttggctcaggcgagtcaatggagttccaagggcgtggtggcccacacgcacacattgtagcccagactgacctggacgcagtcccagaagtcatccaggaatacatatgggctcatattccacctttgccgtgcaaagacgatgactcacccatagcgcaaatgcatcgcgaagtccgcgaactaatgcatatgcaactgcacagatgcagtgatagttggtgtggtccatgtgaccccaactttgggcggtgtaaaaagggcttcccagccccgtactcgaaatgtacgatactacacccggacaggcccgcattgtattaccggcctagcccaaccgacggtggtgcccaaattgaggtgaacggcttaatatacgacaactcgcaagtcgtgccgtacaacccatacattttgctgcgttaccgagtacaccacaacgtgttattcgcatacggtaacaaagcgaacatcaaatatgcactcaaataccctttcaaagggcctggacattgttatgtcgagtgcaaagaggagtccggcagcaaaatcggtatcgatgagccggctcaatatgccaaaatgaacttccgtggtgctacggaagcttttgcagttgtgcattcaatgccatttgcaaaactctcgcatcacgttgttcatttgtccattcatttgccaaaccagcagcccgttgtctacagggcattccaactggtgagcaaagctgaggaaattcagcgaggcgaactcccagagacgccatgctctgcttattggaagcaatggcaaaatgaatggcagcatgttccttcgcttaaggacatgctttttgaaaaagtcccagagcaattccgatgggcaaaagaccgatgggttccatataaaaagaagcctgtcaagaggcccccaatcggtcgtgttgtacctgtccctccaacggaccgggaaagatttgcactttatgcgttgatgcgtcactttcccggtgatccagaccacttgaaattggtcaatgggcagcagtacaacaccttcacagaggccgctctacagcatgggcttcttgaagatgaccaaatttggcacaaaacgctcggcgaggcagccttgcatcgctggccagaccagatgagatggctcttcgtgagcatcctcgtctttgggcagccgagcaatgccctagaactgtggaacaagtacaaagaccaaatgtactatccacagggcattaccagtgcggcaatacgccaagcacgcgagcagcaagccttagccgacattgattggcgtttgcacttctttaacttaagctgcgtgcactttggcctgccagatccaccaaattcaaaagccaaaaataccaatttggctgttgaagaatttttctttggtgatgatgatctgaatatgccgcctggccagccaaatcgaaagccacaacaatacaccccacctccactcaacagcgaccagcaaaaggtctttgatgctgttgtgagggcaatacagtcggatccaaaggatcaaactgtgccgcgccgtttcttcattttcggcgatggaggcacaggaaaaacattcctgtttggccaaattatcaagcgcttgcgaaagcccccatacacctacaaagtgcttgctacggcatccactgggtgtgcggctatcttgctgccatatgggaaaacagcccattccacgttccgtctcggcagagaagtgtcgctagacaagcttccaagcattccgcttgaaagcttctttgctagacggatacgtgaggcccaactcatcatcattgatgagatcaccatgcttcacaacactgtgatagaggtcatcgaccgagtgtgcaaagaaatggcaattcgccagcacaaggacctcctcttcggaggaaaaacggtcatttttagcggtgacttcaaacagtcactgccggtcgtgcctcacgaaggcctaactgcacaagttttggcctgctttcaaacctctccattgttcggtcaattcaccacaatgaaattgaccatcaaccagaggtgggccaagggca

SEQ ID NO: 3502 - DNA, 6233 bp, Heterodera glycines
ttaacatctgagtcagtgattatgggtgataagctggtatttgatgagtttaatgaggaagcatttaatattatggggaaatctgaaagtaatcaaggattataatcaatgattacgagttgttaattattgggtaatattaattaagaagcaattaatcattaaatggtgataaattaataacaattttttgtcaaaatgattttacggaggaattttatggcatgggtgtgaaataatattaatgatttatgacaaattaccaataatggtgagtagcggtgtagtggggtaattgtctcattgaccaactgtcatttttaattatcttccttgaaacagtctggtgtaagtttaactaactatcagttcctaacatccaattattaaatttgggaaatttatgaattaattattttttattgggatgattttacataggaagtttatcgtttgggtgagactcttcaaacttatgtgattaattatgacaaattaccaagaatggtttctagtatatgcttgtgaataatgagtcctcgccaaccataaggtctaattagtgtcagtttgtaacgacatgatatatgattcacaactaatcactatctatatgccattgtttttagatgagaaggtgtagtaattgatgaatttaatgatgaagcattgaacatattatgagtgggaagtatgaaaaaatcaaagaattttaattattagtgacagttgttaaatcaatttttgggtaatttaattaagaaccaattaatcaactaatcactatctatatgccattgtttttagatgagaaggtgtagtaattgatgaatttaatgatgaagcattgaacatattataagtgggaagtatgaaaaaatcaaagaattttaattattagttacagtcgttaaatcaatttttgggtaatttaattaagaaccaattaatcattaaaatgcgggaaaattattaacaaagttttgatcgagatgttttacatatgtgttttggtatggtcgaatcccatgctaaaatactccaattgctaatagggtatgacatctgcattaattataattataaccaattattctttaatttttacaaactgaatatttctggggaaagaagggttatgatggaacttaaattatgtgccacatttttgttgtaattcaatgaagcagaatacttgaagctgagacaaaggaaatgatgaacactaaatgagtatgataattgttgacagattaacttaattatggtattgatggctaggaaatatggcaattaattctaaaatatctgaaaaagaatgcaactttttgggtagcgataaaccttttttaagtaagtaactaattattacagccgcaaggattttagaaatgtataaaaacaaggaaaataataaaagatgaattttcggtagccaatactcggctctccggtcaccaatacctcacaaggctcggatctccggtagccaatacctaattaagcttggcccgccagtaaccaatacctcataaggctcggctctccggtagccaatacctaattaagcttggcccgccagtaaccaatacctcgcaaggctctgacaccgaacactgaaaacttcattcttttgactatgaatttttatttttatgcaaattgttatcctcgtggtctaaaatttatatgagaataaaatatacctttcctattgatttggcaaaacgcataggatggaaaagggagtgggtaaactgagtttgcgatggtaaggagcaataatgaccgaatatgtgttggagaggaagggcagagctgaggaaaccaaataagtgaaggagaggggggtgaggtcacggcgtcatcttatcctgtaaatcgattcctctaaaaggaacaaatggaaagaggctaacgccaactgctttcttaacaaaatcctatatttagagattttggtttcgggtttatttgaattattttccttttctctgtaatacactttctctactcttctatatctgtttactttcactgttattccttattaatttcagacctacatattgtctaaataatcgtttccgttagctatttttcaatatcttttcttccaacactatgttttattctcgaaccgttatcttccaagtgttcgtattcttgttctttatcaaactattctcttccctatacattacctaatgtttgccttactaactcacattaaattctcaatatttaatattgactctcttcaaccacatttctgagttctctatctctatctcttacacccattattaattgtcattgattctatggtgcactacaatatcctcatatgatttcttcatttattcctattacaagacctgcttcacgcatacatttagcccttatctaccctttctcgtctgttgcttattataattagaattattttacgttgaattaggcaaggagcattgtttgtgtttatgattaaaattaactagttttatataagttaataaatattatgcagaactttcaaacacacttatcttcaccctcgaaaaaacatacaatacacacacatacgcacacgcatagacacgcacacacgcgcacatgcatacatacacatacacacacacacacacacacacgcacacttacacatatacacatgcacacacacacacacaccccatgtgtaatttttacacatttttgagtaattccttcatttaatcattatttttcttaatttttgttaaattgtatattctattccttaataatttacaaattgtgtcttctttctcttaattctgcatatttctacctaaaaacgacgttcccaaatgcttaataatttacaaattgtaacttccattgcttaattctgtatgcatgttcactccttaattatgcacttttctacctaaaaacgacatgctcgtgcatattttaaaattgtatcttctattccttaataatttacaaattgtaacttctttctcttaattctgcacttttctacctaaaaatgacgttcccaaatgcttaataatttacaaattgtaacttccattgcttaattctgcatgcatgttcactccttaattatgcatttttctacctaaaaacgacaagttcgtgcacataatcaaaatgtatcttcaactcgttaattatttacaaattgtaacttctttcgcttaattatgcatttttctacctaaaaatgacgttcccaaatgcttaataatttacaaattgtgtcttccattgcttaattatgtatgcatttttattaaaaacgtgaataaaacgacaaaataacacaatttttggtataaaatagagaaataaaaggggtacatgtatgtgtacgtgtgtatggggtatatgtttatgcgtgtggaagagagatacaataaatggtgaacaaaatacaaaagggtacatatgtgtatgtgtgagagagatacaatgattggtgaagaaggtattacaatgtgtgaacaattacaatgaatggtgaaaagacattataatgggtgagcaattacaaagtgtgtccaaaattgagaacattataatcggctcctacaatacccttcccaatataaggctgataacatttttgcatagagcttgatattacagatccaccatcacgaatattgggtctaataaagtttgggtatattacattaattggttcaatctctcctgtttgagcataacgtttgacttgctgtttttatatctaaagccttggttgttgatcacatcataattgagtgtcaatccacggagtttaagcacatattccatttccgcatcatgtagaacatttatacgtcttaaagccaacgcatactattttgcaccagcagtgcagaattctacgatttccatcaattaactgcttatagtgtcgatcttattcagctaaaaagcatcgcgtagatgtgagaaaacaagactatccgtgtcggtggagagtacttaacgccccggctatatcatcatttctgaatagttttattacccactttttttattttcgtaggtaatcaaaacatgatacacctttcaatcctcgatggtcattacgtctattgaacgattatcccaaatattctccaaaatcaagtacatcattattgaagtaaagtctgttaaaggctgtaatttcgtaaagaaatatgtcgcacaaattgttcaagcatagtttaacaatcctactcttcttggttcacaactatctttgttgggttaagatttctaatttctctttgcactctcttacaaattcagcttccttctcaccatttccttttatgtcagtgtcaattggtaaatgggtaaccttcttcaaccgtagtaacattaatttcgattgaaatgcagattgctcagccatctcattgtttgtcattatgtttgcatatgtatttacgtctatcctgcctttttgattgtttttggtgcacttcataaataaagagaatcagagcctaccattcactttgacgggcaaaacagaatatcgaattttctaaagaaatcatccaaaactttgagtattgtcaaggggtagtgtttatcttccgggtatttaactcgacttattcattcagcacatgtacattggtttaccaatcgagtagtgtgtagtaaaattaacgaaggagtagagagaaatgaagtcacatagaaattttttcattccgtcttcaaatccactcatttatttgttgctcattaacattttagcgatctcgtagcctaatacacttacaactggatggacaacttgacttcgtataaattcataacgttttacattcctctcccgcactttagcatttatttttttcaattagacattaatatacatcttctaggtggcgctaattgcaggcatgctaaacatatccgcttacttctattgcagttctctctgtttccaactattcatccacagaataatgatcaatttgccaagtgttcagttgaaaagttattgatctagaaatatcgcaaacaggccttatactagtcatacattcctttagtacatcaatgggtactaaaagacgctgccttccttaataatgccttagttcctttgagacatcaaataattccctcctaaacgataccagcgctgtcattaaaattttcaatgtcattacattttttctcattaattgcctctgtaaatacaaattttccagttgagaagatagttgtggtagaatttgtacctagacccttcattatatttgaaagatttatgtggttgtttttagtggatggggatattaaataaattgaggagaaaagttttactatttattgtcagtaacaccataaattgaatttaattttaggtataatttacttaattttaatcaatactattgtatttattatttttattatattttaatacaactttaatttaattttttaatttagttttatttatttttatttttatttaacatttattttcttttaattttaatcttatttttattttactttttatttgaattaatttgaattttattttactttatttattattcagttaatttaaaggagttgttcagaacctctatccaataaaaggctatttcgccgctcagcacggcataaaaggtactttaaccgtgcaccgtttagcattgtatgatatcctcactattttcaatatttttacttgttttaattgtttatttctttgaaatttctattaatattttacttttgtagtgtttaatgcaatcaaagaacattttaacttgaaatttttaacaaaatgaacttaataaaatattagtagttaattattgtaaaatataatttattaataaataagtttaattcatttattaaaatctaaaaataatgataagaatatatgtatacttcatattatatatcattttattaattaatttttcaatataaaatttctttcttccatcttcttaacgcttttttcttaattattattatttttttcatttattttcttatttttagctatcatcaccattattattattttactaaatttattttaatatttattttttctacaactcttcatctcttcattaggcttgggttatgacacaagtaccatttgccacccctccagtcgccacatgtcaccacacccctcaaataagttttggggttatacgaccaccatttgg

SEQ ID NO: 3503 - DNA, 1315 bp, Heterodera glycines
cccgtcaaggcttcctgatcaatgaacttggcgtattccatttccatgaatcagttcaacaagccgatggaacatcgaatgtagtcaaagactacgttaaaaaactggagaaaaatatcaaccatatggccaaattccactgtgtcaaagttaagtcaaagttcaccatgtcgagttggcctggcacgcctgaggcactgctggctgggatgttcaaacattgtatcgaggaggcagttgctgacagccgtgagcggggcattgaacctacacacctcggctgtatgatcagcagtcctctgctggaagacggagacattccaaccccgatacaacaaatgacaaacaacactctcgacaccattctgagccagttcaaaaaaatggctcagagcaaagaattggaagatgtgatgctgtgtggtgaacccttcaccgtcaccataacgacattggaccgtaatggactgggacgggcctaagaaaaaatctacgttcctatccgtctcaattcgtattcaacttgtgtcacataatgtattgtttttgtctaccctatatcacacgatcattcatttgaacaatttattgagaaaatggagagaaaattcgacaaactccaatttttatgtaataataatgatgaataaagtggtaaaataaatacttagaaaatgctaaagaaaaaatgcaaattgtcatgttgataagtccgggatcaattaaaatatacccagcaaagttttaattccaaatcttaactttgacagcaaatataatttgacggcatcacagtcatcggctgctgcagaatccacggcaagtgtcgacgaagtttgggctttttctcactcattggaaggttcaaaggattagggcgtttcattttccaaaatttgaataaagaatgatttcgatttcttgctgggaataattttggtgcgcaagtgggcgtggccaaagtgcacacatcgtacacccggtcattttcccgattcattttaaaaattttcatctttttttgcacatctgctgttttcctctcctccctcacttgtcctgtgctttatgggggtcgtattatttaatggggattttggggaccgtataattaaaataaatatttttgctgttaactagggcggttgctttaattacaaaaagcaccgtttatcctggcagcaatttgccttttagggcttgaggtctttcgcttgacttgactaatttcccgagtcgtttaggtgccctgtcgtcttgtgcttcatgggtggcggtgtgctgctcttcaggccatagttttgtttatggtttt

SEQ ID NO: 3504 - DNA, 9655 bp, Heterodera glycines
  unsure (1)..(9655): unsure at all n locations
taaaaaaatgacaatcatcccgaaaacgctctctaacttttccattgatcatatctctcgcgcccaaaaagccccgtcaagctttctgatcaatgactcttggggcgtagtccacttcccttgatcggtgcagcaaggcgaaagaacatcaaaagagcccaaggactacgttaaaaattggacaacagcatcgagcacatggcccaaattccactacgtcaaagtcaagtcaaagttcaccattacggatttgccgagcacacctgaggcactgttggctgggattttccaacactgcatcgacgaagcaattgttgaaagccgtgagcgcaacatcgaacctacacacctcggctgtatgatcagcagtcctctgctggaaggcggcgacatcccaatcccgatacgacaaatgacaaacaacactctcgacaccattctcaaccagttcaaaaaagtggcgcagtccaaacaacagaaaaatgtatcgttatggggtgagccgtttaccgtcaccatcacgactctcgaccgtaatggactaccatccaaacggcgagttaatgggggagctcgtcgcccagtcaaaacggccgtccatcaccgaattaatgaccaatgcctgattaaaatccgcaataacgacaaccacttctgccttttctacgcgctgcaggcaacaatggtcgccaaaacgtgcaattggcctcgctggaaatttttcgactatgtgaacgacagaaaaggacaacagggacagctccatcgtgatgcagttcagctaatgcagcaggttaatgcaccaatggacttggatgggtacgacgcggacacttttgtgcctcacgtcgttgactactggaacaacgcgcagcgacaacaccgctttgctgtgttcatctttggatcgttgggacagtataagccgctgtacaagttcattgacaacacttacgacactccgctgctgttgtacttcaatgaggaccatttcgatggtgtgcagaagcagggcggtttgttcggcaggccttattgtctggagtgtgagcgcccgtaccgaagaatgtcagagcacagcaaaacatgtaaagcgcgctgtgtgctatgctcacgtgttggaccgctgtttccgtgtcagccaacggatggattcatcaaaaagtgtaaagaatgcaacaaaaaattcaccaacaacggctgctaccagcatcatctgcagtcaggctactgcaagcggtcgaaaaaatgcaaggattggtggtgctgtttgggatgtagcagataacaaaagaaatggcagaaaggggcatgtttgtggtgaacgcttctgtaagatgtgcaacaactaccacaacacggaaagaggctgtttcatccaacccattgagcccaaggaacgcgacccctaccgcatcgtggcatttgacttggaaaccatgcagcacacaccatctgtaaagcctgagaagcgtgagcatttgccgaatttcatcgctgcgcgtgtcgcatgtcccgactgcattgaaaatgagagctggcaagaggcatcgggaggctgtgaagtgtgcgggccaaacagaacagtcgccttttgtcaaagccgcttcactgaaacaacagtcgacaagcaagtggtggcggaaaatccattggaagcgtttgtcagctggctgataaacgacttgccgttggcctacgacacctacgccttctctcactttggcggccgcttcgatatggtgctggtgttccgcgaattgttcaaacgcggatataacccggacatgttgcgcaaagtaatattgactatttttcaaatttgaataatttttctatttttagggaaataaaatgtacgaaatgcggattcgaaggcagaagaagcgcaaccctaacattgttttccgggattcattcaacttgatgccaatgtctcttgcctcgctggttccatcatttggcttggacgtggaggacaagccattctttccgcacatggccaaccacccagacaactatggaaagcagatccatccaacaccagacgactatttggtcaagggtatgatgccagataaacgacagaaattcgacgactggtatgaacaacaccgtcaggaaccattcttcctcgacgaggcgttggcaagctactgcaccaacgacgtggagatactgatggcggcgctgatggcttttcgtcatgagtttttggatgtgacgaaacgaaatgaaggaatcgttgcggagcgtgcggccttctatgagcaccacgacggcattgatgtgttgcgggagtgcatgacgatcgccggcgcatgtatgaagcattttcgcaccaaccatctgccgaagaagcatttggctatcgtcccggaacgcggctacgacaacgcccaaaaccagtcgttgctggcacttcgcttctttcattggtatgcggaggagcatggtgttgtggtgcagacggcgcattcggctggcggagagaagaaaattggccaatattccgtggatggctgggtggaggaagaaagaagagcaattgaagtgaatggatgtgtatggcacggctgcaaggactgcttccccaatgacaacatgatgatgccgaatggaaaaacggctggagaggtgcgggagcgggatgagaagcggctggaattcatcgaaagtcaagtgtcacgagtggacgtgtactgggaatgtcaaattaaaagaatgctgaaccgtgacccgtacatgtgcgaaagttttggtgattatgtggatgatggcccgttggacattcgcgaggcgttcatgggtggcagaacaggaccactgaagctgtaccacaaggcgggagagggcgagaaaatctcgtactatgactttacgtccctctacccgtacgtaaagtgagttttgtttcgatcattattcacaatttataattttttatttccagtttctccaccacttacccgattgaacacccaaaagtgctcatcttgaatgaaaatgtggagtggacaagagcacgcgacaacccctacaaattgtctctgctcaaggtttgggtgattccgccgcgaaagtgtgatgtaccagtgctacccgtcaaagtcaacaaacggctctgttttccgttgtgcatgcaatgttgtctagactacccgaaaggaggcgttgattttgactaccattgtgaacacgacgaccaacaacgcggatgggtcacaacatgcacatcaattgaattggacgcagcacttgaagagggctaccgcgtgaccaaagtgttccgggtgctgaagtacagacatggcgacgacaaacttttccgcccatacatcgctgagttcatgtcgcagaaaattgaagcttccggatttgacgccagcattaagggaaatgcggagttggagcagcagcagttcatcacagaatgtgcggagaaattcggaatttcaatcgacaaggacaacatgaaagtgaacaagggcaagcggtcgttggcaaagctgtgtctcaacaacctgtgggggcgcttctctctgcgcaacttcggcctcgcccagaccctcatcacagacgacccttcagtgttgactgaatacgtggaaaacagctcaattgacatcatttccgttgatgagctggacgaaaaacatcaattgatcagctacgtccagaagaaggagggngtggaggagcacgagtgctccaacattagtgagattttttcaataatttttgtataattttgggatttttcagtaatctcactctggacaacatcaaaggcccgccttctgctgttgaaagcgatgcagaaggtggtgagaacccccnggatgtcggttgctctacactgacaccgactcgctgattttcgtccacccgatcggcatgaacccgttggagacaggaccacacttgggacaattcaccgatgaatacccaaagcatgaaattgtggagtactgtagtggcggagcgaagcaggttaatttaccgtttatttagtgcataataatttatactttatcattttagtatggactcaaactccggcgtaatgggcaggacgaatttgtgctgaagctgaggggcatcacactgaactacgacgtgatgcagaaccaatccctctgctacgacacattcaaagaagaagtgttgcggtatgcccaaaccggagagtatgagcaaataaatgtgatgtacccaaactttttgagaccggacattaggggtggcggacacgtcacttcaggccccctccaaaaatgttatcgcccatacgtaggcaaagggatagtgggccctaattatgatgttctcaatttcggacacattttgtaaatttatcgtttatcattcattgtatctctcacatacacataccccatacacacatacacacgcatgtaccacctttgtttttcatgttttataccaaaaattgtgtaattttgtcattttatttgcgtttttaataaaaatacatgcataattaagcaatggaagacacaatttgtaaattattaagcatttgggaacatcatttttaggtagaaaaatgcagaattaagagaaagaagttacaatttgtaaattattaaggagtggaagatacaattttattatgtgcacgaacttgtcatttttaggtagaaaagtgcagaattaaggacattaacatgcatgcataattaagcaatggaagacacaatttgtaaattattaagcatttgggaacatcatttttaggtagaaaaatgcagaattaagagaaagaagacacaatttgtaaattattaaggagtggaagatacaattttattatgtgcacgaacttgtcatttttaggtagaaaagtgcataattaaggacattaacatgcatgcataattaagcaatggaagttacaatttgtaaattattaagcatttgggaatgtcatttttaggtagaaaagtgcagaattaagagaaagaagacacaatttgtaaattattaaggagtggaagatacaatttgtataaacttaaaaacgaatttgtcgtttttaggtagaaaagtgcattattaaggacattaacatgcatgcataattaagcaatggaagttacaatttgtaaattattaagcatttgggaatgtcatttttaggtagaaaagtgcagaattaagagaaagaagacacaatttgtaaattattaaggagtggaagatacaatttgtataaacttaaaaacgaatttgtcgtttttaggtagaaaagtgcattattaaggtaacatacatgtgtttaccaataaacgtaagatggttgactgcattcgtagcgaccaccaccatcattgtcgtcaatttcttcgacttcgtcaactcgaccaaggcgtttgacaggaatgaagtcgtcctcgatttcggtaaacaatttgccaagccatcgctctttgttggtgtagtcctcatccacaatttcgagtagctccattgggtagtatctgtcttcgccacacccggagtatttctccacaacacacggcacgtatgggaaatgcagcttgatacggtggcgagcgtagaaatgggcagcaatgttaatgttgtacggttgtctgagtctgccatacgccggggttaaagccgctcccttgtccgatattccgtcgacaaaaaatgttttctgcattccattccggtcctggtatgtcgtccgaaccttttttccgaccagctccttcaatgccttcactcggtcctcaggatgattgagcttgtcgcggagtgatttcggggaacagccgagaatttgggcacaaaattcgattacaaggaccattgtagcagaacaaatgagacatagctgacaaattgccgggggcttttatactccccggaaaattaggccacgcccactttttaaaactatttaagccaagattttctcgcacaatcaaatcagtcttgcaaaatttcatcaacaacaatggcagatcaatttgtacaacccgaaactgcggaggagcaacaagtgaaagctaagaagccaaacgttgatgagcgatttctttggaaaatcacgcggggccaatttgtgcttgcgattcggctgtgctcaggttaatcaaatttctgacgacaaattaattgacagctttcagaggactggaacaatttatttcacaacaaagacaagacacgtcggctggaagatgggcgagtggcgattggactcgagatgtgtgaagaatgcgctaaacttaattgttgtgtcagtgatctgatcgctggccaaaaaaagaaccagaaaaagccggaatgaaattgatttttaccgattaatatttttaataatcactcccactattttgaatttatcttgtttttaataaattatttttgagtttaattcgttgagcaactgggtgtcaatggggcgggttcctagtcacgcaactgcgcagcttttgttttgactaaccctttcgggtgtattccatccattccttgaattgagtcatttgagtgtcctccttataaaatacgcaatttctaaaatgcggccaaaccgtcgtttcaactcccacccaacaaaacggaacagtgattatctatggtcccaattccgtattcgtcggcacctgaaaaagcaacaacgacgaaatcttcgacatcaagtgcaaatgcatgacatctcgatggggttcgaaagaatggaactatccgcctcgttacctggcggtccgtcgaacggcccgactacattcggtgatcaagttttaaaattgcttatctgattgatcaacatttttaggcgaagcctttttgctggaagaaatcaaaaatttaaaaatgcaactgattgcgaaggtttcgaccgttgaggaaaaggccaagcagaactcaagcctatgcatgttggcctcaattcgtgaccgactacaaaaatttacggaggaaattgaagaatgtggggagtgaaaggtgcaatttggattctcgtggtaaattttgggggtgatgggaattacacaattaattttataattggtgatggccatttttttgaatatttttttttttattaaaatgaaatgttcgatctcctaaatgtattgagtatgatattgttcattcattcatttatccgtcgaccatcagtccctcattcttaatcttccttgtcctcctgttcattgtcctcctcttcggggatgggggtcaaaactgtaaacatttttactgtaattattaattgatcagaaatgtgggagattaccgtaatgggacttgtattttctttccttcggcttcggcggcaaaccatcaacgacgtttttgtcactcgtaacaccggcatcgagcttgaatttttattaaagaaaaaatttcaaaacttttaaactgaggggtctacctcacggtccgttgagtcggaaatccaactatcctcaatgaatccatcgccattctcatcggttgcctctggaggagcagtgcggtgcttgaacggaggaatggccaatggctgattaaaaaattatcagaaaaatcacactgaattttaccggaaaattgcgacgatgctgaacattggtgttggttttgcggcgttgcggagaatgaaattcggcctttgaaaaaaaaaattaaattaaattgagtgtggaaaatgtttaaattaaatatagaaatttattgaaattattacccaccattttgtattcgctttttggcggtgaacggtgcacatttttgacagaatggagacgacgagtcatcaaaaccatcaacagcaagatggacagctgaacaatgggtgtaagttagaaaagaaagggtgattcaaatttggacctcaagcaaaagcaagaacacaagtgtgacccaaactttcaacattgggtctgttccattgggaacacattgggaaatagtggtcgggaaattttcgaccagaaaggtgggaacacaaactattgggtggcggtaatcggctggtctaacgcaaacattcaacggagctacacattcgcactggggcacgaccacccaagtcaaatttgaaggatattccatttctaaaaaattgtttggaaaatgaaagaatgaatggccatagaccaactccgctgaatgaatggatatggcacatcttcaaagaatgaatggcccatacaattgacccgtccagatcataacaacaacaaatgacccgccactatagcccattcagtgcttatcttatggacgatctccgtttaacaaatgttttcaccaaaaatatataaaagatgatatttattgaaaacgaaaattgttgagggtttctaaaataattaaaataagtgaatgttgtgcaacggcttgatgaaaattgtgtttataaaatgattaaaatgagtgagtgtgagcaacggattgatgaaaatgtgtttttaaaatgagtaaatgtgtgcaacggattgatcaaaatgatattaaaatatttaaaatgagtgaatttttaaacataattaaaatgagtgaatgttggattgtcgaagaattgcatggaggagtgtgaagcagccgaccgacgaatgagcgaagccgagcaaaacggtcagtcactactcgaaaattttctcagctaccttgaactgtataagagaatcgacggccttaaataattaaatcaatttaaaaattatgtcgacgaattttatagttattattatcagattaatgaaacaatcttaataagagaggacaaccaatatgaaaaaaggtcagccatcacttaaaaagattgtgagaaaataaggatccccactctggacgaccaacacaaaggaaggtcagccagagtggggatcagataaaaatgagagacaaaattgatgattttaatttatttaattcatatggacaaattattattcactttcgtccgttgcgcttgtgtggtgtccttagcatagacgatgtttgttgtggtggggagtgggtcattggctttgccgagcagctcgcgcactaattttatttgaattattaaaaaattattttttttttttttttgaaaacccacatctgacaaacaacgggtgtgttgtcaattttacgaccaattgcgcctccactgcctcctcgttgagcagtgccttcagcacttggttgatcgttagatcttcaatgaagttgacggtcagctccaatgcttcagaccaactcgaccgtacccaactgtcatgaccgggcgatcctataacccaaaacaaaaaatgttttcaattttgtaaaatacaattattaccacagcatgccaaataatacagccgttctccagttgtcaaaactgacattgctaatatggactccacttcgtacatctgctcctcctccgcaccgttttgctcgttgtttgtgatcggctgcacgcgagccgggactttccctcttggcaacttgatccttgttttgggctgtaaaatgaaaaaatttttaaattggtacaaaaaatcgtgaaatattaacaaactccataaaaaggcaaaaataggtattataaaagtcatcgtagacacaccaacccaagtggaaaacatgttttttttttttaattttaatgttgcgttgattaattaccanaaaataatttctattaata

SEQ ID NO: 3505 - DNA, 1039 bp, Heterodera glycines
  unsure (1)..(1039): unsure at all n locations
aatcaatggggacggaaaaggaagcgaacatccaccaaaccaaaggaaacaaatgaaaaatacactgagccatggattcaatggggggagagaacatttaaatgatttgtcacttacatcgattacgatgttaagacccaataaagcagcattcgtcagcgtctccctttccgtctgaggaatgttggcatgttgtaacagtttattaaggttttcatccgttatccctgaaaataagatcactgtttataattgtactagcacaatataataaacagtaccgtttttgtggaaaatataaagcaaaatgaggcgcaagcgatcctcaagtttcactgacgggtcaatgagcaaaggaaccatcagtttcatggggtctttgattctctccccatcagcatccattccaatcgccaaatcctaaaccaaatataattcggacgaatttggtaaccggagcaaagacctgttcaactttacacaatttgtcgactccgtgcttgtaacgattcatacattcttctgccagatgaaaatgagtactaaaaggtaaataagaaagaaatatcgttttttataacgataaactgtttttttttgttagataagccacctgaacttattcaattccttttgatattgcggagcttttttgatcagaagcgaaaggtcctttattgatctggcatcacttggcattttcttattttccgagaattttttcaaaccacgagtcacctgaataaatgggtattatgccagctcgagttaaaataaaataagcatttgcttaatttaaccccatgttcaatacttcttgcgaaacaacagcaatgtgcttgtgacggttgtccgcccataggtcgtcgttttcatcaagtagcacctctttgtcaacagattcggctcctcccgtttcgtaacggtaaacatcattctcgatatttaaaaggtcttgggtcatcgcctgtaaagtgagttcgtgcagcaatggcgagattgcgtcnaatcacggtcgatgataatcattgtgatcgcg

SEQ ID NO: 3506 - DNA, 2900 bp, Heterodera glycines
ccgcaaaaaattatttaagaagcataaaagccaaataaatttggagtgtgtcagcataaagcccaataaatttgtggtgtgtcagcataatggaaaagtaccaaagcttctatagaccttaagcttttgtttaataccaagaatataggtattgaccaagtaagaaaaaagttatggcctaagaaactgggtatggtcattcacgggacgcataaaaccgactagaaccttaatgtttgacgaacaaagtaggtaataaaaacctgagattcataaggagtgaatgcaatgttaatttccttaagggttcgaatgaaacgcgaaacaggacttctcgaaagcgtagaaaacagctgatcaggacaggcttcagtgaagaaaacatgtgcacatttgtaaagattttggccggagaaatctctaaccaatttgtctatcgattcctaattaatatttagttaaacataaatgattgaagaaagttttacttttgttggggaaatcaaatagacagcgtccaaagcaggaagaggttcacggcgtttgtttaagtcctcgactattgttattccctggtccataacatcgtgcattttgcagcatgcacttaacattcgcatagccaatcggtccacaatcagtacattccatgctccgcccttctgcgggttatgaagtggttgaagaacttcgttaatgagttctaaaattttgttaattttttttttttaataatacagttttttactttgtccaacaattgctttcagtgtcattgtgtgtgaattaaacaaaaaaaaaagataggtagataaactaaaaaaataagcgataagctatgcatatgcatacataacagaacagagaaaaaaagatactctaaaatagtacgagttgggtttttaccataacaatcacatattgtgtgttaaatgtaaaaaaaaagaaagcgaaaataattttcctttttgttttagcacataaaaaatgcataaacatctggtctgtacacatttgcttttatcttatcttcaccacgcaaggaattgaattgatttttctttctttttcggctaacattaacgtgtttgggtggacagggaaaaatgttagctcggccaaagggaagtgaaaagaaaacccaacaaaatatgtaggtgcatgtactgagctcattcattattttgaaatgataaatctcaagttgaaacaaattgccttactttaaatgtaattctgcgaggatctaatagcttcaaaaacgagtaatctacataatatttacaaagacaaaacattttgcaagtattcagtaaactaataaaatggctactactatacctgggtcgttggttaacaaaacgaagaagcattttttgggtatgacggcgccggcaggttatgtggccggagttggtcgaggtgccactgggtttacaactcggtccgacattgggccggccagggacagcacggacgtccctatggatgctgctatggcttcagccgcagctgcagctgctgctccagcgccagggccgccacccaaaaaacaaagaaatgacgatgaccatgatgaagctgaggatttgaatgatgctaattacgacgaggtttcccacaaaaaaccttttgaaaataataagatttattagttcgaaggttatggtggaagtctgtttgctaaagacccatacgacaaagatgatgaggaagcagacgaaatttatcatgcggttgatatgaggcaggacgaacgtcgtcgagaataccgagagcgaaagtacaaagaggcggtcgagagttaccgaaaggagcgaccgaagatccagcaacaattcagtgatttgagacggcagttagcgactgtgaaggaggaggaatgggctgcaattcccgaagtcggcgacagcagaaacagagcaaaacgcaatccacgaggagagcagtatgccttgccaactatgatttcttctgagtcaagctttaagactaactcctgtccccgactccgtaattgcctctgcaatgagctacaaccaaatgaacacaatgcttgacaaaaatgtgcagaatgggatttctactccatattccggcttccaatcaactctcgggggctttcaatccacgtttgggttccaatcaacttttggatttcaatcgaccctcggaggatttcattctgttctcaatggaggacagatgacgccagggtggaaaacacaaactggctcctcaactgacctggatttgcgcaaaatcggacaggcaaaaaacagaataatggacattcgacttaaccaggtgagtgttttattttaataaaagttgatggttgccaaatgatgaggaagtaaaaggtctgacgcccattaactgtgcattaatggctgttgaaatgcattcaaatgttttgtgcgattctcttgtctgtggggatataattttgcattcccttaaattacttgctaaatgaaatgtcactttagtgagctaatcaatgcacatttgtttcatttatctaaacccgcaaagacactaatgtcatgaaatgtacaactgagttaatgaaaaggtggttgatcacgaagttttcaatctgatggcacatagcaaaatttgaacatgaataattttataataattcctataaacattgcaatttttaaggtgtccgactcggtgtccggtcaaactgtcgttgaccctaagggctatctgactgacctccaatccatgatccctcagtttggagcagacatgcaagacattaagaaagggcgaatgctgctgaaatcactgcgcgagacaaatccagaaaaaccacagggtaagttattatttgagttcgacaatgaaaaaaagcctggaccttccccaggtaactctaattatta

SEQ ID NO: 3507 - DNA, 1663 bp, Heterodera glycines
  unsure (1)..(1663): unsure at all n locations
attgtgctgacgccgaaaacctttggctgatgcatgcgaaatcgcgttggcaaggcggcgacgtggagggagcacgacagatcctttcacaagcattcaaacataatccgaactccgaggaaatttggacagccgctgttaagctggaatcggaaaaccaggttaattcgggatgaatgaacgatcatttagactatcttaatttcttatttttgttgttttaaggaatttgaccgtgcccgaaaattattagaaagagcgcgcaattctgccccttctccgcgtttttggatgaaaagtgctcgattagaatggtgtctagacaacttagacagagcaaatgaattactcgctgagggaattggccgttaccccgactttgagaaattctacatgatgttggggcaaatactcactcaacaagcacagtttgaagaagcaagaaaacaatacttggaaggaacggtgatcactaagcaagcattttatttttaatcctttcaaaaaattttagcgtcggagtcctcatagtattgcaatttggcttctgctgattcgcttggaagattcgcgtggtcggcacattaaagcgcggtcccaattggacattgcgaagaccaaaaattccaaatgtgaccaattgtggctggaagggatccgtatggaattgcgcgccgggcaaaaggaacttgcacagtcaatgcttgcacgggctctccaggagtgcgaacattcaggcaagtagcccattaattgcttgtttaaattttaattggtttaggtcgtttatgggctgaagccattttcatggaacagcgacacgcgagaaaaacgaaaatagtagatgctttgaagaaatgcgagcacgacccgaatgtactgctggctggttccaagcttgtctgggcagaaaggaagactaagaaggcgcggagttggttccaacgaaccgtgaaggtcgatcccgactttggcgatgcgtgggcatacttttaccgcttcgaattgatgcatgggactcaggttctgttcactaatgaagtttccatcttttgtctatacaatgcatgacccttttgaggaagagcaggaagaagtgaaaaagcgatgtttacaagcggagccaaggcacggcgaattgtggcaagaagcatcgaaggatgtgaaaaattggcggaggaaaacccttgaattgttggaattggtcgcatccaaattggaaatcccttaatttttcttgtttatttatattcataataaacaatttttcatagtcattgtctgacaaattggtgtggctccttcacatagttactttttcgataggggtcgcaaatatttgaaaatttccagctgtggaaaatgcttgctctgaagtcgcttttgggtaggagccctctggtcaatcctttggttttgtctttgcggaacagatccatcaaaaaagtgaagaaaaaacttgctgcaggggaaacactcggcggtccggaggattatgcgtataattgtgagttctgaaattttccccttgtctcgggttaatgaaatgaaaacattcttcttcggtgtcgtggtaaaaatgtacattaatanaatgagatatttagaattgaatagctnaaagcttttataatgggagaaatcatgcgacccacgcaaaatt

SEQ ID NO: 3508 - DNA, 4829 bp, Heterodera glycines
  unsure (1)..(4829): unsure at all n locations
ataataatttaacttctgttaagggatgaatggtggactcccaaagaaagatnnattaaaagantnaaatagtggnaccctttttagtattgtntgtttgttgnattnanttngaaaaatatttnaangngaanagatgattntttttgtnggatnggnttattgttagatattaaaatttntngantnanaatnagaagagttaattnntagtggttgtaaaaaanttttntngaanggaaattaaaaaattnagtgtgttnattnatttgtttatttatntnngntgttnttnntgggnatgaannatnatnaataattntttggnngnnttngnnaggtnatangnggtttggnaagtggagtnaangntaaatggtntggnnaagnantgnngggagagttgtttnatngnngtttnnattnnnaaggnanagttttgcactctgctcgaacgcatgtacatgtcggggataacgccaagaatgtggacaatgtgatggtttatctacaaatttggtgtgtcggatttacaaacaatgaagaaactcaccgaatcggcgtggaaaagtgcgttggattcggtactcgcaccaccgctattgtttctgttggatggcgcgttttggaggtccaacaagagagactttattgcgttggttagcaattccgtctcaagaatcaaattgtccgggaaaactacaacgtagatttttaatggtttatggatggtaattctcaaaatcagttcaatttttggagaaaaaagaatcaaaattctattaaccaactcaattgaaagaggattctaaaactcaattgcaaagaaaaggaaataacgcagtcaaaaggaacccaggagaatctgtatgcttacaattagctccttccattctaaaaaaattaaatgcttactttcgccgttgaaaatcgcattcgtcgcgccataagcgcctttttgagcggaagggtcggcgagtgaattcgaaggatgcgtcgtcggcggctcgcaggcatttcgaagagagaacttaaagcgttttaaaatattggagcttggcattccattgacagaccgttgctgaacttgcgccatttgacgcgaagacggggacggttttctcaatggacgaatgcccagcggttgttgtggcgctaccaaaagatttttgtcgttgttgagaacgttgagaaccaaattttggcgctttttgatgaatggcatttgccattgaagtggccgaatgggaggagggatggtggggagggggcaaaggcagcatttgactggtgcaattggacgacgatgaagcagcgtttagaggggatggacgaacgccgctcatccgagcggacggataagtgtctaaatgggacagcggcaaaaatggaaaaatcaaatatagcaaatttcacataaaaacctcctttctgtacgccagcagtcggaaagttttatttggtatggaaaatggccgagtattaaaaaatccatcgtagttgattggttttaaaaattcactatttttatgcaaattattgaatttacccgtggaatattgatggagtgattgcacttggttctgttgttgggaaggacggatgagagtggaggcggacattacaatggcaccgatttgaggcgggggaatgcccgtcgaaagagtcggattttgttgaggtgggggcgtcgacacgcactgaaacaaaaatggcagaaatttggaaccaattttttcttgagagaaataaaaaattttagccgacaggcgccgcaggagggaaaatttttagaatttttaatgaattttgtgattaccgcatttggaatggacgaagcgatcgtttgaagcggagaaatgacaccgttttggcgttgtttttgcttctgttgtgcattaaattccgaacgaatgtccgcttggtccaattgcaattgttcgacggtccgttgaagaatttgcagggcactgacagaaaaggaaaatattattgtaaaacccgaattaaaacacttcaaaatctgtgcatttgaagaaccaaattggtccattctctctttggtctccgcccacttttccttcagttccaaataatagtccaaagaagaaagtccgtcgttcatttgctcatccaaaaatgccgattttacgggcgaagaatgccttacaaaacaaaaagatttggacaatccgaagtatcggaaaaaaactttgtgctgttcgaagagacgcgcgatttattcgacgcgtttaatcgctcatcggtgggcactctccggcgcagccattcgcagtcagctgaaggagagagagaaaaagtcaacgaaagggcggggaaaaacaaaacgcactctctccgctgatttcttttccattttgggaatccgtcgctgggaggggcaaatttaaacgccgacgacgaatttctttaagcaaatcaataattaagtgggcgaaatcggccgaagagaatttggcaagtttttgtctgagttggtttcgagtggcggagagtcgcgggttgggctgaaaaaagaaactcagtggaagaatttgtgaaaatttaggtttaagtggggaaaaaggtcgaaaacatacgggcaaaaacatggccacgtgttggttggcacttgcggtggggtgatgctcagatgcaacggcactccaatggccattcaattcgcgtcggtcgaccttaaaatggaggctaaagatgtttccaaaacaacaattaacagccaattaatgcgtttggtgggtttttgttgcggtttggtcacctcgtcataaacgtcctgaaccattcgttcgagtatcaacccactgcttctctgaatggaatccttgaactgtttgacttggctgtttttctttgaatcgacgagatccgggatgagaaagtgttggttttctctgtgggagggtcgccttcctttgatggaaattttaaattaaaaccaaagaaatgacaaatcaagacttaccgcagagaaacattgaaaagcgatcggtcatttcgtactccaattcgacgagtcgttccgcgagttcgttctgaaatgttaaagtgtccgcttctccgtttgtttgtttgcccccttttccaccgttcccttacaaatccctccgttttcgccaattccgccggcgtttgccccgccccattccgttggccaatgtccgccccgtacaaccaaagcaattccgcctgcaaattctgaccctctttggccgcgacatgcaacggagtgtttcccttctcagtgtccgcgtaatttggacacgcgccaagcgccaaaagccttaatcacgtaaatagggcgaatattagcaaataatctaattatttaatcagtttattggccgtttgcttaattatttcagctaataaagcgattcacaattccatcccaattcattcacctcaacgcggtttcaacgtgcgcagtgcgaacacacgaccaaagctggcgattccttccaaagggacactttctgctgaaattgcttcgaatgcttacaaatcgtccacattgaattcgtccttggccggtctgatggcgaatgccaattgcgcatatttcgccgtaataaacgcctcctttttgggaattatcggatcacttaaaggggaaggaagacaaagttatgcgcattgcttttgccaaatgtcagcccacttggagacgggcttcttcttcgcccgacctgcgccccccaacgaatcgatcagcgaatgctcccaaacattgttggcgccattacgacagagcaattggagcagagccaattgtttgtcgtgccaaacgccttttgtcagtgaacggacttggctgaagtgacggcctaaggagaggaacaattggaaaggaaaaacgaagcaaaattagggagacagacccaaatttcgatgtacaaaacaacaatcggagcagatcagcacgccgtgattcagcgaagcccaactcggacaagaggcaccgcaatcggcgcaaacagtgccagaaaattccatgggaaaggcactttaagaagagggatggaaaacatcagtacaatttttacgaataaaaatcccgggtctcttcaatgtcacgaacgatatttatattttgaacgctgaacccacatcaaaaaattaaagcgagaaaagacgggaccagagaccgacactttgggtggtccattcatttgtttagtttgaccattcataacgacaagataaattgatattttttccgcgttaattcaaaaaaaaatcgcttctttccaaccaaactgaacgtaactcgtgaaattgctaaataatttgacctataggaaacaaaagccttgtaaagggaaagatgaaatgtgttcagttttgcactttaattcataaatacagtacataagtttggttgcttttccaatacaccaaaatgtgttaactattatgcctccgcctcgggtgggcatcgaacccacgcctttcacaaacagagcaaaaatgttataatatgcgtataaaatggcaaatggctcttatcactagcgaatttgggtgataatctgttcgataactttctttttgctgtctcttccgccgctgattactttcgcttgcttttcttttgtcatttgctttattaattcacaatgtactcattccatgcttattttcccattttattatttctgctggtttttcttgccacttttgcgctgccaattggcgcgtacaaagtgctgatattcagccaaactagcaccagaagtcacgtgatgctcaatgcgcgagtctcggggggtttggcggtggatgggcacaacgtggtaaaagagaag

SEQ ID NO: 3509 - DNA, 4002 bp, Heterodera glycines
  unsure (1)..(4002): unsure at all n locations
ctaacgcaattcttgtgaacaaagcggaagcctaaaaatttaaaatttttagattttcgacctttaaaatttataccgaaaaagcgatgaaattcaatctttccagaggcatttcgtcaaaattcgaggccgccattggcatattggtaaagagaatggtgccaaaattgttgaaaagtgccgcggagaaggcacaaagtgcgcaaagtgggaacaaaaggcgccaagttggcggaccttatacggtaggaagggtaattagtagttattttgaaaaaaaaagttactcaaaatgccagggacagtctgcccccagggttctccgcacgcacccgaaatttttaagtgtaagaatagtagtaatttgctgaaattttcgtttttcattgttagtaccccctgaactacctcatcaaaatctcccagaatttttggcaaaaattttcccgaaaagccctacgaaattcctgttttttgttgaaaaactattaaaaatagagggttgcactcaaattttcaaaaaattttctggcggcacctttgtcacctcgggtagggagcatactgagaccgtccctggtaaaaacatacagtttgccaaagttggcagatattgaattgcttcgcggtcatcatcatcatggtcaccattttcttcacttttttcggtatttttgctcatccataatgatggcagtatcagaagagcctttgaaaaaatgaaatttttttaaatgtttgtccaaaaaaaattcaaaatatttaatgccaatttttaatccaaaagttcaaattagtaataatttttattgtaattagtccatggatttgtttgagtgtgtttttgttaatatacacctgcaaaaaggcaacatcaaaaaaactgctgtaagcgaatgccaaactgaatggaaagcggacaaatgccaaaactgaaaaaattggtgattgcaaattattaccatttagcagactaattacaaatttttggtgtttgttaatgtgttatttgtattagtttaaataagtaacgatgcaaaaaatggtccaagcgatgtgaaaagcaaaagctaaaaataattggagtgaaaaaaataaaaagagaaaaattataaaatttattttttaactaaaaataaataaaaatttataacttttttatttaaaatcttaattcatatatcggcgaaatatataattttttattaaatttttctaggattatgaatttattttccaatttttttttggcactttgtttacctaccgtaaacaggtggtaccgttgttgtgccacggcttcgtcccgttttgtgtcaataacttgggttaacaacagccgttgctgtagcccgtcacaaatgccaacaacaaacaatggcacaagcagcaggaatagcatcgacgagagcactccaccgtcaagaaaacagtaaaaaatggccatggaaaacagacaaacggttttggccaagttcgacagaaaagcgggtggacactgctttaatctaaaatatttggagaatttaatgaaataaattttaaaaaattagttgtgtatataagagcattttattcgtttataaatttgaaattattcttatttaaaaaatatttatttaaacacatgaaatttgatcggactattttttaatacaaaattaattgaataagttaatatcatctaaatggataaggaagaacttttgaagcaccctaataaaatttgaattaatttaaaattattaaacaatcgaaattcattgatttaaatttcttatattatgtacaaaaaaagaaaatatttttaatcgaaaaaatgcaataataataaaatttataaattaaaattttaattgctttacgccccaaatgatgtaaaaaaataaggcaaaagccgcggtgtgaaaaatccaccgtcgcacagataagccaaacagcgaagatgatgatggcacggcactgtgaccgagtgtgccgtgccgacaaatttgcctttctctcgcccccccccccaagggatgatgttggggaggggccgtgaagtgtttgtgccgagaccaaagttattgaaacgaaaaaatggggattttttgacactgatgaaatgccattattgccgatgaaaaattggagggagagagcgagaaacggattaacagcggattggcactgctaatgatgaaaaatggtcgaaagcatataaagaaaaaaaatggtgaaaatgttgaaagtgaaagaatgtagtgaagacaaatttaagaatgaaatatggaaaagaacacgaatttttctgaaagtaattatcgaaataaaagaatttttgactgtaacgcaatttttaattcaacgattaccaaatcaaaattttgatacttttttacaaatagtttaaagagaaactaaaataaggagcattagctttttctataatttctttaaaaaaaaaatccctttaaaatttacaaaaccctaacaattaataactttttaaattatatgcttaaaaattatattatattatattcatattctatttaattctgtgggactcacatggactgaacgcattctttggtgggattcaaatggtaaaccttttctttgtgctgctgctggtggtgctgctgctgctcggccggttcaaaatgcataaaagggcagacatttaccggcaatgggtcatttgcttctctcattcgttcattcatttttctctgcttctcattcgttcatttttcctccatgacttcccccccccccctccctttcccctctctctctctcctccttgcatttgattggttcattcattcctttaaaacattcgattattttgtgcacgcactttcatttgaataaatttatgttagccttttattgtttgtttgtttgtttgtttatttgttttgctttgtactcatttcattcgaaagctctaacatgtttagaagaagctgttttgtatctattggttggcaattagacaattaccaaaataaatagttataacacaaaaattgccaaaaatccaaaaaaattaaagttttttcttcataacttttttatattactaaaaaaattttgtgctttttgtaagactaattgagcatgtgaagcgctttctaatgataccaagacaattttgatttagttgaaaataaaaaagttatagccctaaaagttgggctggcgccaaaatgaccccattcattctccctttttgactgttcgcttttcatttgtgctgccaccgctgctgctgcggccgggtccaaagtacataaaagggcagacattgaccggcaatgggtcatttgcttttcctccgttcgtttttcctccatgcctttgcactccctttgcccctttcccctctctctctctcctccttgcatttgcttattccatcttttttaaaaacattgattattttgggacggcacctttcattttaatcagcaggacactgcacggaaatggacggagaaaaacatcaataaatcactctggtacgaaatagtgcaggacagtgattgcctcaggcaatttgaatggctttgcgctcctgttttgcctgaggcaatctctatcatgtactatttcgcaccagagtatattttcttttcgtccatttttgtgcagctctcctgatttgaatgtgtatttgtttatttgttttactgtactcatttattttctttttagagttcagtaaaccctcttaattatccaacatttggtcaccatccgcgcgtcctttaaagcattgacacaacatgaatttcccggcgaatattttggtgggtttattggtttttttctttccatcatatttctgctaacaatttattggatattctgtggcttttttcaaaaataattgtaaatttatttttgttttttttaatttatgtaaatccattttttattcaaattgtttttaattaagacaaattatttttctttaaaatgccatttgtttttatngtttttggctcc

SEQ ID NO: 3510 - DNA, 911 bp, Heterodera glycines
ctcctccttgcattgtgatggttcattcattcctttaaaacattcgattattttgtgcacgcactttcatttgaataaatttatgttagccttttattgtttgtttgtttgtttgtttatttgttttgctttgtactcatttcattcgaaagctctaacatgtttagaagaagctgttttgtatctattggttggcaattagacaattaccaaaataaatagttataacacaaaaattgccaaaaatccaaaaaaattaaagttttttcttcataacttttttatattactaaaaaaattttgtgctttttgtaagactaattgagcatgtgaagcgctttctaatgataccaagacaattttgatttagttgaaaataaaaaagttatagccctaaaagttgggctggcgccaaaacgacccattcattctccctttttgactgttcgcttttcatttgtgctgccaccgctgctgctgcggccgggtccaaagtacataaaagggcagacattgaccggcaatgggtcatttgcttttcctccgttcgtttttcctccatgcctttgcactccctttgccctttcccctctctctctctcctccttgcatttgcttattccatcttttttaaaaacattgattattttgggacggcactttcattttaatcagcaggacactgcacgaatggacggagaaaaacatcaataaatcactctggtacgaaatagtgcaggacagtgattgcctcaggcaatttagatggtcttggcgatccttttttgcctgaggcaatcactatcatgtactatttcgcaccagagtatattttcttttcgtccatttttgtgcagccctcctgatttgaatatgtatttatgttagcccttcaattgttttttgtttat

SEQ ID NO: 3511 - DNA, 1733 bp, Heterodera glycines
ctttggccatttttcattactattttagttaactatttcgagatttttcattaaaattaaaattaaggtaaaaataattttttttttagatagtgggtcaaattttgttataaacattattttattattttctatttatttcacacttatccacacattcattccaccttgaaatcatactcatgctccaacttttgatcctttaagtcatttttgtaacaaatttgagggtttttagttttgcatattttatattattatttttcgggatttcagtggcatttgtcattttaattttagtacaatatcgcatccattactggtgaatgttcttttgcatagtatacaattattctgcttaatccttacgctgcccttttcactcaatcaaaatcgtacgctaattgcttatggtcactcctttgaacaatgagcgaggattaatcgggaacaaaattggcatgttccatcatgcaggtcactcgctgattaagccatctgatcagctccatctcagcccggattatgccacaaatgacgacgatctgctgctgctcacagagaatgagaagaaggatatgaaggaggtggcggaggtgccatatgcagaaattcctccgttttggcaccaaaaaagaacaaactcatcaaaaacgccatgccggcactgacaacaccaatgaatggcactgctgaaggacaacaacgacagttttggctccctaatgagctcatccatgagctgctcatatgggtccggcccagctatttttggcgcgttcggcaaatgcttacaaccagtgccattctgtgccctttgcttatgggtggcaaacatgccatcacttggcatcagccttacgatgttggggtaatgcgttaaaaagtgatgtccatttactttggtgcaattgaagagcgttaaatcttattttgaacttagtgaatcgaatttggtaaaatagtgactaaaaatagaaataaatatgtaattagttgtaaaaaatccttagatgtttttttcaaaagttctgccaattaaccagaaattaatttttgccattttattttatttatttaacccttatctaataaaatttgcttaaaagacttgaagcttaatttcttattaaaaaataagttagctttatccttcttatatctctgagtgggttttattcttcatcttattctctgccttatcattcatttgcttattgcctagcgcattatgcgctgttaaattttcatggctttattaccatttttatatttaaaaaaataaatattttaccttttatatttaaaaaaataattcttttttcttttcaaatttggtaaaattgctccatatataaaaaatataataatatatataaataaattttgatttgatttatcaagaccaaagagatgagtcacgcggatcgtacatttggaagcgggaaacagtatgcgctattatgccgatcacattcacaaacgctacccggcaattttatgcgataccaaactcactcaaacgggacagtgactgtgtatgtgctccttatacttgatgagagcaaatttgaatctccagctcaccttgcgcaatcggtgcgtaaaatgagtaaaaaggaatatttgtttatttatcctatttaattttatttaaatccaaatatgcaaaagactttctctcttgaattgttattttactttggcatcagtctaattaattgacatttttt

SEQ ID NO: 3512 - DNA, 3236 bp, Heterodera glycines
tgctcttgcgtggactattttgtttttgaaacaaattctatttaatttttatatcctttaactgactcattttttgttcttgcaaaatctgcgctgagattcgttaccatttttttattttgcatatattaaaacacatttttctctcccaaatcacattttctccgaatacgtgtcgaattagagcgattttttaacaagtaattttaactatttgggatttttgtcaattgccacttatatattttggcttgtgaaatttttttaaaactttttttttcaactatttttgcttgtgaatgcaaactttgttatgaaaaacgcaatcaaattaaataaaatgcgccctgagaatcgactaaattttaaaaaaacgcacctaagaatcgacttttcaaaaagcaaaaatcctgtccatgatgaatggtgggtggataaacgaaaacattttactccagaaaatcttaaaatgtttttcagtttgttagcgacttgttaggtatctatctatttctctgttttatcacctaaaaatcctagacttgctaatgaattaaagcaccaaaaaatatttgcgatagcatatttttgcttatggtaaaatttttttaataaaatccgaaaaattcattcggagtttcaaaaaaaaataaaattaaccattaaaaaccttttatgaaaaacaataaatatttcaatcataaaatatttattaaaaaattttaataattatttgactgatcgcttttttcaataggcgaggattaattggaacaaaattgaaatgttcttttcatgcaggtcacttgctgatttagccatctgtcagctccatctcagcccggattatgccacaaatgacgacgatctgctgctgctcacagagaatgagaataagactgtgaaggaggaggcagagatgccatttgcagaaattcctccgctccgttttggcatcaaaaaagaacaaactcatcaaaaacgccatgccggcactgacaacaccaatgaatggcactgctgaaggaaaacaacgacagttttggctccctaatgagctcatccatgagctgctcctatgggtacggcccagctatttttggcgcgttcggcaaatgcttacaaccagtgccattctgtgccctttgcttatgggtagcaaacatgccattacttggcatcagccttacgatgttggggtaataacacagtgagggcaaatataatggaaataggtccatattttggtgatacttgagagcgttagattcagtttatattttattttgaaccaaatttgctttaaaaaatcggagatcaaacgattaaagcttgaagaattggttaataaccaaaaaataattttttccatttaaatttttatctatttaacccttatataataaaatttgcttagatgactttcaccatagttttaaggttatgttaaatgcgggactaaatgcgtccttttcacatgactttagctttattttttaccttttgaaatttaaaataattctttttttcaacttaaatttggtaaagttgctccaaaattaatataaaaaataaaataaataaattttgatttgatttatcaagaccaaagagatgagtcacgcggatcgtacatttggaagcgggaaacagtatgcgctattatgccgatcacattcacaaacgctacccggcaattttatccgatacctccaaactcactcaaacgggacagtgactgtgtatgtgctccttatacttgatgagagcaaatttgaatctccagctcaccttgcgcaatcggtgcgtaaaatgagtaaaaaggaatatttgtttatttatcctatttaattttatttaaatctaaatccaaatatgcaaaagactttttctcttgaattgttattttactttggcatcagtctaattaattgactttttttgggggggggggggggggtcaaaaagtccaatttagctgctgagggccgttttaatagagatgtattggaaaatgccaaaacatggacataaaatatggataaaaatgccaaacataaatttggtttttttagcgcaacttccttgattgcagtggctcgcttcgtgaagggcaccaaacacttgggcagggaattactagcatgacttttgttcgttgtcctggtgaggtgcgtaaatattacaattctttatttaatttcaaaaactataaatcttgtcaatgatttttccttttttaaattctgattgagttttggatggtaaaaaaataacttttaaaatttgcagtcaaacaaattatgcataataaattttgcttttaaaataaattttataaatttaggaataaaaccaattattttgtccccaaatttacaaatattacaattccttgccaaaattataaaattacaaataaattggacaaataaaacccaatcgatcgggcctctttcgccttttaggactttgatctggcgaagattaaatgcgatgctaatttcgaccttcgtctgatcatgagctcgcttctagagatgctccaattatatgcaaaacatattgacaatgttttgccgaatgagttccgtgctgatcactgatcagcaggaggaggaggagggtgtttgaattttaggaattgttggcgtatgttgggttttttgttgctttgctatttcacacaaaattacattgtttggataaagctgttagtaaacaataattgagcacgaacgaattttgttaattttaaagcatacatacaaaatttataaaacattattttttaattttcaaacattactgccacatatatttgcaaaaaaaatttctgaattttcttttttatttaaattatatatatttaaatgaattgttttaaataatatttaaatttttaaacccgaaggaaaaggaataaattaatttataactactttttttaatgtttaaaattattgttttttataatccaataaatttcaagtaaatatataaaaaaatttctaaattttcatactataatttaacatgtatgtacatatttgtatatcatttttagtatttttgcttttttgaggctctcttcgtccattgacgaattattttgctgagaaaataaaaatgatgcattgaattcattaaagaaattaatcccgccgcttaaaatcattttcaattattttaattaattcattgccgacactttttgcttttccaccatttattta

SEQ ID NO: 3513 - DNA, 2121 bp, Heterodera glycines
ctccccactcccccctctgccaagacaaccaacccaatgaaaactgacccatggtaaaaaaacccccaaaataggaatttcttgttaatttcctgctggatacatccatcccctggtcccttcccttccttttccttcccaattttcacttcgtttgagtctttcattgtctccaccgtttctcggcccaatttctccccataaaattgctccattcgcgcacttatctccgccaatttcgttattgccggctctttgtacacaaattctttgccgttcaattcgccgaatttgacgccgtaaaagcgcacccgaaaataagtgccgaaacagcgtttgtccattctgtggcattaattattattgatcatttccaatttgtttttctgttacccggccaatggcactgtcagtgccgtcgccgtcctttgcccttttccatgaactgtaatttctccgttttcccattcgtcaattagcatcggcgggtcgattcggctcaaacagctgacgatttgcgcgtgcgcctgaatcagcttgacatgcgcgtgcgtgcgctcgaacagcggaagaaccaattttaacgcattggcaaccaattcgaagagttgggccctaagggaagggcagaggttacagtacccaaacggacagttcctgcctccctgggattacagtactcaaatggacagtccttcccacccaggggttacagactcaaatggacagttcctgcctccctgggattacagtactcaaatggacagtccttcccacccaggggttacagacgcaaatggacagttcctgcctccctgggattacagtactcaaatggacagtccttcccacccaggggttacagacgcaaatggacagttcctgcctccctgggattacagtactcaaatggacagtccatcccacccaggggttacagtacaaattgacattctctccctcccccgtcgtcctttacctttcaaataaattggccattttctccaccatttttatgaatgccgaaagtgtaaagttttccgcgccgtccgtcagcctttctttgccccttttgtcctcccattcttcgctaatgttttcgctcaatgcttcgaatgcttcgaacaccgaacgcggcaacaattcgtcgtcggcggtgcccgcgttaagcaaagtcgtcgccacaatggcacaacagtgcaaaaaacactgggctaaacacatttatttttaagtcatttgacaaattcaaattatttaattgatcattaattcgcctaaaacattgattaattatttcgtaaaaataatttccgcttaattcattaatttataattgatgaattatccggctaatgaattaattacccgcttccgcgtatgttttcctttcctctaaatgctttcgcgcaatgcccagcagccaagcaatcctttaaatttaatctaccgtcattcgccccctccatttgccaccgtttctttcccctaccgtatacctcaacttggggttgttacggtatccgtgtgcaattcgatgcattaagtcgacactcatctcaaaatcgtcaatatgtgcgctcagtttgaacgtgtcgctcagaatggcgttcagattcaccacgagttgttccaattggctcataaattccgccttttcgcttttcttcgcttcgggcacaagcgaattaagcgacgccctcagggcattgtcgtccaatgctttgccagaggcgacggaagttgagacgagggaacacagagcagaggtcagacaccgattcagacggacgaaacccctggcaattaaaggtgattaattaagagggatggcaattcaaacacagctaaattcaaaccccttcgagtgccggaatgcgattttgagttgtgccaatgcactggtggccgcctgctgccgcacttcggcattttcggccgccatttgtctgagtaattgctgacaaagtgcggtaagcaattgttggtcactctcgacgaggagaaagtcgggaaatttacggacgaaggcacgcaaagagggaaacaaatggaaaagggacggcaaagaatggagtcaaacgaaagggaaaagcaaaagacgaagcaaatcgggcaaaa

SEQ ID NO: 3514 - DNA, 1287 bp, Heterodera glycines
tcaactaccaaaggcaaattaatcgtctaattaaaatcataagggagggggggggagaagggagtaatttggcagctgctaactgtttttggtggcttcgactttccttaccactgttgttgcgccttctcatccgccatcttattccgtctgtcgctgctgtactgcttgaattcgttgcttttccattgccattttcctccgttaattcgtcgcccttcggcatcgtcccattgccatttgtgccgttgtcccctaatgtgctgatactcattgtttccatactttgtcgccttttctccgccaaaaagtgttgggaaaagtcaaattcgtctgttccttgacaaaaatggattccgccgatcaaatggacgaaagaatcgacggaatggcgacgaggaaacgccggaggggcgagttgggagaaagtgaaaaggagcgaacggaggagacggacgaagcagtggaactgatcgggggaaaacaaacgcaagtgggcgagcagagagggcatgggaagagaacggagaagccaacagacgcagagaagaagctgaacaggggcacagggagtacaaatcgacgagatgccaatttgtggccaaaagattgccaaaatggcaattagttggcttaattattagtaacatggtccgttgcctctctcggctgccaacctttttccgagtcgtttcttccgctttccccgccgttccttctgctgctggtgccaactctcggcggctgttcagttcctcctcttccgccgatgccaatcccgagtctttgtccttttctttgtctctctttctctccctttcgtcactttccggcaattccatctccaatttgtcctgtcccaattccatcgccatggacaacaatggcgagtacatagcagcgactcgttgtcccaacgcgctgttctctccgttcagtcgccagtcgttttcatgagaggcaattagcgagtggaggagactgacgtaagaagcgcaaagggacgagcgaacgcggagcaaaaggcgaagttgggagaggaaaaggaacaggggaaagtgacgaaaacgatgatcaacggacagatcggaaaacagcttcagcgaaaaagcggaatgacaagcggagacaaaagacgaagtggcggaagaaagggacggcacggaggacaaagagacggcactgaacggagggggaggggggtcaattgggagaattgcatgggaagggagagaaacggtactggaagggcggatggagggtttcgcggggggggggggggggggg

SEQ ID NO: 3515 - DNA, 1930 bp, Heterodera glycines
cattccgagtgcctttctttgccttaccttttcgtcatcggattccctcttccgccggcgttgtcccttttgcttcctccgccatttgtcttccctttgggtgaatttatttttctgctgtttgccaaattcgtcgtcgatttgcgcaaagtgccaaaagcgccggtggaaaaaggcgcggcacaaaacaaattttgaaaatttttcgtctttttgttttcgtcttcggccgatggaagtgaaaaatcgaagggaaaaggaaggcaaaggaagagaaaatggtggtgggagaggagaagacggaagaaggacagtttgagggagagcaactgtgcacagaacggcgaatttggcacgcaaatggacaaagcactgacaaaagtgggggcattttgaaatttggaattggcaaaacgattaaacgttggcatttctataatttggcattgtgcccactcactcaattctcgcgtccatcgtgttgcaatagtgcttcatctgttcaattatccatccgcgcgacaataatgcaaccgattcgcgcagaaactgtgcccatgccgaattgatcgcgtccgcttgtgccgtgttttttgccgccctttccaatacttcgccgattagcaattcgccgagttgggaaagttgcctaaggaattcggaaccaccgaagcgcaatttgcgcggcaatagatggccctgtggcaaatggaacttcgtactttggactgatcagagtctctttacttgcgtctgatcaatatgctcaacaagcgatcggtggatgagcgagaggagaaaccaagcggaagaacaggccgagtcgcgggcatggcccgaactggagacgaacagacggacaagctgaacatgcagaagggcctaaagaatggcagaatgagtggtcaattggcatctgccgctgaagcccatacaaagtcggcacttgtccctgggcttttccgctgctcttccgttggcatttcctttcccaattgaccgttggcatttgccccggggctcttccgctgcgtttccgtcggcttttccttcgccttttcttttctttcgcttccgtttctgttgttccgctgctcttcgttctgtttctgttccctcttcgtccacacttcttcttcttcttcccctgtttcattttcctttttttgctttggcaatcgctccaaacggacaaattccaacaataattggctcctattttgcgcgtccacctttaattggggtttggcattaattatttcaatttgctatttatacccgcccatccaaaagcattgagctgatcagtgccaactgacaaagcgtttcaaaggcaccgtttgcaataagcgcagaagacgattggtccaaagaagtgaaagaaatgctgaacaaaaaaaacaaaataataataaaaaaataatttaaataatttaaaataataaaaataacatttccaaaattcggtggagaataatgtggagaaaggaaagcatttgctcgggagaacatttgagcacatttcgaatggaagtcgcaaataaatcggcggaaaatgagcgaagaaaggcacgggaggaaatcagaaaggcattcaaatgggggtcctggaaaaagtgccaaaagtaagcaatggatggctaattatgacttgaggctgaacactcgacacgcaaaggacgcgcaaatgaaagaggggccggtgggaatcgagccaacgaacattcggcacattgacatggggcgagaggaagcaaagtgccggcagaggggggtccagcgaaatgggcagccgatggtcgccggaaggaaaagcggcggttaggcacgaggaaaagccatccgccgattggaagggcagccaggagaagctgagggggggggggcttaaaggagggcatatccaaagcgaagccgatggaacgtcgac

SEQ ID NO: 3516 - DNA, 1919 bp, Heterodera glycines
acgtcgacccatttgctggtgccaaattggcccgacttttaccctattggcgttgtgcacatcgttttcgcgtcgtctcctcggggcttgcacgaaacatgcaaaaaggtgaagcgcaggtaaagtccgtccctcccgcccctgggcatgatcagcttccactcggtgccaccaaattgggcgtttcgagagtgatattggaccgtcgagaacacttcgcccaccaatttcccatcaacaacaaatgctttttcgattcgactttcggattttccgctgaaaagttcggcctaaaaatgacaataattttccccaacaaagaacacatttctccgcactttcaccgaaatattccgcgcattttgccccgtccgagcggtaaaatttgcgctttgcgggtaaacaaaaagcaaatggagtggaaatttgtagacggaagccatccgacagatgggaaaagggagcaaatcaaagcaaagagacggcgtaggggacgaaaaatgaggcgaagaaaggggaggagaagcagggggaggaggagaagaagcagtgccatcggtggcggaagaacagggatgagagacggaattggcacggggggcaatggcggggcaaccgccgctgggcaagttcagctggacaagttctgacgacaacacacggacattccgcgcggaaaagtcgtccatccggacagtctccaatacgaaatgaatatccactggaaactaaagcaaaaggaaagttggcaagagttgagaatcagctcgaaccctcttggctaattaccctttcccctcggggctgttggtgtccgattgtcatcgatgaaagccaatcaaagagttctgtgtcgggcaagggctcagaacgcaaaaaagagtttattcggacggaaattggtcgctgaaacaattggcgaacccaaccgaagttgggttgggacggaaagtgatggaaattgtcccccgtggctgcggaaatgaaagtccatgaggaggaattggcgagacggggcggcaccgaagcgacggaagggtcaatggcagaaaaggaaaagcgatctgaaattgaaaaaggcattcaaccaatgcgctaattcctaaggtttatgtttattgcgccataaatttctaagattgtcttattttcaataattttaagaagctggtcatttttctaaaaacgcattatattttttccaaaattttatcggtgaacgccaacggcaccgccccctcccctccttcacaatatttttttttttgaaagaaaatgcgccgtaaatgtaaaaaattttgagctaaaaactgatgtcgtgcatttttaatgatcgctcccttggcttggcattctgtccattcccccccccccccaattcgcctgctgtcaaagtgctgctctcgctggtcgagtcgtccgccttaatgtccaatgccaaactgttcgcttgcaccatcgaatcagtgaatgagcggacggatcggcttaattcgtccggtccgcggagtgtggcattcactaaacgagccaatggcacagcgacgaggccaatttgctgacgaaatttcgccggatgaattgcgcaattcgaatcggcacaatttccgtcattggaagagggcaaattccgtcctttggtgttctgttcgattaagctttaattttcggaagcagcgcatttccctttttgtcacctgttgccttttcgaaaagggctctaaaattgcgtccattcctccgcgttgaagcgccttttccaaacgaaacgccaaaaccagcgaatccgcgccattttcatcgctatcattcggcagagagaacagcgcttgcgggggaacagcggtggaacagaagcgaaagtcttcggacactttccgacgctgtcgaacgtcgtaaagggcggccgaaagaacaaa

SEQ ID NO: 3517 - DNA, 891 bp, Heterodera glycines
  unsure (1)..(891): unsure at all n locations
ccgtctctcccacaaaatcactnttgccactcaaaaaactcatgcaaaaatggcgcgggtttcttcactgtccgaatttggacgtctttctcaagcatttcccttagccttaaaccaaaaaaaaagcatgaaaatggatagttccattgctatttctgcttttttacctttgtggccccttaagtggacattgaatttcgctgcgggcgatttgccgagacgaaagaatgtcctcaatgtccagcggtgattgactgccattggccatcgtcgccttggccataaaccaaaggtaattaaaaatccctccaattgccttttggctctgttactttttgcccttcttccttcggctcctctttctgttttggtgccgatgttaaagtgttatgcagcaaaaagttctgtgcaattgcgctccgtcgaggacgcaaatttttgttggcggtgccattggccgctgtgccaaaactaaaaaagaggggggggggggaggtgcaaaaaaagacattttgagcatttagagggcatttaatttaaacagattttggtattttgtgcccaaattgggccaatggatgtgctgaattgctgtcccactttgttcttctgctgctgctcccaaagttcgttctccgcccgtcgccccctccgccgatttgtccatttccattttctgttctcttcccggccctattttttgtgtccgatgagtgcattcagcgccaatttttatgagccacataaacaaccgcaaatgacgagcgatggcggcccctcgggcgacattctctgtgggctctgagatcgacgacagttggaaattggaaaaagctgctggggagggaggggaatgagaaacgaaggaagggagaaaaagtgaaggatgtt

SEQ ID NO: 3518 - DNA, 1615 bp, Heterodera glycines
  unsure (1)..(1615): unsure at all n locations
cgggcattaaatcgtttattttaaaaatatttttaattaatttgctaatcgaaggtgaaaccaaatcgacntcccgacaattggcttctttggtcaatgaattccttctccgttcggcagacattctgaacagattttgtgctcaatttgaaaatcggatgatggaattggactttcgtttggacacttttgaacgaatgttggcacttatggaaagaaaagtaagaaatcactatgattttcaaataaatggagaaatcattaagaactaattaagcttgaaaatgttaatgttgacgaagtgaaaaaacaatcggcggaagagaaagaaacggcggagaaagcggagggaatgacgcgcaaagaaaaaggggaagaaacgcccgaagggacgggggaagaaaaacgcacagacaaaaggcaggggaaggaaacggcggcggaagtgacaacgaaggcgaatgaacaccccaaattggccaagtatttcaaaatgctcaaaatggtaattggttcagaatcatggaaaatatttggaagaaacaattttagggcgtgcctgaggcggcggtaaggcaaaaaatgagaagtgaaggaatggacgacgcactcctaaagtgagccttatttgttagtccaaattgagtggaaggaatttttacgcggactttattaaatgctcaaaaaacggtttcagtgacccagagaaggaattgccattggaatcaccacaaaacaaagcgcaaatggtacatgatgcattggcagaggacgacgaatcgtcctcaaactcagatgaatgatttcctggccttcattcctttttatttaattttataactgaagaaaatttgagagatcatttttatgtaagcaaacgctaataaataagtgatgggagtcaaataaattataaaaaaaagtcactgagatttgggcaaaagggaagcgacaaattgcagttcgttctccaacttctccaactgtgcatcaaaataggctttctccgcttcaatctgctggtccagcttggcttctgcttggccaagccgcgcggcgtttcgtttggcctcagtcgtcgccgtgcgattggcgtcccttccctgacacagtgtcaaatgaaatattaaatgaaaacagttttggtgtcataaagataatgaccgggttttcggagtactacctgctccatttgcgcagcaatggccttcctctcttcctccgtggcatgggcaaatttgctgccgcgcagtcgtggcttaatgtcactcggcaccacaattgacatatcggcactgacaatttccttctaaactaacgaattatgctttattgtactgtttcttgaggaattgacttcgcgtgcgctcagtgtctgtttcctctgccgccaattttgagtgcgctcatttaaacgagtcgaatgttcttccacaagttcaagttgggacttcaaatagttacttatcatattgctatgatagctaaatgtaaaggacttataattttgataaaattaatttaaaaaaaattcaattatcggtaaaattgaagaatactgccaatactagaacgatgggttgtccataccagggttcggggagtgtccattgag

SEQ ID NO: 3519 - DNA, 8994 bp, Heterodera glycines
ttggaaaagttaatatttggtgaaagttggaattaaataaggcacatcggagtctaagcttagtcaaatacacaacaatttttggtgccacgacccgggagaaggtcaaaaggctaagcaagactagctgaagcagttcagctgtggtaaaggctttgtgcccaaaccaaatccatcaaatttgagctggtctttgttgtgtactaccagccgggctgtttgtgccaatcaccaaatttaaaggagctggtcaagtgtgttttccagccgagctgttgtgctgaaaaaaggactaagtgtcttcaaaaaaaagtgttttaaaaaaaaaaaagaaattttggaaaatggctgagcaaaattcttttaattctcaaaagggcgaaaatgtggtcctacagggacaaattggttcggatttcgatccaattttctttacccctgaggagaaccaaaatctgaacaatgtactgactcgaatgcgaacattcgaatccgctatttgccgccaatttcgtaaattggagcgagaatttgcagagttgaaaattgtggctcaccaatcagacgataccgatcgaatggtcaaaattgaacggtcaataattgatttggaggatcgagaagaaatggacaattttcaaatggaagaaaaagtgataaaaatggcagaaaaggctgaaactctcgaaatacggcaaaattcatttgaaagattgaccaaagtcaaatttaacaaggtggtggagaaaatgaaagtggaaatggcaaaaataacagaaaacattgacgttttgaaaataagagtggaaaatgaaatggagagttgtgaaataatggtttctgacccatttttgggcggaattgcaccattggaaatgtttgatggaaagccaagtgtatccttttcacgttgggcatcaaaatttgtggatatgctttctctgctaccccaattaacggaaacccaaaaactgagcagattgagaatactcttaattggtcaagtcagagcggaatatgaagcattggacccaccacccgaaaatttaaccaccgctttgaatcatttaaaatcaaaatttgaaaacgaaaatacccgttccatagcgagacaagcgctttcgatttgcaaacaagcgccaggcgaaagagtgagttcatggaaagactcattcccgagctccaatttgaggtaaaggcgggaagaccaaacagttattcgggtgcctacgaactcgcacaacattttgaactgtttttggcatcccggagaacaaatcaaagttctgtagccgactctgttgcagaattatcctcaaaagttgaggcattgagccttgggcaatatcaaagagaaaatgtcaaaggagggcccgacagacgaagatgctattattgcgtcgccctgggcatttggtgagggactgcaaaacaaagaaaagagatgaaaggcaaaatagccgcgggccacaaagaaataacgaatattatgggaatgagagacattggaacacatggccaaatggtggagaaaattctcgttttgtgaacggaagggaacaaagaaatgaacgagaattccgccggtcaccaactccgaatacgcaccctaggggatacagtaataattcgggatcccccgggagaagagtgagctttggtggaagatttgctgcggcaagaattgccagcccaattttaatggcatttattgcaattctgtctctctttcccccaaatatagctgctaatactgcagttagcccaatgatttgcctatcggatgctccctcaagtctctggtctattccttctgaccccttttgcccaacttggaccccaacagtggaaccgattcccgcaaattttgccatttttaggcaaaatacaatacagtacaaaactgaggctacggcttgtaaatgtgtgaaaacaagcatttcaagaagaatcggtttctttggagggaaaatcgaagaaataagtacaagcccagtggaagtcccaacagcgatttgccaccaaatgaaagaaatgaagcattcacccgccggagacttaattttttacgagggaaacaaaacatttagggcgacaaataattcccttgaggtgggatggtcaagctggcctactggcattttttggacaacaaatgaagtgacaaattgttatgtctatgagccagttgtgttcacccggcacggaatgccagggataagtacaccaataaatgattgtaatgcttgtgtgtaccaatcgggaaattgccattgctcacaaattagcctcatttggaaacctgatcaaacccaccaatgtgcttatgttgaagtcggaagatggggtggagaatattcaacgaggatttggacagcaaattacggagattttgctttaacatttctaaatgcctcgagaaaatcagattgtgatggtacggaatttgtgatttccgaccaagcattcgcggtcccagcggcacaatatgatgaaataattaagagaagtggtgaaccgaatgagaggcgtaaaagagaaattggcttagtgtactcttcacaattgtcagctcaattaacagcgcttagtgttaaaatttcacaaaacacacaacgattgttcacagaaacaatcagacagatttgcatgagtctaaaatttttagccgatcaaacgcttgcacttgctgaagccatccccacacttttggctcgtttttatttgggaaatccatttcttttggcaagattggtaacaaaagaaacgttggaaattaaaccgtgttttgccgttaatgaaagggaaatgcattttaattggcaaagtgggccctgttttgataagcttcctattattttcagtttgtatggaagacaaaagcacggctttttggatccaaatacaatgataattcatcagagagcaggggaaatttattgcaatcatgcaaaacatttgtacatattaataaaagggagtattttacaatatgaccaaatgacaggtgaaatgactcatattccgtacgggtcattacaccagctctcgagacacggaaaaatcgattttccagaatttccagtgcaatttttcaaaaacaaagtcatggcaaatttaaccgaattgtattccccagagaatttcaatgaaacaatggaagtggccaaatttgcccaagaaatagcccgtctctctaagcccaaatccccggaattgggaacagcaacaccccttcaaaggtctctaagatttaaagaaaatgaacaaagagtggttcaaattgcagttgccgaaacaaattgtgaccccaattttcggattgctggaatggcaaatgacaaaaaagtaatccatttgttggatacgggtgcacatgtgactttgtgtggcatacagacagcaaaaagacttgggataaccgaattggaaccagcagaaatcagtggagtaatcggcgtgagcgggaaaattgtcaatattttgggccaaaagaaaattgaaatgcaaatttttgggtgtactgtagagacagttatttatgttgctgaggcagaaattggtggcgttggcacctatgacattattgttggacggaaaactttccgccaactaccattgctgcttgacctgcagacgggtactttgataaggaaggaagatggccaaacatacaattgtgaaaaattcaatgaaagagacgtttatttttatgagcccgaaaataacagagaaaattgtggaaaaatcagagaagaattggaaatttgtttggacagaaataaaagtgtttttgctaggcatgaatatgaccttggcacatgtgcctattgcgctccgcctattctaacaacctccgaccttccggagagggttcggccttaccccgtaccaaaaaagtatgaggaggaattgaaggcacaaattgaaaaaatgttaaaatccgaggtgatcagagaaagttgcaccccgtgggctcacaacattgtccttgtcaaaaagtctaatgggcagttaagaccgtgtgtggatttccggccgctaaataaagtcacggtcccagacccttatccaattccccgaatggataaaacaattttacgggcagctggcaaaaagtggtacagtaccttggatttggcctcagggttttggcaaatcccattggacaaggaaagttcatacaaatgcggaattttgactccttggggactgtaccaaatgctgaaaatgccgttcggcttaagaaatgcccctagcattttccagcgggtcatggataaagtgctgaaggacctcccaaatgtcacggcatacattgacgacatattgatacacacagattcagaaaaagagcatttagaaacattggaaagtgtgtttaagaaattggaggaaaatgggcttaaaataaaaaagaaaaatgctatttctttaaaaatgaatgtacctatttggacatattctaaacaaaaatggttatcgcccatcaataaataatcgggaagtcattgaggcattcccagctccgaaaaatgtaaaggaagtcaaaagatttttgggaatgatttcatttttcagaaaattcatcccagaatttgcagtgatagcccatcccttaaatcagttaacggaaaaagagaaagaatttaactggttggaaaaggaggaagaggcattcgaaaagttaaagcaatgattgcttaaggcaccttgcctgagggcaccgaattataaactgccattttacttgttcacggacgcatccgcagtcgcatatgcaggcgcactaatgcaatcagctgatgagaatcaaatgcacgctgtcggtttttggtctaggactctaaactcgacagaagctaaatttcctccaacacatggagagttggctgccatcgtccatgcagtccaaaattacaaacccataatttatggagcagaactgattattttaactgatcacagaccgctcactttcctattttccaagtcaagctcaaaccccaagctgaaccggtggttaatgtcattacaggaatttgaacccaaggttgtatatttggaagggaaagcaaatcgggtggcggatgccttgtccagagtcccgattaaatgggaccaaattgaatcaaaatgtaaagaagacattccctttttgctggtgacagatgaagaaaatggttttgaaattaaccgggagaaaattgagaaagaaaccagtttagacccaattttgtcacaaattgtctcaaaaataaaggaaaattgggccgaaccaattcaggaagagcttaatgtgtattataagcaaagagatcaattatatttggagggaaatttgatcagaaaaaagccactgagacaaattgtaatcccggagaaaatgcgaaattcggtactaaaattggtgcacagggcacattttggaattgtacgaaataaggcaagggcaagaaaccagatttggtggcccgaaattggagatgatgtcgaaaattttgtaaaaagttgttggatttgtcaaaagaatggatctaatccacccaaaacggatgctgcttataaatggcctgattccaagttcccattcgaacgggtccatgccgacttagccgggccaatttggggaacaaatttttttattttggttgatgcgtattcaaaatttccattcgtttaccaaatgaattcgactcattcatcggcacttattaattcgctccgtgaattatttggaatttttggatcaccaaaaacgttggtaaccgacaacggcactcagtttgtgtcaaatgagatggagacgttccttcaaggggaagggatacgccatttgacatctccgacataccatccttcatcaaacggcgaagccgagcggtttgttcgcaccttcaaagaaggaatgggcaaaatgttggaagatggaaagagcatcaaaattgcgctttattttcctgcaggagtacagagcgaccccttgctctgcggcagaaggacaaagcccttctcaaaaatttttgggaagagaattgcgtacggagttggacaaaataaaaatgtcagcaagtgccattgagcgaaaaaggcgtctgttgcccgaggcaaatcgtgaaaagaatttggttacgaaaaactttgagcccggagacttggtttggataaaagagccaaatggcaaatggacgcctggtgttttattgcgcccaattggtgaaagaatttgggaggtggagcatgagggatgctccattagcaaaagtgcccatttggaccagttaaaagcgcgacgcgcagtcactcgacatcattaatacagcacgtaaatgcaatttgtatatattcaattccccccccccccccaaaaaaaaatataaataaatataaaaaaaataaatttaaaaaaaataaataaaaagaaaaaaatttttgtttttgtgttccaattttaaagcaaaagcatttctccaatttgaaaactaattaaatgagcaacgaaaacactccgcccacgaatgacctggaggccatggaaaagaagctcttggaggggaaaaagctgcgcggaacgcatttggggagttgaagcgcaatttggagcaaatgagcagtgaaattcgagccgcaatgaaagaacaatttgagacgatgtgggaaaaattggagccacgtttggttggccaagaaagggtcacagctgcgttatccgatgccctggatgagttcatggccgagaagccggtgacagtgaacagcgggagagacgacaaggacaaaagtcaatcgttggaggatgacccaccggaagagggtggagagcccgaggtggcggctgaaccgtcgccggagctagtggcggcacagggacagaattttgcgcctcagggaagaggcaggggccagtcgggccttggtcgaaaggaccattggaaaagtcgcgcaccaaatcagcaaaagcgcgtgaactacttggtccgccagttggagaaggaatggaagggtgcaaacgtgccgcaaaactgcgactgttggagttgtcgccgtggacgcatttggaaccatcgtggaggccgaggcagtggtgccggacgaggttttggacgtggcgcgtacggttacggacgtggacatgatcgcgaacaccaccatggagcgggaccatcgcactttgctcattgacggaggtgccaagaaaatgtgcgcgggagactcatggaggaggggaggaatgttgggtttcgattcagttcagttttcattttggatttttcggacattttcccttttctcatttttgcccaaaacatttcctttgccattcatccacaaatccatcactcaatttgacccattttcccatttctctttggccaaccattttgtaatgtcactcgcttggcccctcccattatgtcagtatttaagctccccaattgcctctcgcttttaaccattcttttcccattctcatcctgacccttactcatctcacactaaaccaatttactttacttttcatcctttttcctttgcttaattcttaaacacaaataaaccaatcgcattcccccttttgtggacatttggaaaagttaatatttggtgaaagttggaattaaataaggcacatcggagtctaagcttagtcaaatacacaacaaaaactttgcgggaaagagggtcgccggtgccgataggcgccgccaggaaatatttttgaaaattttgtcaatttattaactgattttgtccaaaaaataactaaatatcatttggcattttgtcattaaaaattttcaaaaaatcaataaaatcctgcacaaattttcaaatttgcggatcccgctgcgggatttgaactcaaaattttgcgggacgggatcccgcaggtataaattccgcatttcccaaaaaatgcgggattgcggattgggatcccgcaaaatcccgcgcaggatcccgtcccgcgccgagctctagtattgactgatatcctatgccgtcccatacattgttctccattgtcagcttttcgttggttcgtccgttcaccaattcaaatggttcaattgtcgatgaaccgtaaagaacaaagtcaattttgtagccgacggaagtgcaggcacagagaaatttctaagaaaaaattgaaacgaaaataaaggcaataaaatcacaaataaggccacccacacacttctttgaagttgttgacccagtccattgtttttaaagaagaattacaacagcaatgcaatcgctttggctgcccatttttgctcggagtgtgcaaccaattggataacagttggccagcagttggagttgcatttcgccgaccaaaaccatcaccaatcacatcgtgaagcagtttattggtttcacccaaacgatcagaaaaaacaaagctcaaatggcgaatatttggtgcaaaaatgggccaaatttcacgttccaaaacatcccaaattgcctggccttcagcggtgttgcacaaagaaggcatataagcaaaagtcaaatgggtgcctttgtcaaaaatttggaggaaggcaggagcaaatttgaggtcggaacggttgggtcaatggaaaattcccatcgtcagcatgttcatacacatagagtggagtatggggagaatttccgaaatgagtataatcgttatgcgaatgatcaagtgagtgggggcgtaggagagagagtgcatggggacttgggagaggggcgataccattgtcaatgaaagaaagagagggacacggtcaaggaggaggagcaaggacatacaaacggagttgaaggtacaaagggaatcgggaagagagagagagaagtgagagagagagatgagtataaagaaaaagtgaaaatctgtgggagatttcaaaaaatagcgagtaggcaatattgtgtgaaccggaggttaagtgcttgcgtaagggggtcggggcagcagcgaatagataatatgtcagtgttccccctctc

SEQ ID NO: 3520 - DNA, 1333 bp, Heterodera glycines
tttttgctcggagtgtgcaaccaattggataacagttggccagcagttggagttgcatttcgccgaccaaaaccatcaccaatcacatcgtgaagcagtttattggtttcacccaaacgatcagaaaaaacaaagctcaaatggcgaatatttggtgcaaaaatgggccaaatttcacgttccaaaacatcccaaattgcctggccttcagcggtgttgcacaaagaaggcatataagcaaaagtcaaatgggtgcctttgtcaaaaatttgctgattggcacggagaaattcgatgacggaacggttcgggcaatggaaaatccacagcatcaaaatcccatacagttagtttcggttttgttacaatttccttgctaagtataatcattctccaaattgtcaattccgttttggcatcgaaatgtttgtccactaaaacatcgaaacggggagaaatcagtgccaatttgaggccgagttgggcacggtcaaaaaaggggaacattaccatccaaacatcgttacaaatccagctgaaattgtgaaaatggttagttaaatattgaaatgaattctttaactttttaaaattaattacttaccgccgattcatttgtatagcaattagcacactttgccgtttcaattgattaatttcactgtattaacttaaaacagagacattaggaaaaatgacagtgaagaaacacacacaaaatgaagcaaacaaaaagaataaaggattaaatatgtaaattaaataaaacagaaaatccttaatttttcttaaaattttgcactttttcttatatttcaaaattctggtattttttttaaatgtaaagccttatagctaaacgtcgcaaagtaaattcattttttctctattaacagagataaagaaataatacaccaaaatgagagatgtttttttctcagcactatctattaatggttcacttagaatttagaagtttttatcactatctttttttacagttagacattctctttaattattagtgctgctcgagaccaaaaatttcccgagactcgaccccgagaccgagacccaaaaccccgagacttttttcaaaaaattttcttatccccttaaagatcgttaaaaacaattggaaaatattgatcataggccccaaactcaaaaatgcttaaaaacggtcagaatcgatgtaaaaaggtttgaaatgggttggaaaaatagaattaggggcgcgcttgccctttttcaggatgaaaagtgccgaaaatggagtgccaaactcaactgggactcaagtgaccgtgctatataaagcactcaaaataca

SEQ ID NO: 3521 - DNA, 3514 bp, Heterodera glycines
taatcaatccgaatcacttatgcaaaaaatgcatttttctgcaaaatttcaagtcattccaactccattagacaaagttacaaaatcaacttactcgaaaatcgtgtaaaaaattcggcacatattatttactaatagattctatcattttcaaaaaaaaaataaataaaaaattcaaatgtggccacttttcaaaaatctgaaaaaatatgaaatttttgatttcgcgccgaatattccacaataaagacattgatcattagtcaaagtatgattaattgtcccaatttttgttttaagtataaaaggacgattggctaaaataaggacggatcttagaaacaataattttctccattggtcggctcttgaaaaacatttaattgaaagaattatttttatttggcattcattgtttaatcggttcatttcagattaatggcgacttgaagcctgaaaatacaaccatttttattgacaacggagcataaaaacctttcttttaattaaaattattgtatattataataataatgataatgaccactattattaattgatcttttggtttttttaatatttcattctttttattttaatcttttcgttgataaaaatgattaattcatttggttataaggccattaatgctaacacttataataataatttaaatttgccgtaattatttgtcacttatttaataatgccaattctttttcactttataaaaagtttcccaagaaattaacttatttgagtcacattatttttcattcgttttttctgaattttcatttagccattgtctttttcgtattggcatttttcacttttaatttattttttttcacctatcttatcggtgccaaatgctttcgttgcctttttacttggaatgaaataaataaatgcctttgcgcttttataaatattaaatgccaaataagcatttttatttgaaatatatataatattgatgatcatgcattactagagcttggatttttatgtgctaaattcctgaaatataataaaattttgctaaaaatgctgaaatatgtgctaaaaaccaaaaaaaatgccaaattatgtgcgaaaatatgattgaataaaatcgtctgccaatttttcggatgaaaatgttctgggtgtacagacattttattattaaaaaacttggctttacgtggctgcttatttctttaaaatgtcatttgtcttctgtttgtgtcccctccccggcggaaaatcaaaaacatttttattattcaaaatggcattaaataaatgccaaaacattcattcaaacgcattgaaactccaaagtactcagaatttgccacatttgttctgtttgtgttgtatgaacatcgacatttcaaattcatttctttaatttaatgtcgacaatttttcttcccttttctcagcccgaggggacgatgaataataataattagtgacaaattaattggggcagcacaatttgttggcaaaatcaccagccaaatgtgcgtataaaagtggtgatcaaatggctgtcaaatcaccaaaaacattcattttatttattattttattgcgccttttcctaaaattcaatttccaaaaatggttgccaagcttcttccagtcatcctctgctgcttgtttttggtatgtttaatcacggtataaaatactgtaattcgagtagaaaatgagggattacggtatctataaagacaaaaaaagaattcagtgaaatattttaaataaagtaataaagcttaaacttcctttttaggcttctttcgccctctgctcgcccaatgctgctgatgtgctggtaaatggctgaattttttggcattccgtttcccaataattagaaatttaatatcttgaagtcgtaaaactcaatttcgcggattcagttgcaggattaggattcaaaatccgttgccggacggatccgccttattaatccagcaaaatgccaaaaaatgcaggattgtgggcccaataaatcttacaaattcttccgtctccactattatccatattaaaattgattttttcagaaatttaaacgagaagcggcgatcagcagttgtggagctgtaagacatatttaaaacaatagaaatattcgacaaaatattcatggaggtcgcttaatccctaaatttgttaatgaaatttaaatttatttgtaccactaaaagcgttagatgttttttaattagccatttttgtcctgttttctattttcggcacttttagggacagtttgaatacgggggcggctgttgtacgacatgcacaagcgatgctgattgtacgggcgggaaggtgagttagccaaattttgagaagcatttgccactgttagaatgggattaatcacagatttaagtgaacgattattaattaaatcattaattatgtccaatcggagtaaagtttgacaaattttccaactattttttgtcttaactttttcaattattttccactcttttaatgtaaacttttaatttgtttttatctaatttagctttgtgtgcccatcctcaacttgctcagcgtcagtctgtgctttgccccatgcggaaattaagacagaaaagaaagcagcaaatgagggtgttgatagtgtgataaattgataggattaaatggaaaatggggagttaataattacttaaatgcatttaaatagtgattgatcaataaatatttttcggagttaatttgccttaattacctgaaaatttgactccttcgcttttgtctgcgatagagttgtttatacttaatgttcattcaacttggtgaaatgggttaattaatccgagtgccgcggcacggcatatgaaagtgcaaataataaacatttgattttttacatttactataaaagaacattgaacagattaatgtgataaatagggcccagatttatatggacgaaaaaatcgcaaaatatggacaaaaattttcttaaaattggttcgaattttttcaaaaattcataaacccataatttttttttgtcaagaaggagaaaacctttttaatttatcaattatagaattccagaattgagaactcatatttattatttactcatattagttagaaaaaaattacaaaaatatttgtaatttttttgttgaataattttttcatctaacgaatattcattatacatattaccaaataaaaagaatgttatggcacttcatatttgtaataattgtttttgcttttgcaattaaaactggcaaaattcgaccaaattttgatgaaattttcggcaacaaatgggacaaaaatgaacacgaagggaaagtgataaaaattgagcgaaagcgaaatgaacgcaatgagaactcacaatcagcagcaggttgatcaaatgggtgaagaaatggggacagacccaaatgatcaagtgggcgaatattccaatcaaagtgttatgaaaagtgatcaaaatacgaaaatggaactaaatgatcaacaa

SEQ ID NO: 3522 - DNA, 3564 bp, Heterodera glycines
  unsure (1)..(3564): unsure at all n locations
aacactcaaataatcgtcattttttctgcaaatctacaaaaaatttaagtatttgaatctaatttaaaagttcccggacgtgcctttagccataacaaaccctttgttcttaaaatttgtttaaaaaagcttgaattggatgttgccagtcctatcttttctgcaaatcaaattaatttcttttttaagaagaacataaacaagaaattaaagaattggaagtaaaacaagacacattaaaaagaaaaattcgccttaaaaatattcattcgccttaaaatattcattcgccttaaaatattcattcgccttaaatattcattcgccttaaatattcattcgccttaaatattcattcgccttaaatattcaattcgccttaaatattcaatgacaaaaagaccctgccccgaaaccgaatattctccaatttcacaaaaaaatggtatccaccagttaattgactctcaaatgagttttgtcaagactacagtggaagcattgaaacaactccagacctcttttacctccgaccaaatgccaatttttaataccctaattaccactttgtcctctcaaattgacctgcttaatggatcgatttcccaactccgctccactgctctctccactgaaggcatgccaatttcagcggaggaattggaaagacagagaagtgtcgtcattattggcatgccagagcacaacgacagctcaccagcaaagcgggcagagatggaccggtcaaaaatcaattgcttattcgattcgctggggatcgaatgcggtaccattgcctatcgcatgggtcgttcctttaacccagcccaaaaaagtcctcgcccattgaaaattctcttgccttcccgtggcttccaaaaacaggctctcgctgcatggcaaaaaaaacaaaacaccattcgggctgctgattcgtctctgcaccatgtccgtctccgtgaatcgctgacaaaggcacaattggaggaacgccgtcgcctgcatttgcaatgcgttgaaaaacgacagaaagatgggcaagattggattgtgtatgctgggaacgttattttgagagacgaagtgcacatcttccggagtcagacaattcgtgaatcaaatttttaaattttacaccaaatcacaaaaaaaaacaaaacacttttacaaaaagagtagattacactttccggtcggaagaagaaaattcttaccaaaatataaataattctaattcactaccactaaacaaaggggatattaattctttagaaggttttatctgttgcttaactaatattcgctctataatgaacaaaactgatgaaatttcactggctttaataaataaaaaaattagcatattattactgacagagacatggacaaaagacaatgagggaattcctcttagtccatggattaaggagaattataattatatttttgcatcaagaaaatccgaaaacagttcacgtggaggtggttgtggtattttaatcaaaaatgagatagccttttttgtaaaattttctggtacaaaatttaattgtgaaattttaattattcaattacaaaatctgaaatcaataagatttgcattgatttaccggcctcccaaaaccactttaaaacaaacaaaagaactttttaaatttatacaaacattttggtgtgaaaattatataatcttaggagatctaaatttgtcaaatcgagaattggtatggaggcaaggccaaccacacgctataaatcatattggtgaaatattttgcgacttttttaataaatttacatttataaatgccacgaatgagcccactaggggtaaatcatggttggatttgatcttatcagcaaatgataaaattgtaaaacattgtactgttgaaggtggcatattttcatcagatcatttagcacagctttttgtgctgagtgttccagaaataagagcaaagcctaaagaaatttgcctaagacggtttactccgtctaatgtatcacatttaaatgctgtaatttctgctagattaagttctctttctctttcacattttagtataaatgaaaaatgctgtgccttcaatagcgccttgttgaatgccttgaatgagtgtattccaataaaaaaattactaaaaaaagatttagctccaaaatatccacaacatttattggcatccattaaagaaaaggcaaaattatatagacagtgtaaaattgatccaacaaaaaaagcactttatgatagcattactttacatataaaaatccaaaccaaaaaaatacataatttaattgaacataaggctatttcaaagggaaaaaattcaatttttaaatacattcaaaaacacaatgtcaatccctttgaaataccaaatttagtttttgaaaataaatgctatcatgaaagtgaagagaaatcggaattatttgccattttatttgcaaattcatttaataactccgaagttgtcctaaacgatttaagtttggacaactcctatggtaataatcaatgctttatatcggacataaattttaacatcattgagactcaaacactgttaagaaaattgccaaataaaaatggaacttctccggataacatttcttataaagtcctaaaaaattgccatttttcattggcaactgttattactgagttgtttagactatcattagacagtggttctcttccaaacatttggaaggaatcaattgtctttcctctttttaaaaagggggataaattcaatcctgaaaattatagacctatttctttaacctgctcactatgcagagttatggaaagaattctcagcaaaaatatttacaattttctattaaaaaataataaaatttcagagtcccaatttggttttattagaaataggtcaacaacaaatcaattaataacagttgtcgaagattggtatgaagcaattattaatggaaaaaaagttactatatatgttatattgacaaggagtttcgtttcaaaaactaattccggccggccgaaggccggcctgggtctgaaagtggtggaagggtcttacaactttttgaggagaatccgggaaaactatagagaaaaattcagtgcggacgactgagtcccgggaagtgatttctcattttttcgtgcatttgggggcccgtaactttttttctaaaacacgaatcaaaaagtttccgctggtagggacctaagttgaagtgttttctaaaaaacaaaaaaaattccaagcctctatctgcaataggaaaggctgtaggttcgtgaactttttcagtaccaactttgtccagttcagtcccggttgaataactcattagggtttgatctgagcggggggtcgccagcgggactattgtagagcttgaaaagcttgatttttccaaatttaaaaatttcgaaaattttcaaaatttttcgagctaggcctaaaaaactgttttccgggtttttgaattttaggattttttaacgatttttcccagagaaaacgagaccacttccaanacatagtttttcgagctctatcgatt

SEQ ID NO: 3523 - DNA, 1113 bp, Heterodera glycines
tgttcgggttcctttctccgtcctgttcgcgtaccatggtgatcagcttacggcacattccaaccatttggttcacaggtccaagcatagcagacgcccatgaaggtgcacccgtaagacttttcgacagcaggacttttcgacagaagaggcgcccatttcgacagcaaaggacatttcgacagcaaaggacttttcgacagaaacacaaaaaatagtggacttttcgacagtaaacataaaaacaaataatttttattaaaataaattatattgcttgttagttttactaaatttcttttaaattaacatactataatatgtattgctaaatcattattactagggctaatatttttaggttttaacctaattttttcctgactctcattgacctgaaacgcacgaaaaaatgtttttttttggttgttgttaagcaatttttcgatttcttagcatctattttctagatttttattttttagaactttaaattaataaatttttgcaaaaaacttatgaataaaaaggtaataaaaacgaaaaatacaccccctaaaagtcgatcaaaaatttcaaaaaatacatcttaagaaatggaatattttaaaaaaatcatctccatttatttgtttacattcttgaaaagaatttttgaatttaaaaattatgtatctcaataattatttgacttaatttgttgcttttggataaaattttaagattttacacccctaaatttgaaacttaattacattttactgtcgaaaagtccactgtcgaaaagtcccctccttaaatttaaaatatttctgtcgaaaagtcctttgctgtcgaaaagtccttctgtcgaaaagtcctctgtcgaaaagtccactgtcgaaaagtccggcgcccatttaaaaaaagagaaaaaaagaggaaaaaagaaagtgaagccaaatgatttcttttgcttacagcgcttgcttatatacacattgacacagcgcaatgccagcactatgggtcaactccctctcgttttggcgtactattttcatgtctctaacacatgaaaaaagatgaaactcgcaaattcgaatagttttggttacaagggcacaaaatcac

SEQ ID NO: 3524 - DNA, 6145 bp, Heterodera glycines
ttttctcatatttgaataattttgattgtaattgccgcaacttcctctgttaaaacctctcatgacccctcttcctctgctattattccctcttatattcgaattcgtgaatgttctgttattattcgcttctctgtcatatttattctggatttcaattgaatttacttgttcctttaattctgcaatttgttgcttaaactcttctcccttttcgtcattttcaatttcttctttcaattggagtaccttttttgtctgggaaattgcttccactaaagtctttggtttttgcataaaaaataattttctttttaaatttgtgggaagaccattgagaaagtagtgtacggtttcattctcgcgtgcatcgtttgtataatcgggatcaggagacgcttgctccacccaatcccgaattttatttgcaaattcggtcaccgactcatgacccattttcgcgcgggccaacatttttcttgcccacatcggcccatccaatctcttggttaattcggccattctttctgtcagatcccgccaatttttctttttatcagcgggaatattttggtacacttctttcgcttctccttctagaaacaaaggcaacaatctgacacagtcagggccatgccagtttgatgctgttgccaataaattaaattctttcaagaatttaaaaaatcgctgttaccgtcaaactttggcatctttatgccagaaggcaaagcaatggctttattaaacaataatttatcttcaagttctttaactcttttttgtattgtttcaaattttgtctccaaatccattttcctgttttctttttgtatttgttctcctttcctttttctctctctttcttggtttctcttttctctctctctatcgctttcacctttttctttaaatcttttctgtaaataatcgggtgtgtttgttggaggaattttgaaatttgtttaattttaattcggcagttttgcttttaaatttgtgtctaattatttgtatgcagagtttctttatttctccgcttattctctttttattcctttattattgtttatttgtactaatttcagattatcaatttatttttatttaaattcatatgtcgccgcccaccgttaaaattgtcaaaatcctttggcctgatgccgacgaactgccacacgtctgctgcacttgactgtccccttgccaacggcgttcgttcctctcctttgttggggctctttggcgacgagttgccagaattgttcacttggttttgattggtcaacgactgtctgataaagtgattgacaaaattgcactaagtgatttgagcattttaaaattttaattttattaaagtttaaagtccgtaatttaggcagtatcgtttaataattaaatcgcattcagtactgttaccgtaattcagagccgaattgttttaatgctcgttatagttgttaattttatttggacaatttaatttgatcgaaaaaatggcaagaaaaattaaatggttgggataacgccaaacaatcgcaccgccttttattttcgcattttgttccggaatcattaattaattagtttttgttactttcgttcactttttctcgctttccgtgatcacttgtttctttaatttccctcttaattcaattaacagttgctcgagcaaatcatttaattcattgtttatcattttctaacgaattctctcgctttttgggttatacccccgggcatccaaaaatctcaggtgacgcctccccagaaagattccgcctcgaccatttttcgcttaattgccacttgacttatgtccaaagttcattaattcgaaaattaagaaaaaaaaaagaatagggacaactgtgattactatcatttttaattaacaaagttcgtcgggtgattttaattaattacttatttacgtagttcatttgtgttccattaaacatcccgtgacttaagcacttttctccgaaattgcttggccagagcaatttcgccatctgtcggagatttaaaaggatcatattaaattgagagagaaacaaagtgtcagagaaatggaaaataacacagtaaaatgggagaaagcttgtcaaagatttcctttgaatatattaatttattgacaattcgattgagaggaaaaggagaattgaataatttttggtgtttgggccaacgacacatttggccatcatttcattgctcagaccaattcatttcttcaaaaacttacccaaattttcatatttgttccttttattaacttttccaaaatgacttcctgggaagttcgagttgattgtccaattctctgtgccctcccaaaagtatgttgggaaccgacaacgtattccgcaccacaattgtgtttggcgcctggagtgaacccaaatatttttgaaaattatctttccattagtgagggaaatgccctcattcttctcggcctttctctcaccattggcatccttttggggctttgtttctgctttttgttgctgatcggcttctcggattgtcttttccgtcgccgatcactccgacaacacaaaaacgttcgcaacaccgaacattccatcgactcaaatcggcactcaaatgctcggcttaatccctctcttccatctcgtcctttgttcattagggcgactggcactcctgtttgagtgagtctcttacccctttggctcactcatcgagtcattccgtcaacatctttatctggccattcattcactttagtggccattggttcatgtctctgctgttgtgtgcgctttaccgtttaaagatgattttatctccttttattttgttctcattttaaaatttcgatcaatatttgggcaaatattttccgcatttattttcgatgaattttgtcaaaatccaaattatttgcccttcaatcatactatgatgatttccactatttattaatattcatgaatacactataatcaataccgtatattttaaatctatccgttttattataaaataattttatttattttccattttattaactaagtgttcacggcaataatgaatattttcctctccctttcccgtggcgggacctccatgattatggtgaagtgatgtattatccctaattggcgaataatagaataatgatctttattgcgtaaggacaaagaaatacatcattgtgattccccaactcgtaacgggaaaggggaggttggtcgggatccggatccgacaaaagtgggaaggggagttcaaagggaagagtttatataagcggagtcataaggggcggggagagtacaaagggaccgcccccgtaaagcaaaaatgtggaaaagcaggaggggccaaactaactaaagagtaacaattggtcatcgggggccccaaaaattgaccgtctcggtcaaaacacaaaatcaattaagctaagaaaggagatgatggtttaatattttttgattaataaaattgttttattattattattattattttttttttttttttaaatattaaatattaaccatcatcactattctatggtcggtatttattcgaatcatctttaaattgatctttggtcaacggttaaatgcgccacttgttgatggttctgattgtgaatgatcatttctggcccatccttcattcccgcgccagttgtggtggtatgggcgctgtcgcccgcgtccacggctgttgttgacccatctgccgaccgtcccacgattacggtagcggaactcgtcatgttgtcgccaagtcgacgtatttgtgttggcaaatcggttcgaattcggatgaaattcttccgctttttccatttctttttttgcgattttcgtcagttcatccatttctttggctaattcctttaatcctccaaaagcctctgtcatttgttgttgaatttggtttattttttggcaaatgctgttctcaattttcttcattttctcctcttttgtattttgtgctgtttcctcccaaacacaattggcaaactgcccttgagttgccggtgtttttgctgcgaagcgttttctccaactcttcttctgtttcttttgcctccaattcgttccggactggaatttgtttcctcattccttcaggttgaatgatctctgactgcaaaatgctcttttccgcacttcttatgcaattctcggccatacgtcggccgttaaatccaagtccgacttttccaatgacgcttaatcgatcttcctttcttatgtccagggttgtcgttgttgaaacgaaatcactccaccctctgtctcgctcttctctcgttagcaagcggcgggtccaaacgtgctctttttgactcttggggtgcttcttcttcttcctcctcttcttcttcgtcttcctcgtccatatccaggacaatttcatctactggcctttgctcattattctcacttctctttttctccgcctccgccttccttttttctgtttcttccaatcggtgctttaaatcctcaatttcattcaaaagtcgcactttttcggcgatcaatccctcttcattgaatggctcttccgctggagcttttggcgcatccattgtctcgctgctaaaactttttgttataaaatccatgtttttatgacattcattagattttttgtcattaatttttaattcgtttttgttctctgatttttctcctttttcattattaatttcttcatttaaatcgaatatactcatgaacaaatctttttcagtaataacatttatgctctgtttttgcattaaatccccattttgatcactgtcccttttattttcaattttgctttcattacgggagattaatatttcgggaattctttgaagttctaaaatttggccgttaaattctccaactttttcccaatacgtctcattttccccattggttttcgaagtccactcatcattaattagaaattgttcacgaattcccaacaaaattttatcagcttcattgttcaaagacaattcaaattctgtcccaaaaagccacgcatttaaatatttttttccaaattcgtttgtgagtactttccaatgttcttttatgaaatttgttgggattgacgaattcaaaggaatcaaatttggttctggccagctcgtgtatgccaattttacttcaccctccaaaaatatttcggtaattgtacatggtaataaattttcgttaattacttcattttcttccaaaatttcgtgttcatcattttgatcactatcttccctctccttcagaaatgaaattttgggttgaggttattcgaatggaccctaagcaagtacaggcagtccaaaattttagaccaccgaaaagcctaacggaattaaaatcgttgctcggtgcacttacctattttcgaagattattaaaaattttgcccatatagcaaggccactccaaactttaacacaagacaaatttgagggaaaaatcgaagaaaattggggaaatgaacaagaagaggctctggaaacacttaagaaaatgttgacttctgccccggttttacaatccccaagatttggtaaaccgttcataattgagtgcgacgcgtccaaaaaagcaattggagcggtattactccaaacaaatggcccagtcgcatatgcttcgcgcgctttaaacagacatgaaacaaattacccgtcaatcgaaagagaagcattagccttagtgtatgcggtcaaagaattttcgccttatattgttggttcaggcgtaactaaaaccattacggattgtagcgcactgacgagcatgatgaaagccaaagaattaaaagtgcgactagagaaataccagatcactctccaaagttttgaccttgagatcgtttaccgccccggcagcaaaaacaaggcggccgattttctttcacgttataatataccaggcaatgagtccgaagacacaaacaaaaagggtaaaaaagaaaacaaaataaaaatttcaagtacagaaaataaacccaatagtgataaaatagtacaagaaaccgacaaacggacgaaagtagaatttctttaatgccaataattgatgctcaacgtaaagtcaaagaatagtaaaaatattttatatcctga

SEQ ID NO: 3525 - DNA, 2036 bp, Heterodera glycines
  unsure (1)..(2036): unsure at all n locations
tgagggagcaattgtagtattatcatcacacttaataatatgaaatatttagaaaatgcccaaacaatcaaagtgatgcacaataaagaggatttttcaaatgtacagtaccaccccgacacatttctaatacagtaccaaccacaattgaataagtggtatccccttagaatacagtaagcctcacataataatttggaaaaacccgcccatcaattaagtcgagtgaaacatgtaccctcaactcaccattgccttgcacattttggtcaccgtgcatttgtcgcaatgcccttggtaagttccagtgccacaaggcgcaatgccatcccttcaaaatctttgatgaatgcgccaagcggaagtgcctcgtcaaagttagctgctgaaagtggcccattttgctgcatcagagctgcaaaaggaagcggaaaattcatcgagtactgtattttttaaaatcagatactgtagcgtgcaaaggtagagagagtactttatttagctgtccttattacttttgatagatgaaaaaataaacaaatatttttgtcaattcacagcgatgcttttttaattgtagatagtacctacctaaatgcaaatcgctaaatctacagtatcacgcatactttactgtacgaaataatacaaaatgaaaaaaatattattatgagattggacctttggcgaaattcagctccaaaaagtcggcatcgctgaagaattccatgcccaatttgccggataaattggcgctaaaatgttaatttaactaaaaaataggtaattaaaccgaaaaagcactcgcctgagggatgattggaattccaattgcccgtcactttgtttggcaatcattaagccgtgccatccgccgttgctctgattaggcccatcattttcggcacatttcttgctcaattcctgcaagtccacctttgcaactctcatccgtccattggctttccaatttccaaaatttttggccaatttgctcgagtaacagatcagatgactaatattaatttaattttttataaattaaaatatccaaaataaaaaatttgtacaaactttttacagcctttgtccagtctaatgattgttgtgccgttttcaatcggttcacatttgtcccaattttgcgtatccgatccttggattttgtccaattttccatggtcgtccacgtccgcagttgctaattcaattataaaaattaattagtttttttaattatcatttacctggattttcctttggctccgctttcggtgcattttccgctttgacgaagagccgttgtcgcagaacagcgctgtccagcacactgatcagggcgatcaacacactaaaaaagaatgcagaaagtcaaaattatctaatcagggtttcccatttggacaccatttaaaaattcatttatttaatttaattttttcgatttggaccaattgaaaagcatttgaaatcgttttttatgattactgatcaaagtttacagggaattttattgactcattcattctatgattaattagtatgtattaaaaacccccaattaattacttacacaagtgccaaccacttgttcatgttgaattatggaaaggtgattgctttgaagagttttgttcttcgggattagaaataaggaaaataaattaattaaattcttaaatttatagcaaaattaaatacacaaaaatatattaaatcgaaaggtttcttattatcaatcaaactcaaatttcagtgcgaaaattcaaataattccaaaaaaatcattcaatttttctaatcgctgtcccatttaaaaaatgctttttctttttggctttttctgttcccttccccaattttaattgaattctatttaatattagctggaaatttttttggaaatgaatgatttttcgctggccgatcagcgcttaaatgcggtggtcggccgtgccanaatgggcggtccctgcggacagaagcggcgcggccaatgggcgggcagcgcaccgccgcaccgcacacagccc

SEQ ID NO: 3526 - DNA, 3214 bp, Heterodera glycines
  unsure (1)..(3214): unsure at all n locations
agattttccaccgacaaaaaaatcccgaaattttggcgcgatctttgacctttaggtcatttgccgttatcattttgatgatactcgagttggtcgggacaaatgagtgggcggacagagaggcaacggagcgagtgcagtagtgccagcagggcgggcacaattttagatgcttttcgccaatggcactcgcgcaaaagcatgatggaaagcggaaggaacggcagcggagcggggtcaatggcataaagcctaagcttaactctaagcctaggcccgagcaaacctaagcataggcctagcctaaagcttagacctaagcctaagcctaaagataaaatatgtgctaaaaatgctaaatttgtgttaaaaatttaaaaaatgccaaaatatgtatggaaaatttggacatttgtctctgttttttgaccattaattaacacatcactcgtccactttttacaccttcaattttgatttgtttaattattcatttatacaatatttttctaaattaataaatattttcgttcgtttatttatttataaaaataataataatttattcattttattattattttttatctttttttccatcaatggaatttccacacttttttatgtttcattcatttgaatgcataaaattatggaagcaaaaaaaaaaaatgttgaaattaattaaatatacaattttataaaatattgataattaaataaataaaaatagaaagttaaaaaattaaaatgcggtgtttttaagcacaataaataaatgtggggtaaaatttaaaattgataaggagccaaaaagatttcaacgttttttgggtttaaaatgttttcgaatttcgtatttccgttataattttatgcaaattttagtcacccatatttttttcaaaagtgatcacaaccttacacaattttaatcgggatactccggaaatctctgaaaaatcttaaaaaattatgcaaaacaaagagatgaaaaaatttgaggtattggtaaacccccccccccccccatttttcgaaaaaaatatatttttttaaagccatgaaaacatgtttcgtggggttttcggtgtcgctgatcacgaatagagtatccatttcgatcaatttccaattcagatccaaattcgaacaaaaggtcgaaactacaatttttagaatttcgcattattgatttaaaaccggctttaaaacaaagaaaccaactaaaaacatcaatgcttcaataaaaaaaagttcaaaccatttttagaccaaaaatgcgaaattctaaaaatttgaagtttcgactttttgttcgaattcgggtccgggtttgaaattggtcgaatggcattcgcgtcaaagaacccattcctttttatacccgacaaaagcggggccaggccggttttcgcgtggggaggggtttttggactataactttttttctttgccgaccaaatccaacattcttggtatcattcgaaagcccttctgatgctctattagcatgcaaaatttcaaaaaatttcgttcagtatactggaaaatttggttttttgaactcttctgaccataacttttttgaaccttaatgaaatttttttaaattttgcaggctaatagaggacacatagggctatcgaatgatatcaagattgttggatttggttgacacagaaaaaagttatagttaaaaaactcgccccacgcgaaaacgacccgacccgacaaaagccgactccacgactttcccaccccaaattgctaggcaaatttttagtataaagatgccttttttcttctcaatcgcctcattccattcattcattcattcgtccatttccggtcattctgttcctgcaaatgtcttcagaaattctgtacgtttatttattgtttcttttttttctgattttcggcatttcttttgctcaatttttgaccatcagaattgggagatgaatgaaaatttttgaaactaattttgaaggcttagcttaatcggcttcaaaaaaatcaaaaagaattaaaatttcacatttgaattccatcattttgatacttttcctaattcatttttcagatggtgtgccgtgtttcttcttctattggttgtctgtgccatcattctttggttcttttttggccatgtcaaaaaacgacgccctcacaaaaacgaaatgtaaataaattaatcaaaaatttcgaaaaaattctccctatttttccagctttatctgcggcgactgttggcttttggtgttcgattttcttgcgccttctcagctcggcctcgaaattgcgctggtcaaccgccgctttaactgcatcgtcgacgaacacttcaaaacacgcaaatggaaattgggcggaatgcaaatttcccacaaaattggagaaaatggcaccaaacaaatgcaaattgtaaattccgatggaaatccattgccaatcccgcaaaatccgttgcccaacaaaatcatcggattcagacgcattcaaattttgtagaaattgattaaattgggatttttcatctaattttctgcttttcagctacatcgatcaaaatgtcgtcacatttctccgccgttttcaccgttttttcgccttttcttcaatattcttggtcatcactgaaaatgtttgcgtttcggaatttgttttgctcaacatttggccgatgcttcgtcattcaatgcgtgcgatgtttttgaataccatcgcttttcgccgtttccgccaattggccccgtcattgctcaacgattgtccatctcttcacactgtcattttcaaagatgccattctcccggaatttccgcccgatgaaagtgccaatgcgacggatggtcaagcggtggtcaaatggctgttttcgccttgtccggacggtgtgctgccaaacgtgttgcatttccatgacttttcggttgcacaatggtcgtcaacgattgaacagtttaaagcggtgattatccatatttaattggtttttatctaatttttttgccccattttccaagcatttttccaatgcttctttctccgntacttttcgcatttgttttcactttccgccgtcttctccacttgactccgttgtgccaattgatcggatcaacgaagtgactggagagaaattggcacttggacagtcatcagcaaatgattttggctcatccgttgtccaattgcgtgggatgag

SEQ ID NO: 3527 - DNA, 892 bp, Heterodera glycines
  unsure (1)..(892): unsure at all n locations
attgtcaattccgatggaaatccattgnccatcccgcaaaaatncgttgcccacaaaagtcatncggattcagacccattcaaatttgatagaaattgattaacttggaatttttcgtctaaattttctgcttttcaggtacatcgatcaaaaatgttgtcacatttctccgcctttttcaccgttttttcgccttttcttcaatattcttggtcatcactgaaaatgttcgcattttggactgtgttttgctcaacattttgccaatgtttcgtcattcaatgcgtgcgatgtttttgaataccatcgcttttcgcccatttgcgtcaattggccccgtcacttctcagcgattgtccatccacttcgcggtgtctctttcaatgatgccattctgcccgcttttccgcccgatgacagtgccaacgcgtcggatggccaagcggtgaccaaatggttgttcacgcctcgtccggatggtctgccgaaggagcttcaatgctctgctaatgcaccggttggtcaatggtcgtcaacgatggaacagattaaagcggtgattatccctatttaattggcttttctatgattttttgtccgctttttaggcattttccaatgcttcttctccggttactttttgcattcacttttggtcctcttctccacctgactccgttgtgccatttaaacggatcaacgaagtgactggggaggaattggcacttcaacaagataatgcacatgattgttgcctcttccgtttgccaattggatgggataaccgatattgggataatgtgtgggaagaaatgattgctcgacagaacccaattgacattcggatcaaagacggcggattcgacgacgggtgaacaattttaaatgctta

SEQ ID NO: 3528 - DNA, 3541 bp, Heterodera glycines
attagagtccggcgggatcgggactcccgcgggattttacgggattcccgctcccgactcccgcttttttcggtgaacgggattttttacgggattgggatttttacgggattcccgttcgggaatcccgtcccggaaaattttgaactcccgatcccgctcccggaaattttacccaaaaaaacgggagcaaaaatgcactggtaagaattggaattttttgaatttttggcaaaacattttgccaaaattaaaggcagattaatatttacttgtcaactttctcatgagaaataaatttttgatcttctttcttccaatttagttaagattttaataattcataattaatggcgccatttcaccctatttggaaaattgggttgtttgagaagagcaaggaaaacgacaaactggcagaatgcaaagccaaaaaacagccaaaataccaattcaagctttccgacgggagcatatcatcattaatttgtcatttattcagaagaaataaaaatatccaacgaaggggtgaccacttacacgttagattttagtaaagtaatatcaagtccaaggagctcttttacagactaaatttttgtttaactcaatccatttatttattcgttttttgaaactgtcaacagatggagcatctgttatatctttgttgagtttagaccatattaaggccgttctgttgataaaagaatttgaagttttactggattgtggttttaacacaactttacgtctaagattgtaagggatgtgaccagaaaattgggggaatatgtcttttttaagatgagtgagaccattgatgattttgaatgcctgaactaaatcaattgtttttctcctttcttctaaagtttgaagtttgaataaatcaagtctttgttcgtaaggtatatacggaagcctacatttaaataaagcaatttttgtaaaatatttttggcatctttccaatttatttatatcttttttgtatgtcggattccaaatttcgggcgcatattctaaaagaggacgaatgtatgtcttgaatactttggtccaaatacgtatagagcgggtttttaaaattttggcaatattgcgaatccttaaataagcagctttaataattttagtataatgatttgaaaatcttaatttattatcaattaaaatgcctaaatcactaatagattcaacctcattaataatattgttgaaaaatttatattgttgttttgaattatttttgccgagaaataatataaatgttttattttgggagatgtttaaaccaaatgcattagcccattttccaatattgtctaaagcaacatttaatttgcttctttcatcacgagttttgtaagaaacataaattttgacatcatcagcaaaaagcttgatgctaactcccggagggattacctgcgggaggtcattaatgtatattaaaaataacagaggggccaagaacagacccctgtggaacaccagactgaatcggatataaattagaaaatttgttgttaattttaactgtgtaaaatctgtcctttaaaaattcagataaccaacttagcagttttcccctaatgccaatgttatgaagtttatttattaaaatattaataggaagggaatcaaaagctttccgaaagtccacatagatacagtcaatatttttcttcttaccgtatatgctgtcgtaccaatcttctaatactgtaattagttgagtattagtagatcggtgtttaacaaaaccgaactgatgttcggatattaaattattcagatgaaggaagttataaatgctttttgcaattattttttccataactctacatagacagcaagtaagagaaatgggtctgtaattatgtggatcatttcggtcaccttttttaaagagaggtataacaatagattttttccaaatttcaggaattttgcctgtgtccattgatattctgaaaagttcggaaattacaggagaaagagtaaggtggcaattacgtaagattttaaaggaaatttcatcgggggatgtggattctcgattcggtaaattttttaaaattttagaaatttcatcggcattaaattcaacatcagaaatagaaggtccattgggattggaaggacaactgctaatttgtggaacatctgaatttgaaaaggattcttggaaaatttttgcaaaagtttctgcttttaaataatcatcaaaaataatttggttctcgtaactaagagagtggatttgttcaaaattttttgtaaatttatttatatatttgtagatagcattttttcctttattcagaaaattattttcatttttagtaacaaagttatttatttgaatttttatatgtaatgaaatgctatcatacaaatgcctatatttatcacggtttattttttgtagtttataaagtctggctttttccttaattgacagtttaagactcaatgggtagttaggctttctggatttttgaccgacagtgattttaggcaagtataattctacatattctctaaaaagaaggtaaaaatgattaaacttatcttcaatggtaaatttttgtagtaatttgtagggtaaaattgaagataagtttaaatttagtagattaagtttagtagaattataattgcgtactgtaaatgtgtttgttttagttctattactgggaaaagatagtgaaaagttagtggtaagatgatcagaactaaaaatatcctcaattaaaacattattaacaaaatcaggtttagaagagagaatcagatcaagccaagcactaccacgagttgggccgttcgtcataaggaataagccatacttattaaaaaattcacaaaaaatgtttcctttttccgatttagcaaaaggtgttccactggtccaggttatatcttttgcatttaggttaaaatctcccataatgataaaattttcttctaaataattaccaatgaggttcagaatctttttagtgagactagcagaagtgtttggtggcctataaagtaaaactattcttaatttttttgccccatttatctgtacaatttgtatttcacagttgaatttagaacaggataaaacagaaaagaatttaagttagtttttatcaaaatcattactccaccaccatttttaccgcttctgctagcttcatatattttgtaattgttagtgatatattgttggaaaggtattttttcttttgcccaagtttcagttacaaaaaccaattcaaaatcttttagagctatgatagcagaaaattcttccagcttattatttaaggatcgcatattgatcaatgttgagtataaaagattttgttttttgtttaaggtaattggattttttatggggggttcgtattttctattagtttgtaaaagagcttgctttttaagagatttcgtgttacagtggtcaccaattacacattaagagtcatcaacattatgcatatgacaaatacatttaaaagagtcggggttggatttgtaa

SEQ ID NO: 3529 - DNA, 2831 bp, Heterodera glycines
tgctgatcagccgccgccccttcgacatttcacggcgtttaaagccaatgcatcgacatccgctgctctctttaagacgcccaattctctcagtcagtcggtggcactcaaacaaaggcattttcaaaagaattccaaggattgaaaattaaaaaataaaaaggcataattttttcaaattattcggttgctcgtccattattttccctttgctctctcaggagcaacagttgtccaagcggaagctgattctgaacattcaattcgccagtttcatcccaaaacgtttcgttaatggcggcccttcccaaattttcttgcacttttcgacaaaggtttatttttatgtttattttaataattggaacgttttgcaggtgagttcgcttagtacgaccattgtcgacggaagacacgcgaattggcaagagactttggcgatggaaatgggcagagagaaagaggacgagggggaggagggcgactgtttggaggtggacatgttcgacgtggaagtacggcccatggaaagtgacgaccgcgagagggacacgcggcacgagcgcgaggagcggcgatggttgggcacggcacgggtgcccctcagggcattggtcgccctgggaaaggccgacggacatttgacacttcagtcaccgatttttcacaccgattacaggtcgagcaaatgctccgatttccgttcgttctgctcaacccccccccccccttaagaagtcatccgtccgatcgtccgatcactgtccgacttttgatcagcatcgatccgtccccaccctttccgctccaatcgccgtctgttagtcaatttggacagaatgacaatgtgagaacatagaggaagacgacttcaatttttcgtcttttagctgctttccgagggggaacattttgaaaatcgcttccgccaacgctttccaaatcgccgcgtgttggcaaatgtttgctccactgagggaaaacggttcactgcctcgaggcaagcagaagcttaatggatcaattgaggccataattattcgatatggtcgagcaaattgagaggcggagaagggaagggtcggtagtcagcttgttgaaccctgatttggaagaccaaagacaccgcttcaaagttgggcccatagtttttccctaaaaagcttcctcatctaattcatacagatattcaagctaaatccaaccgaatttcctttgcctgaaggtttctccgtccggtggtccctcccgcccaaattgtgtcccttttctccgctaaccctaaaaaagccgtttcggctgcagcgcaaattaccgcctgtgttccggtttttgtggattctgacgaattggtgcccacaaggacaccaatttggagcacaatcgacgaggtttgccccttcccctgccatttgaccatccattgcctttccgttagattttgcactttggaactgcttctggcgatgagctcggcatccttttgtgctgttggcttctcggtctccatttgtctgctttgctccttctcggctcctctctgcccgatgggcccaactccgccgcggtttacgtcaaattccccgacggcgaccgatggctaatcattccctcaaatggtcgtcattttgtcctgctataaaaggctaatcacatttccgctaattatccccaggccatcattttgatctctccgattcgacgtgtccatttctctctgttggcactgttttgtctgacaataatgtttatgtgaacctccaaaatgcgtctcatccgtcccaattggactttgacttggccaaaagggccaattgggcgcctcttttcccttcctccgctctcttcccatcccttcaggtttttccatcaaaatctgtttttacagttcaaaattctccttacccaaagcccgaaactgtgaactatggcgaaactgacgaaaatcagctgatggaattgcggacgaacttggagagggacattcggctgcactttgaccaggcgcggcccttcgccattccccaatggaatttgctcggctcgaggtcaaccggcggaagggacaatgtttaggaagcgtcgcttctctgtaggatccttcgtgaggtgctaattgactcgttggggtcgtcccccgacttcgccgcctccgtttcccttccgttggacatcgaatcgcgcctcgagcagctcaaacccgcctttcgtctgtccgctttggccttccgttttccgttcttttctcgcgctcaaattgttcgtcaagtgttaagatcccaagtaaaaacaattaatggtaaatgaaccgattaagcggtaattaactaaatgcgcaaccatcgattattgaattatatacttacaattagccaaacttcaaaggtccacctcaactcagaaccacaggcccaattcgccttggcacttcattttcaaccgatggtcggcgacgccattttgggctgtgccgttgccatttgcacacttttgccgaacaaacaaatgcaaactcaataaaaaaaacaaagcaaatgatgttcaaattgttttttaatatttttttatgacgatccgaaattgaccagtttcagagtttgtatagaaaatataagaggaaggattgggactaggtgaattttattaattttttactaattataagcaaatcggctcccggaaaatgcgtcagtgacgaaactttaatgcaataaaaaacacgggttttcgatatcgctgatcatgaatccgacatccatatcggctaatttctgactcttgcccgaactcgaacaaaagtcgaaagtccaagttttcgaatttagcatttt

SEQ ID NO: 3530 - DNA, 2007 bp, Heterodera glycines
  unsure (1)..(2007): unsure at all n locations
ttcgactttttgttcgaattcgggtccgggattcggaattcagaacgaagttcttgtagaattttttaaattttattagataaatctacagaaatttattttagaaaaatttatagccatacaaaaaacggattaaattgtcactgatttaatcgtggaatcaactaggcaaaggaagtaaatcataagaaagaaaaggttgttggtgattttcgacagtattcagaaggaaatggggggggggaagaacaatcggaggaaaagccaaagtcagaaaagcgatttgagaacatttaaaacatttgccaacgaaagaatggcaaatgaatagaaaaagcatcatttgaaggagaggcagaaggaaaggaaaagccgaaattggggggggggggggggggaaacgaatggcaaatggtcgaacattcgaccgacgaacaataaaagactaattgggttggttcggtgatcacagaccaaaaaagaggatcgggaggaagagaagcgaccgaatgccgaaacattcgttcgttcgtccgtcgctggtcactcgctgtccgtccgtttcgtcccgtcactccgttcactgcttggctttgccgcgtctcgcttcctgctgtgggaggagcgcctccgcgcccggcgagtaccgctgccgcttcgtccccgcgttgggcctccgcgcggtgcctctcgtgctttgtcgcacgcccatcgctggcgagcggtctctgtccgccgccgaactcgtcgtcgtggtcgtgctgtaaccgctcgaactcggaggcgacggacgcggcggcgattgaacggcggcggcggcggaggacggacggagagaagcggcagaaaacgcctttgagggaaaggaaatttttaagggacgaatgacaaaaatgaaaattctttttttttgtgacaaaaatccaccaatttttgggaaaatatttccttttctcctttttggagtccaaattatttccgattactttctcttctttccatctcctcccttcacctccttttcttttcctttccctcttcctttttccctgacatttcctctttttctctccctttcctctctctttttcgttttcctctctctttttcgtttccctccctcacattttcctagccgttttttctccctttttcccatttactctttttcttttcctcttccttttttcctctcatttcctctttttctctcccactctctccctttcctctctctttttcgttttcctctctctttttcgtttccctcccacacattttcctagccgttttttctccctttttcccatttactctttttcttttcctttccctcttcctttttccctcccatttcctctttttctctcccacactctccctttcctctctcttttccaacctttttcgtctcgtccggcttctcctcttccgtttcccttgctcttttctctgctgccgtcgcttttttccgtgccgccgtctcttccaacttttgcttcttctcataatatttgaagcgcttctgcagccggcgtctcatcgcgcggaaatcctcaaaaattcttcaaattgccaaaagcgtcgcaattccccgccaaaccctctccgagtcgacgtcatcgaaggccaattgccaaagttgttctctgctgcacaacatgcgcatcttcaggtactgctccacaaggcgcggatcagcgacggtttcgcattggcgctgaacaaaaggaaatgtgcgaatggattggcaaggaaaagaagtgaatgttgtttgatgcggttattaatttcatttaatttttagctttttgggactgaaaaacggccgatttcaaaaaaaatcttttggcattttttgtgttcgttcgctttgcacatgatgcccttgcttanactaatggtcaatcaaatcagtggccaggccattctttgcttctttctccgccgaacgtacgatttctacgccctcctcgcttcgaaacacgcggtgaatgcgcaatttcg

SEQ ID NO: 3531 - DNA, 2544 bp, Heterodera glycines
cacttttgggacggaaggggacgaaattggtcggtttgatcgaaagtgaaaagcaatcggagacaaaaaccaatcacaaaattgaataataaaataattcaaagggatcgattctcatgaaattgccccaaagtgaaggaattctttggatttggttcgaattcgcagtcttctgaagaagaagtgcaaagtcaaaagccaccaaatgactgaacaaaaggaccgaaactttctttgctctcccaaaatgaaccaaagaatcaaaggaatggggggaatcaacaaaaagtgacgaaatctgtgcccattttccagaagtcgccttctcgtgagaaacgggggagcaaagccaaggcaatgctccgctcggcattcattttgctcataaaaaccctttgaatgttagaaaaacagactttccaccgtttgtctgaattttgaaaaactacgaatgaaaaatggagggggagggatttgtcaatgaatgaaataatcactctttgaatgctaactgatcggaagaaggaaagacctgctggtgggggttggatggacttggagaaggcggaggaattgtgagaccatcgcaatccaacagttaattttaagcatcgtgagattaatccgtattgaaaagcggacagtttcccctggtccttgccaaatggtccctcacccctccccttggtacagattcatttttaacttgaccacttttacattggtgccgtagagattggcaacaaacatattcagccgatgttcttttaaagctaaatcacagtgtaaaaaactattagttctcaagatctaacatacccaaacagaactattttcgttgcctttattaaataattgctgcgataccgtacttcttgttttctcggatgaaaaatctcgagtttttagagttgacttatttcaccctttgttcattcatcattaaatactttgataatttcacttttaaatattaattcaaagacattgcagcattttctttgatggacgaagaggcgaagcaggaaaacctggcgaaagagcttctaaagctcacttcttctctcaagcaaaactttacgactgccggttcggtgctaaaggaagacaatgcggtaagccacaggaaaagaatgctgcaaaagaaggcccaaatatttcagacattggatgttatgcaaagggtcgccctgtccaacaaagaaaatctgataagggagaggggccgacttggccaccacgcctaccaatcgtgcttcaactgtgtgatggtcatgacagtgattgtggtcatttggtcgttcattgcgatgattattatgatgcgaatgttccccaaaatttaagtgttttatattttctttggataactcaaaacgggcccaaaccaacaaaataagaacgattcacttctgtgattgcttctgagctgtgttattctgttttgtttatttatttttcgtcatttaaatttgtttttctttaatttatttcttttgtccgttcgtttgcctgtttttaacccaatttttctcctaattattgtttttttctgtttttaatttggtgttttagaaatggttgactgaatgaattgcgtgccttttttcctttcctttcgttgcacttccctttcctttcccttttcccgtcgttttatgactgctcaccaagcatccgtcgcattgcgtcccttttattttgctgtccatcccgacagattcgcgacagaaccgaacattcgaaataacaatgagaaggcgctgcaggtgaccgatgcctttagactttactttgcaaatggtcaggtgttcaacgggtatctcagcagccttttcccgaggccaacagcccaacaacagccggtccaggttcgtcgaaagtgacgcttttgtgggactcaccaaccgattaaaaaacaaaaatgggtgattcgcattttatttgatttcgaatgcatccgtttttgaatttatttttttaggtcgatttctttgtccgagggaaagataacaaatttcggagtgttcggctgtcattgtccggctttgatgttgagcaaattgtcaggtgcctttttaagcatttcttattttccaactttttcagcgctttcattcccattttcaggaccactttggaattgttcgaattaaacaccgacactttaccaacaataaaagcgaaaaatgttccagttgagtctttttcggcatcatcaaaagaatggtcagctcatggattggacgaagtttggcaggatttgcaagaaaatgagcgaatgcgaaggcaacaaacggaaagttcggcggacgaccttttttgtggcattttggtgaacagagagaaggcattgcaacggttggacaaccaccggagcataatggaactgatcagggacgaaatagagcacatttgcacaaaaacgggtgccacacaagtaattccaattcaaagaatatgacagtgggggtaccgacaggacaatttttttttaaacttagaaggatttggtgtcgaagagtaagaaaaagctcttcgctg

SEQ ID NO: 3532 - DNA, 2191 bp, Heterodera glycines
aagtaagcgcagtgaatgaaaatcagtcattactttgtccacgaaatgacaacgcaattccctttaattgttcttctctctgccatttttctttagccaattttctctttttcagaatttgttcgcagcccaaaaacgaaagagaaatgctaagggcacttttgtcgccggaaatcttcgtggaaattgtgaattgttaccaggaactgatggtggtcgaaggctgtcttcagattccctgctgcgtggagtttccaccgctcagaaaatttgtggctgccaatgcgattcgttctcggcaacttcggcaggaaaatttggaacggaaggtgtgcagagaacgcatcaaccaatgcacatttgccattttaattaaatcattttcctattttcttggcacccttttcaatgctttcttcatttcagtggcatttggagttggcccgtgatgcatgtgtctcaaaattggcactgtccgaattgtcttgggacgcgagcctttccttcgaaactgtgagggtttgcatggaaaaactacgacggattggcccggaaaagtctgcccaatttgctcgtcttagcattcacctttcgaacagtccgaaattatttgtgatgttcaacggtcgcctctcagtgcctatcgattgggtcaaagaactttaaatgcaactgataattagttaattagccaataatacacttctaaattttccactcttttccattcgcctttatttgactcaatttgcaaaaatattacgcaaactgtgaaattaaaacaaattaccaaaattaatgcatttcaatggccatgccggtgattctctgttctcatttttgttttgattgtttgaaataaatattttaaataaaattatcatttcttacaattaacttgatttatcttcttcaaatacttagcctttttcaattttttgttttttacattaacatttgttcgcaattcccttttctgctcattgccttccatcgcttggctttgtttgtttgctccattaggtgggtttgaaattacaaaaaataaatacaaaatcaaaaaatgaaaatgcgttttgcggggtcggggtcattttggcgcagacaagtttaaagattcataactttttaattcgaccaaataaaaataatgttgatattaatcaataggtctaaatgttctttattagcctgcaaaatttcaaaaattatattaggttttaaaaaagatatggcgcgctgcgccaaaatggccaggaaaaatgcaattttttgaggttttggccataacttttttgtttctcagctaaattttttgaaactttgcaggttaataggcactatcaagccacttaaaatcataccaagattatttaattttgctgtgaaatcaaaatgatatagagtcttgcgccaaaatggcctgcgccaaagtggccggttcccatgaaaaatccgttccttactccgggaaaatctaggcctggggacctctggatccacgaattctgcacggaattttgagagagtgtaaaaaaaaaattgtaattacctaaccccaataaaaaaatagtataggtcagggttaccctttgtccttatttgtaagatttgtccttatttaagctctttgtccttattttcatcttattttttggattcagggagaaatttagatttttaatgataatttttgaaagaaatgttttttgaagcgaataatatgcaaaatcttgacaagattcaattaaatattcaaatttttctctcggcggtttcttattctcttaaaaaaattagctcaaaatcgtaattttgtcattttttgaacaaaatcgttaagaaatcgcattaaaaattacaaaaatttttccggcggcgcctattagagcaggggtgtatctgttcttatttctaagaaatgttctgatttggggtagtgtcttattttcatttaaaagaggaaatttctgaaaaatttggctaattcctaacaaaattcattaaaaatttttaaaattttcccccagcggcgcctatcggcaccgccggctccccaaaactcttagtttttcttaaaaattagccaaagatcgcaaattttggtcgagttttggacagagcttgttaacaaattgcattacccgggggggggatttccctcggcggcgcctatcggcaccgccgaact

SEQ ID NO: 3533 - DNA, 3277 bp, Heterodera glycines
  unsure (1)..(3277): unsure at all n locations
gtccatgctcctgcttttactgttgctgctgctgtgtgnnntgatgttattgtgtttcacgttgttcagcagtgtttccgactcgtcgctcagtgactcttcgctggccaattgcacccgcgagtccaccgtgtcctgctccgccactttgccctcgcagcaggtggacgccaactccgccgtcactgttgtgctgcgcatgcacagcattccctccgtcgaccttccgcccgtcctttcctcgtcgtatttgctcttcgtccgttccgacttggctcttctcagcattggtcgcgcccccggcccagccatccccccgccggcgccttcgccccgttcggcacgctttggcacattgcgtatgaacgaatagaactttggcgtgatgtaatatgcctgagaatgagaaatttcgcttttgaattggtgaactcttcttaatacccttaggcatggaaacttttgcataaaagtgattcgataatcgcttgagcacacacagaaaatgtaaaattgggcggcgtgatttgtaatttccaaaagattggccatggcacggaaaaccttaaaaaaattccaaaattaaaaaacattaagttggtcaaattgtgcctgatagtcaaatcgctttttgacagtttcattgatgaacaacagattgatggcagccggaatattgcagacgaaaaactttaaatgcaagcaaaattgtgaactccttgactttgaacatcaaaggcattaccatggctgcgatgccacccaaaatgtacagcaatgtgtcatcacgtgcgatagtcgtttggtcgcgatttcgcaatcggttgaacatcctttgcctgcgtcggaaagccaccataatttgagagttgagcacgaatagaatgacaatcggaaggaagcggagaaggccttccctggtccacttgtagatctgggaacaccgttttcatggcgattgaccttttttctttgcatttggccatttctgctcacttgccatcccatcgtttttgacacggcactgtcgtccgggtaataaagcacgtcgccattggctaattcatttcttttcacgctgtaccgtccgatgccgtaggggatgtaaaagaaagcaggcagcaaataagcaacaattatagccttcattgctcgctggggcgaattccatgtgcgaaaatgcagcggaaaaacgacagacatataacgctccaggctcagcgcgacaacaatcagcacacccgttgaaagtgtccaatttataaacttgaccgaagaaatgagcaatgaataacccattcgatacccaccgaaagcatcatatgggcctgatagaacccgaacatgggttgtctgtcgatgggcacaccggcgacctccttgagcacctcgaaagtggcgaacaacagcacaaaacacatgcagagcaggtcggcgatagccaatgctcgcagatacatataagaaacagctcgaagtcgagggctggcaagtgtgatcacgttcatcagattgccgatgatacccaacacgcagacaaccggaagaatgtagcaataggccaccaatttgatggttttgatgtcttgggcggctgcagcggttgatggagtggtggaaggcagtaacaacagtggcgagttcgtagatggagtcaaagaggggaccaacgaggtcgaaacttgctggagcaaagccgaaacatccaacagcggaattgagtcgttgttcattcctcctaaattgggggggggggcaaatgtcttggttttgttggaataaattgagaaatttgaggagaatgggagtggcgggtgcgggttttgtgctgattttggtggttggcacgacagcgtcggatgggcaagggaagggattggtggtggacggaggggtggagtgggggcactctccggaaggaagtgagggcaaagccaacttagccaagcgggaaacggattttattccgtttgttcttcaaaaaacgaatttgacattttataaaatttgcgattgtttgcatgaaataatggaaatgaaagtgaaagaaaaataatggaaaaatatttaatgggatcaacagaatgatgagacaaaaagcattttgacagatgacggaagaggagaacgaagtcggacttccgcagaagggcgtcaacatgatcatcaaggacgccctcccggacatgcgtatcgccaacgaaacgcgcgaattgctcaaccaatgctgcgtggagttcgtccggcacgtgtcgcgcgaggcgcaacacatctcatcaaaggaccagcgcaagaccatttaccacgaccatgtgcagaaaggtggtgggagtgggcgattgtgatgcgttgaggaataatatcaataatgggccaatgggtggcattttcggcattatgccctcaacctcccccctcccccttttttttgcttgactaattattgggctcaatttgggggttgtgtcgcagagggcggcaaagcgcggaagtaccggcgcggaagggactgttgactcactttgtgacgggcaatttatccgaattttcgcctctgccgcgaaatcccccggggaattggtgggatggcttcccccctcccccacggcatttcgctgacatttccattcatcgtctcccgtcaaacccgcaaaaaagcagcactcccaaaggccaaataatcgcaatgttcacttccatttcacgaaacatttttccatggatttctcctccaaattggcttcaatttgtgattttttttcgcttgttggcactttcctttttttaatataaataataaatagtaaaataaactaataaatgttgagaaaaagggagcgattgactgcgcttttgattttaaatttgtggaaaaagccctgattttgaacattcgtaaaacaaaggattaatagcctttcctctcaagtgattaaaaccaaattcggataatctctcttgcaattcctttctcattcgttctgtcgtctccttttagcactcaaaaatcttggctttccgcgtgaatatgtggacgcggcgaactctgtgcttggcgagtgcaaaattgcggctgagaagcgcctgaagcgcaaaaattcgcgactggacaaatgcggcattcccgaggaacagttgtggcaaatgcaacagcaactgatcgaaaaggtggggaagaaaaaggaaagcggcgatttgccaatggaatgggcacaaagtgcgaggaaatggggttgaattggggggaatggcgaatgattaatgataatgaatgatg

SEQ ID NO: 3534 - DNA, 1237 bp, Heterodera glycines
  unsure (1)..(1237): unsure at all n locations
tcagatttccatcggagggcctcagcagggcatttttgggtaattatttcatattttatttattttttaatgatcttccncaatttgctaaggctcgccttttgccacggttccttttacgtttgctcgctcatccgtcgtctgcttgacaatggcgcgtacaccgaatttgcacaacacaacctcgtccaagcgcaatattggcagtgagtttgaaaacacaaaactggcactcattaatagcaaaacaatttttgatttcacactaattacttcattaataaaacatttaatattaggaaaaatcaattttttataatcaacttgatcaaaccaatccttaatggacgtatcccataaaagagcttaaaaatggaaaattctagaaaaaataaggtcactattttctacagaagtcctaatttggacagtcattttttcaaaagttaattaatccactaatttgtgtctaatttgtctgccaaagtgacccaaatttggccgagggctatcgccgcgcgaacattttcctggccgacgtgaactgtgaacggagctgcgacagcacgtatcgcgacaacatggccaaactgcgcaactttgtgctggtcggtttcagcaatgaccacaaattggtgccgaaggaaacggcggtgggttcagtggcaaatgagcaagacaaattagcaattcataatcagccaaaattggaggaatttgttaatttactatttaaataccagacgaggggtatacaatgcacaaaaaagttcagaagataggcctaattaatttccggaattccggtcccaacaaccccaattttttgtgcttaatgcctaggctcctattttgatggcctatttcgctttacatataattttagtgtttttggaaaatatctgcaaaaaattgttggtttttagttgtcgttattcgaagtatttaaattaatttcatttacaattatagcaaatttattttttatgtgtttttaaattaataaaattttggtcattaattaatctttcagtggttcggtttctacgccgacaacgacacacaaacgatagtgccaatggagcagactagtagttaaccatactgatttgtcgggggtgtcgggggcggttttcccgcacaaacgccagggtgtggggcgtttttgggctttaatgttgccgccggcggcgggattccctttgagggtgccgccatcccgagggtattgggcggt

SEQ ID NO: 3535 - DNA, 4730 bp, Heterodera glycines
gggggaatggggaatgcagcgcgagttatcgcaatgcgcgaaaacaatggaaatgaatgagggggagtgcgctgggtggcggcggtgacatctggcaacttgtcgtcgctcaacggaattttgacaggatgcggggggggagagagatgtcagagaaaggatgaaagggtataatatgcagtggattttgctgaggggggggggaattcaatggaaaatttggagaaggaaatattattaatgtgaagctggcggcaccgtcttttgtatatggcggccattgttcggacacttctgttgatcgttgacagaattataagtatctttgggagaaatgggtcgcttggacatcactttctttccccaataaacatttttgtacttttttttcgcttttccaataaattcctaaagagaaatgaattaccctactgatttttcttggcttcccgtcaacaattgtgtttgtcctgtgaaggacaatttatgttatcactttcccggctacaaaaagccggttatttgtgcccataaactggtgcaaaacattaccgcattcctttcaactccccctcacatttctaatggtattttttctgtttgtttatgatttaatttttcaaacaattttccagaatcggcacctgcgtctctttcctcgggctccgtgttgatgctgcttactgtgctccaaattttcatcattttgtttacggtgagtaaaaatggtttatcattaaatttaaaaatattttaatttctttaagatggctttgtgctgctgtttgattgtctttgccgcgcgaggccgaacttacacggtgaatggtcgccgttccactcggcgccgagctgccgctgcgactttgagcgccttccaggcgcgcacttcgggtgggaattttaaaattgttataataaaaatattcattatattcggggaagggatgaatttcgaatttttaaaaaaatttttttccattttcagcgcttggtcttggcagtgctgctggtccattggcgattccaaaccgccccgcagggtgcacttctcatcgtgtgccgggtagtggggcatttcacatttatttttttttttgttttaattttcattcattatttaggctgaatggtgtcagctggtcaacgaaagaatgatgtgtgaagaaaaggcggataaaatttaaaaaaaaaggaagatcgaataatatttttctttttttattctcttcattttttttccaaataacaatttaaataaaattttgggatattaactgaatgtactaagtctatcagcttaggttctgcaaaataatataattatctacccgttaaagtttatacacaacaatatgttttcattaacccgctcttcctcaaacacttccttgacaagcaaactgaattttattaattgaaaaattagcattacaaattaatagtattatgtaattttgggtctttttttactgttttttcggatttattcgatgcgcttctttgctttcggcggcgccaaaatgtcggttgcgcgaacattggccagagcgcattcttcgcacagttcaaaattgacagcgaaacggtcatcatccttgcgcaacaccctctgcttgttgttgtacaatttgttccaatcatctgagatttataaatatttaacaataaaaaataaatagttattcaccaacgcagaggtagaagcccagcatgtattttcctttggcgagtttccacaggtctcggtcctcgacttttcgttttttcattgacggctgctgctcctcaccaccattcattcccacattttttgacggctgcttacgggtgggcgctttcaaggaaggaaccacaaattcagcttttccaacattgttctcctttttgatgggggagctttttgtcggagagaatttgcttggggaggacatttcgatagaattttttgaaaattttgcaaatgaatcctgattttgggtgggtgaaggttgggaagcgaaaaatgggcggagcttcgaactgtcgaaaagtgggcggagcctaatcgaatgaaaacatataaaatcggcacgcttttgaacttccgccaaattttgcaaatcattcatagttctatctacaaaaatggccatcaacatgagcgacaagcggggcttgctccgacaaattctcggcgaagcggaaattaccgtgacaacatcgggcctgacgattagcggcccccgtctgtccactccacggttcctgccgtttgacgagagtggccgctgccgctcatgtaaggcaactgaagtggaggtcgacacaatggttacgaaggagggggtcacgatttggtgcacacgcatcgacaaagtccaattcgtgccattcgatgtggtctacgaattgccaggtcactgcttcttccgactgaagaacaagtcgcgtgtgttcaatcttccatacggcgaccttccatctgaatccagtgaaattccgctaacccaacacgtggacgaagaacgggacctcaagagaaaggcaaaagctgcgctcgaattggtggaggccggactgattgcggacagcactgtgcaggacggggcccgtttgaaaaaagccaaaactgcgatgaaagtgatcagtgacattctgctctctgaaccggtgggagatgatcaaaagaagacggttgaagtggcagttgtcgacaagcagccacaagagcagcaaccagcccctgtacaagagaagcccgtcacggcacccgctgtggaacagaacactgttgaagtgaagacggaagaagaaaagaaggatgatcttggtgacattgacaaaacactcgatgaattttttgcgagccttaaagccgcaaccaccagtatgtaaacgaaaacatatttaaatccttcgaatttatttgcgcaccatttcacttgatcacaataaaaaatgttaaattcacaagcgttttcaaataaagatatttgttttaaattgccctttgggttaattatttcggggccctcatcctctggtaaaacccaatttctactaaaatttattgccgagtcctccgagttaatctcacccagcccggtctccattctttattgctttggtgaaatgaactcagcggtgcccgtacttcaaaaagcgggggttgacgtttatgcgggagtcccgtcagaagagttgatcaaacgtttgcccaagcctcttttgttgatactggatgacctcatgctctccatggacgagcgatacctgtcagatttgttcaccaaaaaatcccaccaccatcaatttgcggtagtttttgtcactcaaaatttgtttgagaaaaagctcaaagtggcgcgcctatcctcccagtacctggtactgatgcgagcacccaactctctgttgtccatcagaaatattggagtccaacttttcccgcgtcagctcgacttctttctggatgcgtatcgtcaagcgaccgcccgtccctacggctatttgctgatcgacatgcatgcatcgtcggacccatcgttgcgtctgcgcacaaacatatttaaggaagagcaggaggaagacgaaggcattgttgtgttcattcccaaaaatggaggaccttagtcaacaacagcaacagataaaaataggacagctaataaaagacaactcggactggctgtgtgctttggcgaggaccaaatcctctaaaaagtgtaggaagattttacgtcacgcgaacagcgatcagctattagcgctagtggaaatttgtctgaatctcgtcgcttcacgtttccgattgactacacgacagaaaaaaagattgatgccctatgttgagactgtgcgaaggatgagcagagcgagaagtgaacgcggcgcgagacgtgtgcttgttcagaaaggatcgggatttggggggttgtttgctgccctcctaacacccgtgctaattgaagtagcgaaatcatttgtgaccaaaaacgcataaataccccacaatttgttgttcacgctcacatttttgcaaaatggctaataaatttttgcttgttccacaagaaatttaccgagggctaacctcagcgtcagatacgggagtcattaatttggatgcggtaaggcatgacctggagcgtgccaggcgtgaacggactaatccaacaacaaaaaatgtccggtacaatcaacagcttaggcgttatctgcaaatgagaagggagcttgccgatagacctaccaaagttgagttaaccaagggcttgagtgttttgctcaagcgagatgggggtgttgatgatgacgacggcgaagtcgtcaacactcagccacggcctcccgctccaccaccaccaccaccaccaccaccacctcctccacctcctcatcaataccaccgtcaccatcccagccctcccgatgagcaatcttcctcgtctgacgatagtcatccgcctcgcccccctcgtccaccacgtcctcagagaacaaagaaaaaccatcaatcttctataaaacatggtcggctgaatcaatggaagcaaaggcgtcgtgacttgcaacaacaaccggtagtacgtgatctactcgctgaggcagcagctgctcctttacctgaaagtgacgatgacgatgaacaaatgctggaaggtgggtatctgctgccaacaccatcacaaaaatatggagacatgccaatattgcctgactatgcagatgaaattgaggaaatggac

SEQ ID NO: 3536 - DNA, 3471 bp, Heterodera glycines
ggacggacccatcaaaaaaccttgtccctgccttgccccgtggcattttgccagtgattcgggtctttttcagcaacttctccataaaatattggctccgttcactttttttcgcgtcgctttgcctgcaaatgttcgccaaatggcaaaactttgaaagcgtcgcttttttcgccaaattgtcaaatatttccatttgccctttcaaaatcaaatgccattcgttttttatgttgtcttttttctaactaaacaatttatttaagcctttctttctcattttcctcctttttcaagtgcattccgttcttttgtaggcatcggccgaaggcacagcgaatggaatgccgcacttttgttctcattattacccccccccccctcccattgcgcactctcccaaagtgccaatggcattcctctccccgttgcactttcccactttggcataatccccctcctttccccctttcttccgctgtctcatcattcgtcctttcgttcgtccgtccgttcgtctggcttaaaatgtccatctgttttttgtagccgaaagataaaccaacggacagaaaaagctgatcactttcgtctcgtcttcaattttacttccctttttaaacatggaaaaatttacggatgaaaaggaaaaggcaaaaatattttcgttagggtccaatgactttttccattattttgttaatcattcgccattttgcgttgtgcctttgtaatttctgctcattaaaattgcgattttcacttcaacaaaacgtttctgtctgaaaatgattttttttgtcggattattttccaattattttgtccaaaaaattttacatattaaaatttaaaaaaaagtttctttttttgtaccagtgatcatttatcatctacggttaataaaatgctatttacaaattataaaatcacctaagtgccatcgtttttggttctcaaagtgacttacaattaataataatttccttagcaattgtgccatttcggtaattaatgcctttgccgttttaattaaatgtccaataatcagtgaaaatggcagacaaaagaatcgaaaattaaataatgtaattaaacgcatgggaaaataaatgaaataaatgtccattttcggcttcaatctcataattttctcagaataaattcttacgtaaaaatggccaaaaataattaatgggagaagcaaattaaaaacaaaataaaaaaggaattaaaagggcacttttggcgcttcgtaaatttggccattgacccccccccccccggcggacccttcgcaaaaatttggtcgattctctcccgccccacacttttttttaatgtatgcaccgcacactttttgtgttactttttcatcgttatatctcttactctttttgttctttctcatattttggaaaagtttaaatttgcaccaattgattctttcattgggccaaatgaaaataatttttgaattttatttgcaaaaaaaaaaccaagaaaattaaaataataaaaagttttaaaaatcttcaaaaggccccgcctcttttgcctgaggcaattgtaaggggcggagttatttatggccgagaggaaaagccaccgaacgatatttaaatggagaaccatttccaacaggaaacattcgcactttattatttactaagctaacaataaggcaatcccttgcgccactctgtgcccaaatgattcacattctgatcagtgtggacgacacgggggccgcccaattcggcgactcgcgtcgggcgcgggcatcgcacgcgccacggcacggccatcggagggccgagccaatcgcatcggcacggacgacgcccctcgccaaggcacagaccgcgcaggggacaaagcgacgacaatgctgacaaagtgtcgacaacaagggaagagatcggcaaacaaacgccgacagagcagcaacaaaaatgatcaaccaatgatggaggacaaaccgatgagaaagtgccaacggatgagagagtgccatcatcgcttttcattgttggcacaatgccaattctttcctcgtaaagggcagtgtcgaaggcttcagatgatgctaagagataacatcagagagatgtcgctttttcatttctcttattatttcattagtttttgattgcatttcactttttcaattcagaataaatgtttcttttttgtctgagtgtgtacagtaactaacatttggtccctttgaaatgagtacggtttttatatgctatcaatgcccccctccgctcccctcccaattccctttgattggcaaattcctcggagatttgtttcagaaaaatattacgcatttaattttaaggaatttaatttattattttaatattgggttttctttttttgttttgtttttcattttttgttctttttgtgcctttttgtcattaatttcggcggaagtgccaaatttaaaactttctctttttataaacaaaaaattagcaaattcaaagcacgcaattttctgacaattgctaaatcgacggaactgaccacaaagagaaaaacgacaaaatattttaattaaaataatttattttttattttaatttattttttcttttttattaatttatttgtcatttcattaaatggacgctttttaatgtcaatatgaatatcaaaattggttttctaggtcaacaaactttttaattaattaaaatttattaaattcccacgtttccaattttacaatttctccataatttccattaatttacctaattgtgggtcattattgacgcaatattttttattttaagtgacacttttttttatttttgtccaaaaatattttttgttattattttgaatatttgtccattaaggggaagcgaccagtttaaaaagccgttgttaattttaaacaattaaaagcattttttgtaattaatttttgcacttttcttaattgctttctggccctttgaacaaagatttgcttttatttgtccgttttttgtccacccacaaaatggacaatatttactaattaaagcggattaatttatgtgtttccgtaataaatcacaaaggaatttattaacagcctttttattgcaaagacaatttccttccgccgtttgtttgtttgaaattgaaattaaaacaataaaaaataaaaaatacctcaatttatcgaattgtttgttcacttttacctaagttttttgggtacgtttgatcaccgccgtttcagtccctccccccccccccccgagttcatttcattttcattttgcccccttttctgttgcaaacaccgcgtgatttgtgtcgtctttccccgctgatctctttccctcccatccatcaaaaaatggcaaatttaaaaatcattacccaacgcaacaaaacccaaaacagccaaaattaacaacataagtagtaaaattgaactttttgtcgagacattcgaac

SEQ ID NO: 3537 - DNA, 1807 bp, Heterodera glycines
  unsure (1)..(1807): unsure at all n locations
tttgtccacccacaaaatggacaatatttactaattaaagcggattaatttatgtgtttccgtaataaatcacaaaggaatttattaacagccttttttttattgcaaagacaatttccttccgccgtttgtttgtttaattgaaattaaaacaataaaaaataaaaaatacctcaatttatcgaattgtttgttcacttttacctaagttttttgggtacgtttgatcaccgccgtttcagtcccccccccccgagttcatttcattttcattttgcccccttttctgttgcaaacaccgcgtgatttgtgtcgtctttccccgctgatctctttccctcccatccatcaaaaaatggcaaatttaaaaatcattacccaacgcaacaaaacccaaaacagccaaaattaacaacaaagtagtaaaattgaactttttgtcgagacattcgaactctaagagctaatgctcagaaagggatgagactttcgaattccaattaatcctttaatccccgtctcccattctttcgctcattaaaacctctacttatatacacactacggatgatgttcaaagttgaaacggaatgaacgctatctgccaataatgtccctaatttgtaaaagacggagttgacttgacaaaaatttgtttaaaaaatggttaaagtagagagcaaaaagtggcaaatgcaattaaatatttattaattttaattgaaattaagtacaatgttttctaattatattttaattatctttttaattaatttttccaaatttgtgcagaatctaattaagtgaccaatttgctaagcctcacgcccacggcatacaaaaagtgaggattcatccccacaattattgccttaggcgttctttcattttcctagacgaagcccgcaatttgcccgcggggagggggggggggagggggagagaggggcgtgtccaataaaatattccccgcgtgaagcgaatggagggacctcccggggatataaaagcggggcaattagacgattctttcgctcccaaaaccaacaaaagaaataaaacaatcccttgtttgccctggcaattatattaatagactcaaatcccttgcgccactctgtgcccaaatgattcacattctgatcagtgtggacgacacgggggccgcccaattcggtgactcgcgtcgggcgcgggcattgcacgcgccacggcacggccatcggagggccgagccaatcgcatcggcacggacgacgcccctcgtcaaggcacagaccgcgcaggggacaaagcgacgacaatgctgacaaagtgtcgacaacaagggaagagatcggcaaacaaacgccgacagagcagcaacaaaaatgatcaaccaatgatggaggacaaaccgatgagaaagtgccaacggatgagagagtgccaacggatgagagagtgccaacggatgagagagtgccaacggatgagagagtgccaatggttcggctcaacgcacttgggagaatgatcgactggacaatcaccaattatcgcatcagttcggcgcaattttcacttaagacgatggaaaataagaacaatcggagaaaggccaacgaatgactgaagttaattgcttttggatatattattattttttcttttttgttttttaattaattaattgtttttttttggttttatttttccattttttcttttctcatatttattatttgtacataaggaaagaacaatagttttactggcaaattcgaaataatcaatttgaggcaaangggtcatttagaggtcgttt

SEQ ID NO: 3538 - DNA, 1481 bp, Heterodera glycines
aattaattttctcctttattgtttttgtattaaatttaatggcctagaatttatttgtccaaatttgcgatgaaaaacgaaaatcgtaaaaaataaatccaataaatttgggagtcagcgcagtgccacaaattcaaatattatttttttagtaaataaaaattgaaaaataaaataaaagtgtaagttgaaatcagtcgaatgaaaatggtcggcgaaattcgatttttttttttgaattttccgatattggcgaattgtcctcccaaatgcccttttccgctggcgaaggaatttcacttgcgcaccaaaaaacaactgacagtgccattgttttttcagaagaaacactcagcgaatggcacaggcaaaaacgaaggtacgaataaaaactaaagtgaaaatacaattacaaaaacactgcttttgttcgaatttcccacaattggtttaaatgcgtgtcctttgtccaccattgtcgacactttgtcagcattgtcgtcgctttgtcccctgcgcggtctgtgccttggcgaggggcgtcgtccgtgccgatgcgattggctcggccctccgatggccgtgccgtggcgcgtgcaatgcccgcgcccgacgcgagtcaccgaattgggcggcccccgtgtcgtccacactgatcagaatgtgaatcatttgggcacagagtttcattttttttttgcttaaccactccttttcaataaaatgaatgtttttgtgcttttggccccattttattccctttggggcggcggataattaaaaagtgataattaatttagaattttccttttgcacgttttgtaaatttaattcactccctcgccaatgtttacactttgtttgcccaaacgtgaaaaattaattggttgtgaaggtggaaaacaaagccaaattatagcttaattacattcggaccattggaaatgccaaaacggaaaataaataaataataattttttaattttcaaatgattttccaattttttaatatttttgtaaggaaattttgtggaaattgagcaaattttaaaagtttaaaggaaaatcaaacataaaacattgtcatcactgtccatcacatgttcactgacggggaatccgaggataatccgtgccaaaggaacagaagagactttgagagattggcacgaaacggacgaatttgaggagggaattcggaggaaaagaagcactattcaaatgttgattatgtaatgaaagaatgccattctcaaaacaagggaccaaatgaggggaagggaggaattggacaattaaaaacaaaattaataaattaaatattaattaattaattgtatgagaatgagaaaaatgatcaaagaatttagcaaatcagatggactactaattaattaattaaattgcattttaattatacaaaaaggcgtgtcttttctccttttgttgtcgaacacttggtggcccggggggaggaattt

SEQ ID NO: 3539 - DNA, 3153 bp, Heterodera glycines
ccccccccccccccccaaaaattttttttaaaattttaaaacctaagaattttttcaagaaaaaaacgcgattttttccacaatttttgaatattaagttttttctcaaaaaattttcaaataaatcgctgaaaaaatttttcaaacttttttcttgaaaaatttcgagtttaaaaataaaaaaaattttttccaacgatatcggggaaacggcggaggggggggacgaactgtttcccaattatattgcatatttaaattttttttttgcaattaataaaaaagcacccaaaaatcacagaaaaaggaatgaaatatgcaaacaacaaaattacacaattattctccttccatcccccgagggtgggtaaatgtttcaataaaaataggtatgtgaaatttgcctcaaggggaaatcactaaatggcaaaacaaaaaaatagtgatgtcttatttgttttgccctcgaattaacaattaatgaatggattaaaaaaaagtgacgaacgaactcatttattagttaattaggtttctttttgagtttccaattacagtagcatttgccttggattttgcagagtgatactgttgaagagaaacccttttgaaattgcctattttggtccaaaaaacctaggaattgattccgagtccgttaccagcttcagttcgttcgttatttacgtatatatatttataccgtaaaataaaattccatgggacgctaaaaattttatgggacgcaaattctgcagtagaaactatttgtttttggaaaatttatatttttatgtgagttttagatgcagaaatttcaattccttcacaaatttcatcatttttaaaattcccagtcttcccaacaccgtatgttatgggtgactgatctcctaaccatagtagttttaataaaaatctttaaaaaatttggcttaattaatttccccgcagcagaccctaaaaatactttaattttcttaaaaaaattatgacacccgggatcgggatccggcaaaaccgggatttgaatcccggtaacccaatcctggcctggtgccaatcacgaatcccgactttttcaaaatccgggctcgactgattatttaataattaaaaatcattattagaatcataatttctctttttattaatttgcattttaaaattgactctttttcggcttatcgtcatgggcgtaagttattttcacataattcattcgtcggtcaatggaaattcgctctcgttaccgttcaccttaatttaaatatccatttgttttctttttaattttggttcgttcttggcgtaataatttttgccaagccaaagactttcatcgaaaccaaaagaaaattaatttactttaagaaaattcgtgatattattgttttactatcaatagatttttgaattgtatttacctaaacttttttttttctgctttagcgacaaaagaaaatggtcaaagacaaaaaatattacgacatcctcgaagtaaacaccagtgcaacagaccatgacttgaaaaaggcctatcgaaaattagcgtatttacttccgcgttatgactttattaatcgcccctttttaggcttaaatatcatcctgacaaaaatccgaatgaaggcgaacgttttaaactcatttctcaggttttcttttctctgtctttgtaagctgtttcatttttcaggcttacgaagtgttgagcaaccccgaaaagcgtaaagtatacgacgaatatggagaagaagggcttaagggtggcggagaaggcggcggaatgcacaatccaatggacatattcgaaatgtttttcggcggtggtggtaagggttggattcatttgtccttgtttaactgctgttgcaaatttttaggttttcgtggcggtggtgaaaaaccgaccaaggtcagagatactgttcatcagcttaccgtttcgttagacaaactgtacaacggatgcaccaaacacttgcgcatcacaaggtttgcatcattgatattttcgaagattttctgacacggtctgagaagaggggtaatactatagatggtaccccccctttttgacgaaaattttttttgttctgaaaagtcttggaaacatgtttatggggggtttcagggtcgctgatcacgaatatgaccttcattggaccaatttcgaataccggacccgaattcgaacaaaaagtctaaaactcaaaatttaaaaaattctcactttagttcctaaattgattaaaacgtgctaaatttggtcacaaaccattggaatatcaaagaatggtcattctatacagctacgaacataaaagtgaattttcaaaattttgattttcttcaaaaaggggggtaccatctatagtattaccagaagaggaattgggttggggtggcatttgccattttgaaagaaataatattttttcgaccccttaatattttcaattttgttcaacacttaatttattattcaggcatatcctttgtccgaaatgtaatggtgtcggcggcgctaaggaaggggtcaaacaatgcgaaaattgtcgtggacgcggactggagattcacaacatgcaaattggtccgggaatgattcagcgaattcaaagagcttgttctgaatgtggcggtgagggggaaataaatcgcaacccgtgcaaacactgtggcggcaaaaaacgggtgcgttatatcgaaaatagtccactaaaactatacttcgatgaaaaaatggtggggggggggactttcaaaaacctcggaattttttgctcttttgtctgatagtttctctttaaaggcattaatttgttttacagatcaaatcagaagagacaatcgaagtgcatattgagaaagggatgcgcgacgggcagcgactgatgttctacggaaagggcgaccaacagccggggctggagcctggcaacgtgatcattgtgctggacgaggaggagcatcccgtgttcacgcgaagaggcaccaacgtcaccctgaacatgaaactgacgtgacagaggcattgtgtggctgcactaaacatgtggtgacgttggacaaacgcattctcagctttactccgttgcctggttggccactatggacacaaatgccttgaccattttcttttctttt

SEQ ID NO: 3540 - DNA, 6138 bp, Heterodera glycines
  unsure (1)..(6138): unsure at all n locations
tcctcatctaaattttaaagtaatgttgttgttattntattaaattattcaattactattagtttgagtgaattaatcatntaaattgtaattttcaataaaatatttcatgtcatctgtttcgttacatttattaacgttatttttgttttttgttattaattaattgaatcgataattcataatggttacttaataaaattttatatggtcataacgataatttttcttaataaaaatttttacatttcttaatttttttctcgtggtaatagattttgcatcttgatcgctcttgtcatcgattttttttattagtattttttgcaataattttttaatattaacatccctatagggcaaattatccattttaaatctccataaaaaatatttttattattttgttttaaattattttaatgtgttttttggtaaatttattaaaatgattgtaaattaacaccactgatgatgatatcactgaagaaatttttgtatattttttaatattttatttgtacagtattcattgctttaaaattcttaaaaattagtaaattgtaaaaattattaacataatgttcttaaagttcctatatttgatttcaaattttttaaaatcgatattgttttagtttttaatttaaatcaaaggctttatatttttaaaatttatttatttttggtttcagttcaggtaattcaacgtaagatttattaagttaccatataaaatataatttttaataatattttattttaaattgctagtaaaaataattgaatattctcctttatttcaattgaaattttattgtacctatccttctcgcccttctccattactatcggtgatcatcttgttcgggtcattgctctacccgaagtgctttaaaataagtttttttttatagagaaagaatttaatcaaattgtatcaaaattttattaatcgtatttattttccatataatataaaattaataattttttataattttgttttaaaaattatatgttaaaatatttatttatttacttcttcatctcttatatcattttgctgtaaatctaaaaataaaccatgtttattatcttataataatattttcagcaacaatttatttttaaatattaatattttcagcaataatttattaatttcgtccatgaactgtaatcttcccatttgataaatggtttaattggatttgtagtcaaatttgattttgttaattgaatttctaattcttcattaaactcttcatttatttcttcaggagtaaaatcttctaattgtttatatggccatttatcaattggtaattttagccaatttgggccataccaccataaatcagaattttttatctcagatacagtcatccctcgggatgcaatatctgctggattttcttttgattttatatagtgaaattttaaattaaaaactattgttgcattttttatttcattaactctattttttacaaatgtaggcaattcttttttatatttaagccaacttagaacacatttagaatctgaccataaataagtattttgtattttaattttggtttcatttataataaatttagcaattcttgtaccaattaataaggctaatagttctaattttggaatagttaattcttttactggtgctaatcttgttttagcaaaaattaaatatatttcatttgattcaattaatttcaagtaggctgtggatgcataggctgaacctgaagcgtcagaaaaaatgtgcagttcaactggttgaattaaagaattgttaaatggaaaacgtcttaaatgaatttcctcttcataagttatttcattccagttttttatttcttcattactaagttggtcatcccaatcttttttagatttccataagttttgaaagaatcttttatgtggcaaaattacgggtgaaatccatcccattggatcaaaattttttgcaattaaatgaattacatttcttttagttgttccaattgaaatagttggaatttttattggtattgttagttcatcattttctacgttccattttattccaagaagcttgcttatttttggcatttcagagccttcaattttctgaatttcattattagattcttcatgatttgaaataaactctcgtaagttcattgacgcaaatttgaaaatttctttactccaataatgcttaaattttatttcattttgatcttcacacatcattacaaaattgtctacatatgcattttctgttaattctttacataattttccaaatttttcttttttatcctctaagtctaattcgatgtcatttgtatttatgtttttaaaattttcatacatttcatctatttttgatagatgtaattcaattactgctgccagtaaaaatggtgacgcatttacgccaaatggtattcttgtaaatcttctaatttcaacgtctttcatttcaatttctcggttggatttatttaattcatttaataattcattcttaatccataaaaatctggtagtatctctatcgagaatatctaatccgatttgtagaaaggctttttctatatctccaattaatacatattttttaagtctaaatctcattatcattccacataaatctggcattttctttggaccttgaaatatttcatcattgagagaatgattgcctcgtaatttagctgaagcatcaaatactggtctaatttttgtcgtattcgaactttctttaatgactggatgatgtgccaaataatgagttaaataactggattcaaatggtacaatttcattaacttccatttctaattggttttgtaatatctcgtcatactctaataattttttattttttattaattgtttaagtactccttttaatcgaccaaaacataaaccaaaatttgttggaatttccggttgttcttgtttaaatggccatcggacgatgtacctattattttcaaattttactgttttattaaaatgtataactgataaatcatcatcgtttaaagaaggtgagtcggatattcctatactttctaaattccagaatttttgtatagttttatttaattcttctttttcttgttgttttacggaagcataattagtttttgttatttctactgttccttttccggaacaaatatcaccaattttagtagaaattcggaaaaatcctgatggtaacgatctgatttttgaatcagataacataaattgccaataatgatcaattcctattagaatatgtggaattcttaatccaattggcattttacttctgccgaaatcaattgttttttgtagatttacgtttattaaatcagttattttgtcaattgtttgtagggtaacggtttcataagacccatctagagttttaatgccaatctgaacaatttggctttcaataattttgggttttgtttcgttgaatgtagaaagtgctaatgtttttttagatattattggaagatttaattttttagcaagttccattgttatataacttttttgcgaaccattgtcgaataaaattattgaatttaattcagtattatcattaatatttataattggtgcttcaattgtcattaatatttcttcaatttcttccttttcaaattgctttgtaattgaaaaagtttgggtttcatataatttttcttcattaattagattagtacgggtttgatttggtctaatttgtttctcattattattttgttttttctttagacaaaggagactattatgtttatttttacaataaaagcatgtatatggtgatttacattctttcacgtgatgtcccttttttaaacaattaaaacataattttaattcgcgccttctgctatttcgtgtttctatgtctggataaattttacaatcttttgatttgtgatttgttttttcgcaaaaattacaaaacaattttatttcatttgatttttggtctgttgttttattataatttatatttaaaactggtttagattgagttgttaatgctgatgttggaaatgagtgattattatttaatggattgttttgaaaatttccattaattcgaaaatttttatattgttttgaataattatttttattaaaatttccattgcgaaattgtggtttattgctataagcattgtgattcattttatcaatttcctcaatattttgaacttcttctcttgcctgcgtatattggtctaagaaattcattaatttttttgtattgaaggtgccaagttgttcacggactttgatccttatattatttggcaattttgtttcaattgattgcttaatttgaggatgatttatatcttctttgtatgtttgaagttgtaaaattattcggtttatggataaaatgaattttcttaaatcagatattgattctgatggctttcgtaaattacgtaattcattatgcaaattttctcttaagagattttcatttccatatctggattttaataattcaattacaattggatagttttgatttgttatgggatatggacttatcattctatatggctcatcatggagcaatcctctcaaatatttaaatttttgaatattttctaattctttatcattatgaattgatgatttataatcatcccaaaaagatgtccaatttgaatatttgccattaaaatgggttaaggattgtgctggtaattttatttttattctatgattatttgaagaaaaatttgaatattcatatgaatttaaatcagatttaatttcggaatcatttgtttgatcagtaccagtttctttttcttctttatcagttaattcttcttctgtgttttgttcatcatttggttcgtcatcatcatcattttcatcttcgtgttgatcccctgaattatttttcttatttctttttaaattttgaatagctttctttacctctaagttaagcgactttaattcatcgataacactatccgcttcttctaaaatttttaaatagtcatgtttttctgtgtaaattttatatatttttatctcagcatttttatcttcagtatttaatttgtttcgtatctttttccattttttatccaattctattaaactatcaaacgttttttcaaaattaaatatttcttttttaataaattcatataattttaaacaaccaggtaaatcattggaatcaaattcatatttcccttgttctatttgttcataatatttttcaattttatttttcaaacttttaaccaaaataggaattcgggttctaatagttccggacattttcgtaagtttttaaattatatactctttgtggactaatgaattaatagggtgtaatactatacttctttcagatcttctccacttttttaataaactttttctttctcttgataaaacttttagaatgaatttgacaaatttcagtcgtttttcagggttagagttgagtgtttctcttacttttaagtaagcttctaaaattacttcctgtgatattctttccaaagaatcggctttatctaggttatctaaaatgcagtatggaaaaatagttattgtcaaagtgaatttatatacggttttgttttggtatgtgaagggttcagtttttaaaatttggttcgttaatttggaaattcctgggtaaatatgcactattggaaagggaaagtttgcccttctttcaagctcggtaacaatttcttcgggtgttaaaaccggaatttctacaataggtacaaattcttcaacttcttcaataatttcttccaattgatcaaaattttcaaaattttcttcttccttttccagttcagaaattagtttctttggccgacacagtttgacgtttatttggaaatttttttttttattaacaatacgatcacagtatcaacaatagtgatcaaaaatcttggtatctgatcgccttcaaataatgtcaaaaaaaatcaatcttttttctccaaattgttcgcactagtggacggttcgtcttctagcgggattttatatgtctttcggaggaatacagctgatttctgttgtccaatcaactaacttgggtgatgagtatggttgtcc

SEQ ID NO: 3541 - DNA, 3484 bp, Heterodera glycines
  unsure (1)..(3484): unsure at all n locations
tgtcaatgcttaagacgcggtgctcgaacagagtatcgttccggactgaaagggaattgacaatcattgaaatgcattgtaattgggttagaatttgcctcgatcttgtgcgaatactcagctcgccctcgcgcacttcgtccgcggaaaccatccgacgcgcgcgcccactccatcggcacgtacccttaagcacgtcaaccaatttgaacaacaaattttcaatgaatttaagggtaaacaaagttgaaaatgtgcgggaaaaataagggcgaaagagacagaagaatgattgtctgcaaattttaaaccattcaaaattagaatgcaaaattcctgtctactgattgaatagtggttacgaaggttgtacggcacgggaccggggacccggctttttctgtccccggacagatgaatacactgagccggggatttttcttgcccggaccggtgtatccccgagatcggttgtggacactggacctatctattgacctcgtttctgctgaccgccgtccccgctgctatttgaggtgtagatgatatgctatgttgttatcatgatgagtcgatgatttataatcatcccaaaaagatgtccaatttgaatatttgccattaaaatgggttaatgattgtgctggtaattttatttttattctatgattatttgaagaaaagtttgaatattcatatgaatttaaatcagatttaatttcggaatcatttgtttgatcagtaccagtttctttttcttctttatcagttaattcttcttctgtgttttgttcatcatttggttcgtcttcatcatcatcattctcatcatcattttcatgttgatcccctgaattatttttcttatttctttttaaattttgaatagctttctttacctctaagttaagcgattttaattcatcgataacactatccgcttcttctaaaatttttaaatagtcatgtttttctgtgtaaattttatatatttttatctcagcatttttatcttcagtatttaatttgtttcgtatctttttccattttttatccaattctgttaaactatcaaacgttttttcaaaattaaatatttcttttttaataaattcatataattttaaacaaccaggtaaatcattggaatcaaattcatatttcccgtgttcgatttgttcataatatttttcaattttatttttcaaacttttgaccaacataggaattcgggttctaatatttccggacattttcgtaaggttttaaattatatactctttgtgaactaaagaattaatagggtgtaatactatacttctgtcagtatttttccacttccttaataaattcttccgttcacttgataaaactttgagaatgaatttgacaaatttcagtcatttttcagggttagagttgagtgtttctcttacttttaagtaagcttctaaaattacttcctggcaaatcctttccaaagaatcggctttgtctagattatttaaaatgcagtatggaaaaatagttacagtcaaagtgaatttatatactgttttgttttggtaggggaagggttcgaattttaaaatttggttcgttactttggaaattcctgggtaaatatgcactattggaaagggaaagtttgcccttctttcaagctcggtaacaatttcttcgggtgttaaaaccggaatttctacaataggtacaaattcttcaacttcttcaataatctcttccaattgatcaaaattttcaaaattttcttcttccttttccagttcagaaattagtttctttggccgacacagtttgacgtttatttggaatttttattaacaatacgatcacagtatcaacaatagtgatcaaaaatcttggtatctgatcgccttcaaataatgtcaaaaaaaaaaatcaatcttttttctccaaattgttcgcactagtggacggttcgtcttctagcgggattttaaatgtctttctgaggaattcagctgttttttgttgtccaatcaaaaaacggtggtgatgtgtaaggttgtcctgcagtttattcacaatgattaatgctttgtcctttccagcgcgactgttgtatgaaggactgttgatggcttttgccaactcggtgagtagtcccttgttgaaattttcagctttgatagcctttcccacggcttcaaaaatattttgcgtttgtttggtaacagagtttatacgcttttgttctgctctctcacaatcggccacggcacgattgtagatatcgtcgtgtgttgattcaagagagttgagttcttccaaaaatttgttgttaatttctggagagaaattcgaatggaagttcaaattgtcagtggcttcgtcctgctcaggaatttgacttgctttctgtaaagctcgtgaataactaataaggtcagtgttcctgttgaaattgattgttgcttgaacttctcttattacttttgacaattcttttgcctgtacgattgcttcttgttgtctgagtttttgtaagacaaattgagtctcctttgacaaggatgatgtgtctacaaaattaaaatttattcagaatcagaagtgtctgaacgtttgaacaattcagaatgctcaaaaattttggtaaagtaaactctggcctcttttctttcagatacagaaatgctactgggatgttttgcttttttcaacaaaaattctggttttttaccagttttcggtttttgaccttcttctgattttccttccttctgttgtgctggtttttgctcaggtttggactgtttcgtgtccgtgtcgggttttggctcttcagttgattttcttttcactaaaatattcgtattttagtgtttttttttttttttttgtggtttttgttttggttgtctgatttaaaactcagcgcttaaatctgacttttggttgaagcaccgcagctgtcagaagaaggtttttcagatgattttgcaatgagtttttgtagaacagatgaccggctttttgaacttttgatcgctgatcagtcttttgttattgttggtggtgttgtcgtttgccttcccgggtcgtggcaccaaaattgatgggatgcactggttgatccaatcaattaatttaatattttatttgggatggggcgacaaaggacacaatgtggaaaatttggtagatttctgatcacaattgatcaatatccgcgatgcttcgaatgcccgagttgtgatgtattcagagcgagttgttgtccggcttgttgagtgaagagaaccgataggctaacagagtgaattggttgaagcatgcttaaactgaaaacccttcccctttttataccaaaattttttggttatttaatagcattcaaaatttccacattatctttttatggttttttcatttctaaattattttttatcgttttagttttttcttcccttttatttaagaaaggacccntgcaggc

SEQ ID NO: 3542 - DNA, 1311 bp, Heterodera glycines
  unsure (1)..(1311): unsure at all n locations
gaaagcggaaaaagaaagaaaggaacgacggatttaaacttnttcattatttattttgtgtatttcaaagtgattgatgattttgaatgttcggaaaattattgtttttcattctttgtgccggttttatgcatgtattgggcaaaatgacagaatctgtgttcatccccccccccctggtgagaagtctcttttgggacagttcaaaatacagtaggtgctgaataacaaaagttagaaaccaaaaatcactgtcatttgctcaattcggcattgattgtgagttctatcagacagtcccagtcggaaacaattaaacaattagcctctaataggagaaaaaaatttggcatgcctattaacatatgtaggaaggcttatttggtgcagtgataaaatagagaaaggatccaacgacaaatgccccatagagacaaataacccacagacgaagcaggacagctgtaaaaattttaaatttatttggcaaaacgtctcataataaatccaataaattattttgggataaataatcaaaaaaatttgttctgaaattctaaatggcttcagcaaccggcggaaaagtcactttcaaaattactttgacaagtgatccaaaattgccgttcaaagtgtgagtgaaaagtataacaatgcaattcggccaactttgcttacgtttgtctgttcagactgagtgtccccgaaaatgctccgttcactgccgttttaaaattcgccgctgaggaattccgagtcgacccatccacaagtgccataataaccgacgaaggtgatttctttcagaaagtcaaatccacatttatccagctcgggataaaattgaaaaaccagccgaattcgaattagcgactgattgaaacataaaatcaaaagcaaaatcgcattttcattatttttaggcgttggagttaatcctgcgcagaaagcatcggacattttcatgaagtacggctcggaattgcgactgattccgagagacagagttggccaaggcgaatgaaagaggaaatgggtctaccgacacacgcggacatatcatttggcaaaaagggaaactgacaggaccgtctattgagactattgtgattgtttctttgttattttttggtagctaattattcggagaggctgggaattttaaaatatgtttaaattcgttaaggaaattgagattccgcttctaaaactcacataaagcaataaattttcaaaaccataaaattcatcaatcaaaagacaattttcgattcaaaaagtcggggtcataactagggcatccaaaatatg

SEQ ID NO: 3543 - DNA, 3007 bp, Heterodera glycines
ccggaatttcaatccttgggcctgtttgaattttttgataaagcaatatagtaaaccatcggatataccatcagtttgtcttgcaccgccttccagtcgacaccttcgggaacgcgtacggtggtgagacatggcaaacgattattcttgacaatttttttcggatatatagcaaaacaattaactgccttaattacctctttttggacaaacaattccagtcccaattggtcaaacgcgtcatacaaaagttttgcattgattttgtgtcggtttaccatgtgcccaattccttcctgggcaactgctgaaagaccttcgcgtagcgcataaaccaacgaaatgggcgccgtgtgatggtatctataaattgaatggtttattaaacgtcctcaaattttccgttttttgtttgcattttgcaataaaaattgcaaccttctcggctcgtcgaaacagccccaataattgcccaactctaacgcgtcgaaataaaatgagggcactcgcgttttccgcttcgttattttctccctgaattaaactttttttccttaatatgactaatttttacagtgctttttcgctgaatgaaatgggagccaacccgggcgggcagtttaacactttttgagttgcggcatacacacaatcaacctttcaaatataaaaatgcaagaaaattcgaaaaaagggagaaactttcagcgcatcggcatggaaaggggcaccacaaatggaggcgacggtgtccacgaggaaaagaacgtcactaagggggacagattggaaagtgtggatacacgtaaatggttttagagatttgatagtttgacatgaaattacttactatgcattgcaaatatcgccaaaacgctccaagggatggacgactccggtcgaactttcaccatgacaaacgaatgccacttggggacggtagttatccacagcctaagggaaaggcagcataattcatctgcagatttttaaattcctacgaacctcggcaaaatcgtccaattaatcacttctccctccggtacgaccaatcgatgcactttaatgccaagtctctccgccaaattcgctgcccgcaagccccacactccgttttgcaccaccaaaatggtctggcctggctccagcagattcaaaatggcacattccatcccggcatggccagtgcccgaaacagcgaaggacagcgcattctcagtttgaaaaatgtatttgatgccggatttcacatcatccataatctgaaagaaaagcgattgattgtaagaaatcaaatgagtcacattcgaataactcgggatgcatatgtccgagcaacggatgaacgagtccctcctggacgagtgctggcatgatactgggaccaggtccgaacaattttttttcgttgatatgcaacgaacgcataagccgatgaggaggcgcaactgtggcagtgaaagctgagctggacattcactaataggggaaaatctggtaattaacaaaacggtgaaatcaaaaaaaaaaaaataaattgtattttcgaagcaaatataaatttatttgaataaataaatattaattacgttatttattatttgctaatttgaattaaatcggcgcaagtagtttgggattgaatttgaattataatacataaaaggtattaactgtgataaaggaaatgtaatgaaatacaatatatactagagattataaaacacaaaatttgataagaaatgagttaggagaatcaattaaaaagggacgccgaattggcgagtgactgaccccacggagaagaccaacgaaagtcgcgcctttcctcaacaattttttgtttgattcacacatccgagggacggcaacagccgaggacaacattcgactgagcatttttgagtgggacaaaaaggacggacaaaataattaacctgcaaaatatacataacatccacaaaattcgatttagaaacaaatattgtacattcattcgaatgagaaattgcgtaaatattaatgtgaatttatttgttgtgtggaaaaggggaaagacgaatgaatgaataatgcaatgaatgaatagcagcaaaatggcctggtcctctctttctgtgcatatgtacaaataagtaaataacacagctagcaaaaattaaataaatgcgactggtggctgagaaaatgactagaacattgtgagctgacactgagaatatgactggaacttatttataatggatgagttggaagggaagggatgatgaaatggatgaaaggaatggagtagcagagggaggggtggaggaggacattcccacgacgacacaacgattacccgcccccccccccattcccctctccttcctgtacataaattattcttgttccctgttcagttgcatcaccccatcaaaattaattagataaataggagagttaagtgtttactttttaagaacgattgatctgtgagtttggttgaacgagtggttaggaaaatgcgaataacgtttgattgattaccgtatattctctaattatagcccagtctctattaatcccgcagtctccaattatcccccagtctacgaggtgttttgaaaaataatccctatatcataatcccccagtctctaattatccccccttttctgaggaggttgaaaaataatccccatgggctataattagacatatacggtaatcaaattaacataggtgtacgtacatgcatttaggggctttttcataattaaaattacctaaataaaaagatgaaaagagcaaattattaaaggacagatgcagggaagattggtcgaactcaaaaattaggccgaaaaaaagaacttataatacatacagtatacatagagtaaccgaccggttgtgttgggagtgtttgcactttagtgtcacttccattcgcaactttcgtgtcactccacccgtagctggggctgtccctctcagtgcactttcactgttatttagcacaaaa

SEQ ID NO: 3544 - DNA, 1366 bp, Heterodera glycines
  unsure (1)..(1366): unsure at all n locations
attggtgggacgttaagcgatntaaaaggaatgaagccatatttgctaaggccaacagaatactcacccgtcttcgtgttggggatgttgagcgagtgtgtcgtccgggtccggctcaggagggccaagacgatcaagcagttcagtgacattagcacgacgggccgggtctagctcaagacagcgctcaatgaactgcttctgctcgggctggtccaacgagttgagcgccttgtgcaccatctcctgggtgaccacgtgagagcatactgaaatagaagggaaattttatctgctaataatgcgcattaaaattacaagttttcccggcaccgccggctcgccttattctcaaattttttttttgaaaatgtgaatgctatttgttacgaaaattgactataaaattcaacaatgtacccataaaatttttaaattttcattaggggggattcaaaaattttttcatatttgctggaaaatttttaaaaattttaatttcgtggcaaagcaaatcgaccatgctgtgggagcagctcgttcccccccccaccccgaaaatttttttaaaaagatttactaacttgtaatttttcaagaaaaattcttagaaagttttttataagaaaattctaagaaaaattttcagctattttttcttgaaaaatttctatgttagtaaatttaaaaaaaactttctcgcagtggggggaaacgatgtgggggggggggggggaagcgattagttatccatggtgaacatgacccaagagtgcataaaaaaataatgtacaccgtaccgggtccgaacctgccgccccccccccctcctcataagggtgcctcagaatccccaatcacacagggattctgaggccttaaccatgtcgaaagtaaaatctgattacgtattcgtgatcagggggccaaataacccctaaagacatattttttgaagatttttggtgaaaaaatttttcaactcaaaaatcctatgctcacccctttggtccataatcccaaaatcggttttatttttgtaacaattcgtaagaaagtgataaaaatgtaaaataaaatttatattataaagaaaaaaattgcggatttttgtagtattttaagtttcaaaaatttcttttcagaaggcggttatgaatttttttctgagaaatcgaaaattttcagaaattctggaataacttgttttctttttaagatagaaatcccaaataaatcccataaaattctcctgatttttctctatttttataatataattgcacgaaaattgatccacccttcgatttgttatgaattttcaaatattaggccaaaatcccgagggccaaaaaattgccaaaaa

SEQ ID NO: 3545 - DNA, 5670 bp, Heterodera glycines
gtaatgatgtcacagctgatgcagtcgcggttggccagttgctgaccgtcgcctgcagtgtaccggtcgaggctgcggatgccagggaacaaccggtgccatttggtggttcattttcggtcaccgctcctctgtcccgatcggttgaaggcaaaggcacagccgtcgcatgaagcggaagcgacgcgaaagaggcggcggagggtggggcgacgctggcggacgatgccatgctggacggaggagcaccgttgaaacagccactttgcagtgcacccgtggtggccatctgcaaaggggtggaatgtgtccgagttggcaacaagaatgcaaaaaaaaacgcgtccaatgttgagggggggggggggggggaattgaacaaacatgctaaaatttcggctcgacagacgttaccagaattttttaaaatatttttttcgtccggaataatttttttctgcaacttcctcccccatcccattgatgaagaaatagcaagtgttaattaaaaataaaaaaacctcaagagcgcagactccgaacgaataaatgtccgcctgaattgtcgtctccgtttggtctaaatggaaaaaaatcaattcattatttcgggtaataaaaccttttaaattaaaaaaaaatcgcattgacaaataccaagtgggggggggggggggcggagaaaattcgaaaaagtaacaaaataaaaatttactaataacattagtgtaatcctgttccccatgtaaagcacttcaaaaacataacaaacacttacggtcgtattcaggcgccagataatgaacatttttgatgttctcacggaatgtcttcacatggtggtgaatggtttttggcgcgactaaaaattgatgggaaagtgtgctaagaacgtccatatggaacatgggcattgtaattcattgggtttataagaaattctaagggaaaaaaacttttcgaaaaatttgggtaaggacccggtttttctgtgactgaataggcatttaccgcatccaattttgaccagtccgttctgttggatgaacacggaattgcacgtgaggttggcgtgcacaatgggcgggtcgcacgagtgcaagtaggacagtgcggtcaaaatttgacgcgtccaactcttccacgcctaaaaattcaggaagataaatttcaagggggctttgatcactctattacattatatcaaccaaaatcccgaaccttaaaaaaaatttccgaatttcgcaattatgtccaaatccggttaaatacaaagaaaaaaagaaccgcttgaatcaaaaaactcaacacaatctcttgctttaattgttttttaagaagctttttcttttcattaaaaaactcatttctcccactttttctttgaccaaaaataaatggtaaaattagatggattggaatttcggtacgttttcactttacgccacataaaaaaaaatatttttatttttctgggattttcggggtcgctgatcacgaatatggcattcatttcgaacaatttcgaaatccggacccaaattcgaacaaaaaatctaaaatttaatttttcgaatttcgtctaaaaatggtttaatgatcttttattgcatgagtggatagctttcagtttgtttccatgtgtttaaatcgtttttagatgaaaaagataaattggataattaaatttttgattttttgttcgagtatgggtccggatttcggaattgttcgaaataaacgtcatattcatgatcagcgaccccgaaaactccagaaaaaaaattaaaaattattttatgtggcgtaaagtgaaaaagtaccgattttcctggacaaaattttagaatttattatttcaagtgaccgatattttttcaagttttcaaaaaatgattaaatatatttaaaaacaaattattattgtaaattagatatttttagatgttcccaagcaattaattgaatttttcaaacatttttttgatttttaaaatgagtttaaaaaaatccaggtccaggcctggatccaggtctcgaagagcctggattttcctggatttttgtccaggaaatccaggtccaggtccaacatggaatccaggtccaggtccaggcttttttcaaaataccgagctctaattgccacttctccatttttacacctattttggattttttataacttaaaaataatatcataatatccctagtcatatgtttagcatcaattacaaaactatttttgtgggcctaaaatcctaaataattcattctgttctaacttttattgctgatcaaaaaaaaacttatccaacttgatcagatgatccacttcctcatagtgaaacactcctattatggatgaattgagtataaaagagttgcgtaagatgagttgggtctactccatacatacgccaaacaccttcattattgcctttaattttgcaatagtttaggataatttaatttgcttttttctcttccatatattcacaaactcccaaaatggaattctggggaaaaaagaatcaagaaaatggcattatgagaccggctctgatcgtttcgtcctttcctaacgactttggaatggaaattgccaatgttgtttatgttgctcctgacgaggttgcataataataatagaccgactttaaattaaacatttccatccttttgtttttagatcctttaccctgtccctcgttcgttgtacactttggatccgcttcagcatgcgtacatgtcaaaatctcagtgcaataagatgaccactgttcagtcagaagactccgttgtcactgtccaagttgattcgaaagcgtcgaaagtcacttgtatgatgaagggcgggactggcttatttggactggataagcgcgggtcggattggatggtaagcggtgacaattcgtcgtaatacacttaaaataaattccgtttcgcagatggatgtcgatgtggccgtctccgatgagcaacctcgtcaagtctttgtttgttctccttttttgccgggcactctgatgaagactttgatcaacttaaacgacgtaagtgggcagtaaatatttttgtttaatttacctacaaaatgtctccgttttaagtacttgccaaacaaaccatatagaggcactgtcaaattaaatgtttttcatggaactattgcaagctgggcttctaagggaatctgcagttttgtttggtggcaaaagcagttcaaagaggcagacaggtacacagtcatatatgaaagccttttgagctaaagatattcatggtagcctcaagtttgacttaggaaagagacccaacgatggatccccggcggaactgtcactatttaatgttttctcctagggcttgtttcgagttttctctcacaaacatttacgaaaccgatgagccgaacattgccgttgtatatgaagcggtaatatattttatatactaactacaaaaaaggagaaagcttttagtcatggcaaagtgtaaagcgttcaattgtccttactcccgcgcaagttggcgatgttccagatgacgaattgaatttattgctgccggtgggacatgtccatcccattgataactgtcaagtaattctattttcttttacaaataaccaatcctttttaagtcgaaacaagggccgtgtgtgaaaaagtttattgaaaatattggcaatcaacagggaaaacagccgggctccatcgttacttgcgttgtcagtgaaagcaatgggtcggacaaacaacagaaacagaaagattccgtgatggcttgtcatttgactgatgactccctcagaccagtttctgagattctttcggctggatcctttaagcagatcatgaaggttgtcaacggggattccggtcaaaatgcgtagatgaaaaaggttaggaaatttgtatacctcttacagttagctatttctctcaataagtcattttctgttttaaacaaattattcaggtatccacagtgaaattggatgggaaggatggaagagattacactgattcgccttttattattatataaccttttgccattttattggttgaaacacattcacacaaaatacaacaattggaaagtgaaatgaaaagcaccatggcaaattaaattttccaaattcaataatataccaattaaatgccaaatccctcatgtttgctgtgactttttataggtttccatctaaaaacataaattcgtgtcctctggtttgggtttgctatttattgctcgacctgttcgttgtaacggacccttcccacggcagcgcacaatttccagtgttccttttcctctgctggcaattctcgccactcttttgcgctgcgtttacggccatccgtgttccacagcatatacgaattcaactgacaaaaacattggttgttcctttgttttattcctgtcatttctcaccggtctctttggtggtttcgtccctttgtctctcttccttttcctccccctcgtctcagttttgctggttccattcgccaattgacgcaatactccaccaaatgcgtgcacagcttctgatgagaatagattttcaatgtgcagatggattgacgaagacgcagaggggtgggtggaagaggagggaggggcttttgacttttggttagggtcggtgttctcatccacaaccgtctgagtgctctattaatactggcttaacattagaaagaaaccttttcttgtcaattaccatatcgataagtttcttttgttccggcgcttgcgtatgagaaaatgtcaaacgtcgatgtgtcttgggaagaaaatttgctgctttggctaaagcagttgagcaaactgacggaggacgtcgacaaatcggggtcaacaacaaaggaagctaaacgacaattgaaaagaagtgaccgccaatgaatccttaaattaatttgggtatctctcctcaccttcgtttgaaccattctttattgggcgattcgtgttagtaacggacgaacaattcaaatcgactgagaaaggcgaggagctgcgacagttccaatcatcgaaggccttaactccgatgaattttccgattgtagcgcaaaaattattcatagagtccggagatgagaaacggacgcgaaacttcacagaaacatttccatcattctaaaattatagaaagggaatcaatttcaatattattctgacctggtctttgatgcagaacaaaattcgctggtctctgcgcaccaaatcatggggaaaagcgagcggatgaagcaaaaacatttctaattggtttccgttatggtaaacgaagagcattttgatagggtaatccaattgtaaaaataactgctcaaaaggacccctttcgatcgtctaaaaatggtcaaatgaaacattcaacgcactaattggacaaccatttaccaattgcatattacgtgtgtctgccaatcgactgtacttgtccaaagtccactgcattaatgatgcactaacgcaaaatttttccttttgtaaaattactaaaattataataaaaagtgttctgcattaaaatttttcgattctgatgtcattatcagtcactagaaatcactattttggcgactccgtcactaaaatagtagttaaaaatcactattttggcgtcgtcactatttttca

SEQ ID NO: 3546 - DNA, 6692 bp, Heterodera glycines
  unsure (1)..(6692): unsure at all n locations
tgacgcggctttcaatgttgtcagcgcggcaataccggatgcgtntagaaacgcaacggtagtgctgctggccgggcttcagtcggtgattggcccgcaaccgccacctgtttgaatcggcgaacaacggcgaaattttgacagacgcctcngagttgttctcgctcggctccgccagggatgaccggtgccagctgtttccagtcgccaccaatgatgacaacctattgcaaaaaattcaaacgttgaaaaagcaatgatcaaatttagccaccttcccagcaaaaggcaagtccttgaactgttgcgtggcaacagaacgcagaagccggtcgacaaactcgaggacatccctgtgctgcatgctgatctcgtcgatcaggatgccgtggatgttgcggagcatgttggcaaagttgctctcgttgtcaacattgggcgaagttgacgaatcaacttgcttaagccggcaaagccgcttgtgcacagtctggccctcgtacagcagttcggcagcaatgccggtcgacgccatgggcaggaagttgatgccagcggacttggcgcgagcaatgatcttctacaaagaaaaaggaatttatgtggaaaaataaggaagtgatctcacattatacgtgaacgttttgcccgcgccaccttcaccggtgaccatgaagagacgctggatgtctggcgaaaagtctgggcattgtccatcgatgacttgttggacgtgctccagcgcagtttgcacagcatcaatcagctgttgttgctcttcattgggcttgggaccggagatgtacttttgaaggtagtcttggcgcatttcaccgcgtcgttgaccgtccggaaggaagtccacatgaagatgctcgttaagcgcatcatcacggaagaaggcgagctaataaaggcatatggttttcacataattggtaacagttgcagtaccttcatgaaaatgtccttggtgagcacaaggccctgaggacgtggcagaccaatgtgttcgcaagcggactcataggtgccatcctccctcggctccgagtcgggcgttatgccattggcgagcaggaaccattccatggcattgaggacgtactgcttctgctcttcggccgaggctctcgcaacgcttgtgtttaccagccacttgtccgcatttgcaagaaccttgtccaaaattgtgcaaggactggcgaggttcgctgtcgcaaagaagactgcaagccatcgaatgcgctgccggatggacttcttcattctgaaggcgtcatcgatggtcttcatccagaggtcttcgtcagtgaggagtccacgttcttgcgcagcttcaacaaaggtcgggaacacgttgccgttgacggtgcgcaatgactcccatccctttgggtcaagcacaaccaacagaagcagtcgaattgcctataatagaaaaaaaaagatcaaattgttaatgtgcttggcgttctaccaagagttcgcggttgctgggcgaaacggtcttgagccggcagaactttggcactggcgcatcaacatacagcttccactgcttcttggctctgtcatagcgcaacttcttgtagcagttggcatacgaaaggccaattggcgggttcgcttcgttgaacgcgaagtatgcggtcagctgagtgacgcgctcttcgcccctcagccttcgctcttcttcggcctgggccgcctcgcaaatggcgttcaaattctcctcttcatcgtcaaagccctgctcaacggcaatccggtgcccgctcggaccgtgcacgtccaattcgtccacctaaaggagcaatcccataacatgtgggtgtaataagcaaactccgtacctcatgagagcgtcccacaagctttgtgccccaaagcgagaggatcgcttccatggaggtgatgtagcgggcaagacgaatctggtgaaactcgtcgtagtccaccttctgtcggacgtcgggtccgccttggacttggatgaacgccatgtcggcgcccttcatcacgtacttgcacagatattttgtgcagccttctccagccacaaactcggtgttgatactaaatgaaggtgaaaaagtaaaaagattcaaccaaaatttgatttactaactgagctttgtatttggaagtgaggaaggggttgaaggggactacgtaacggttgtcaacccgaatcgtcttgccgcttttgtccgtgtactggaagtcgcgtccatattgctctgggtgtcgagctgctgccctggcgtcaggggcaggaggacgtcgccggtaccgcgggtaagcgtgttcgttgtagacattgtcgtacgagaatggcttctaaattgatatgcttgacaaccataaaagtgaagtaaaatattgactaaccggaaaacgtttgaggcactttccgtcaaccaaacatcttcgagctgagcacgtgtggatgtgcttcatcctcagtgttttgtaaagctctcgcttgagcaacacttcggatgagcggcccgaggggttgtccgggatttctgcagagatgtactgctcgatatagtcttctggcgtgttgatggtgccgccacttcggattctgtcccagtccaaaatcagtgcgaaatggacatgcgggaggccactaaaaatgactcataaatattcaaaaccaaaggactcagtttaccgtttctgatgctccaatgagtagaaccagccacggacgggccccatgacctccttgacggtaaggtcatgacgcagctctttgaatttgtcgacaaagagacgacaaatcacatccggacggtcgtaccactgctggcggtggccatctgggtcagttggcagcatctcttccagttcatcacattcgggatccatcgtcagagtgatcaaaaggtccggctttccaacttctctgcagatggtcatgcagttggcgtactcgcgctggtagtactgccgggacccgcggaagtgctcgtcggtcatgtagactcggccaatgtcgcccttgtaccctaaatagcagctatttgattattaaactcgaaatgtttgccctacctttgttgtccctgagagcgcttagccagttgatgattgagcctggaaggacaagacgtcgtcttccctgcagctgcttcatgtactggactttttgggcctccattcggttgttgaacgtgatggtgtagagctgggccagagtgcgccagtcccacagccagtgtccatctcgccagttggcgtgcgggcctctgatgtgagccatgtagcggaaccactgcgatcgcgaggtgttgtcgcggcgatggaactgctgctagagttcagagccgaggaactcctcctcttcgccaaggtcttcggcggcatcaagcaggacgttgttgtttttgtccctgatttgcttgtacgttgagtcgaaacgttcgtgctcccgcaacgccaatttagttccatattctataaaggaaaattgcaccaatgcttaaccgttacaaaaaatactctaccgtatccaaattgttcgaaggaaaaaatcagtgggaaatttgcaggatcaatgttcctgttccaccacttcatgtacacgattttggtgcgttctcggcccgtgagcaccacgtcgtacacgctcggcggcatgatattcgcaccgcagtccaaaaaaatctagaaaaattgggaactgtttatatgatgaaatcaagcgccgaagcttacttgagccagaaggcgacttccagcctccgtttctgcctcaagccgtccaggatggatgtgcttgaggttggcccggtcatcaacatgcaaattgtccggtgccggcgcatcatttgcattcaatttgcgctctgtgccccgctggttagtatccaccaatagcattcgaaactgcactcggtcttcttccggcagctgacggtacgtctccgctgccgtctcgtaaaccacagcaagcttgtggtttgcgagaatgacgctgtaaagggcctccatcagttcttcctgaagtagtataaaaataaaaccaatatttttgaagcataaattaatcttacgtccagtgaatgttcccgagaaatttcacccaggcgagtacgtgcatcggctggaggaatcgtgaacagttgtccgtgcagatggggtttgccaccatcgggtgggttgaaatcccacaacatgtagtttatcatgttgttgcacttcacgatccgatggtggtcgatgcgctcttcgcttcgggtgatcttgatgtttccgaatgccaagttgttgttgtatcttagcacgttgcgaaagagcgaatccctccagcctttgtattgtcccgccgggttttggagtatgttgtccaattcggctggccgagcacgaagcgctttgtagcggtccgccaagttgacacgtccttttgcgcagcactttgaataggcggttggtccaatcgcttcggaaggcaaaagcaaagcattgcagtgagggcaattgtgttgtgcctataaagaaagaacatgactactgaattcatatttggaactgacttggtcccgaagcgagttgtaatatgaaggcagatggtttgcctttttcgaaccgcagccatatccaaagtgagcggaccgaatggttccgcaacagtgcgtcactggagcaatgggcttcggcgccacaggactgggccgattgcttgcgatggacgcttgtcggctgatccgtgtgctgcggcgaggagccaacgatggtggtggcataagatgcgagtccgtcagcgcttgggattcattggcggaaacatccgaagccgcggccgtcgtcgtgtcaacagtagatggaatggactctgtaggagacgcagccttggcatttttcagcgggcgtgcaccaatgatgcctcttggctttggaactgcacgcaacggagcagcattttcgacaccacaaatttgactaaaatacaaatgcaaatactagtgaaagaaatgtatgagtcgtcgcttactggtaatgcatgtcctgaaggccttgccacggctttgtgcactttgctgggcagctctgcttcggtgcgggcgaatacctaatttgccaaaaggaaatggggtaaaaatccgaaatgattaaacactaccagcattcgaagtgagtgtaagagtcacagcaaggcaggaacaccttgctctgacgaagcccatttgcctgcagcttgaacagccgctgacacaaaatgcagaagccagggtgttgcgtgccgcaatctgggcattttccaccacttgctttgagcctataataaaacaaaaataacaaatttgcattatgaaagagcacctcgcttccaattcatccgcgtgataaactggtgcagatgcgtccgtgcaataacagccggtttcataaatgcccatgccaattttttgccgacagtcaccgcatttaagaaatgtggtctttttgcaccaacgaaatttgcatttcttattcggcacatcggtatacctatgaatcgtttaatttaataaaagtaatagtttaagtaccattcggcaaagggctggtcaaagtggcacgaatgtccgcaattcaacattgcatagccatcagcatcgttcaaaggaattgtgcaaaaaacacatttgttcgacttctgtattcttctggtacttctcgattgtttcgatgatggagtgtctataatgtgggaataaagataagtgaatattggttacacttttaccgaagccctcatccagttccttcagtcgtacagcagcacttgtaagctcgctgtcgccagttggatcaccagcagcttccagttcctgcggcgcttgcagtggttcttccgactgagccgattgcgctggcgacacgctttcacgggctgacgaactgcgttccgatgttcctaatgaggtaaacagaaaatatagcttgaaagcggacaaataaaaaactcacttccgcattggttcaatatgatctgtccgagtccaaaattcttccaccatcgaccataagcttgcggtgaaacagcactcttgccaaagcgttgcttcagggctttgaatgcttcttgtttttgctctggacttcttttgaagaagtccaggaggaatgcatgttgttcttcgttcctcgttggagttcgtaacggctcgctttcaccagttgggtcgcctgcagcttgcaactcctgcggcgtttggtgttgtttttccagcggaaccgcctgggctggagacacactttctcgaccggactgggtgcgttcggatggtcctattgaataaatagtgttttatcatgaatccgacagtatataacaaactcacttccgcgttggctcaaagtaatcttgccgcgacgaaaattgtcccaccatcgaccgtaggtctgtggcgaaacaacattcttgaaccgctgcttcaacgcttggaaagcttcctgtttttccgttggacttctttggaagcagtccagaagaaaggcgtgctgctcttcgttccccgttggagtagcgcttcggctcgattcacggccgccgcctcgctgtcgtttaggaacagcttcggcagtagtcagcgcacttcggtcagctttaattgagcccgttacgcctttgctgatgatgaaatcggcaaaaggaaaggagcgagccgtcgcactaagaggctttttcg

SEQ ID NO: 3547 - DNA, 2198 bp, Heterodera glycines
atgatgaaatcggcaagggtaaaggagcgagccgtctccccccgtggctttttcgtagcttcttttagcgtgcgggctgcttctgcataggtcttctgcagaatcggcagctttggtgcgttgggcgttgtcgtgatgttgttacgacgcgagcccgtcccgacgaataagcgccaattcggctcctcactgaggcgtggagcttcaaaacgcagcttattcgcaatgccgggtgcactggcgaccacagcacgtggcttgctcggaagcggcttcgttaactaaaacagaaaaagctatttgcaaaaagaaagaatgatgattacagcttgagcgtagctcatcgatgacgacttcaaagcgggagcagaagacgcaaccgcggaagtcgttgctttgatgtactgttgaagcacataaaagcacgggacgacgaagctgaccgaagaggagttccacacagttcttctgtggcggacggttggcggcactttcttcaccacgtcgggcattttcctggccttctccatggccgattttgggatggccttaaagtgaaaaaaattcagtaacgataattgatttaaaaaacacagaacacacctttcccacaacgacgaacatttcctcgctcggttcgcggagtaccggtttcggcacagcgttcaaaacaggacggttttgaagcgctggcttttcggctcgagcaattggcgcgtagccgatcggcacgcgtggcttgtcgatcttcgacagctccaaaagcttgcttgacgcgacagcctgaaaataataggcaaaaaaataaaggattgcaattcgcactcagttcaccttgcccttaacgatcgtatggtacacgtttttgggacgcggcatgtcagttggcaacttgcgaagcggagccaccggcaactgtttcgcaacctaaaaaaggaaccaatattttgaaaaaagaaaatgactgaatgtaccggagccagtcccggaatcggccggccatcattgttgcagagccaaggctggcgcttgtcagtcaccacctttggaagcttctgcttcttcggcttacgcctaaaaatgcgggttaaggaaagaattttgtgaaaaagaaggttttgcacacactcacagttcagcgatagccggctcagcaacgggcgatttttcctcacagcccgggatggtgacgcccgtccaaccatcctcctctgccaccggccacggctttggcacctggacggcgatgccgacgccacgagagtgggccaagttgtctttggcaccagcggcaaacttcttcatctccttaatcaggtgacgaaggcgggccaatgcgcacgtgtcgatgtgctctgacatggcgcccatgaatgccgcacaagtggcacagtcctcgctccaatctcgaccctaaatttgagaataatttaagaaaatgttgtttaattactgactacaaacataaggcaatcggctttttgaaaatccccaagtcgatgtccttggggagattcggcggggcgaggatgtccttcggccggtacgagcggaccggagacgcagcaacacgaacgccagttggagttggcgaacgtgggcgggcaaggcgccgtgcgggcccaatgaagccggttgccgagaccggggccgggacaaatttggctgtaaaaaggtatatttgagattatttacacaagaaatgctgctgacctttcttcgatggcttgccaaccgtcaaacggcaagtcgaagaaggcgagagagagagagagaggggggcgggattagctctaaagagagctgtttgggataaggaaggtcgtggcgaaagtcgggatagggggtggggctggggaatgatggggagggaaaggggagaaagggagcccgaaggcattgggtcagacgggacaaatgggggagggacaatggaaaacaaatgaaaaataaatgaaaaacaagagaaaatgaagaacaagtctgaaaaatggggatgttattagttgggaaaaatggcgtagacacagcttaccaataagtaaagctgagaacaatataaatgaacgtgagaagaaagctgtccaaaatgggaaaattaattatgcaaataaatacgcaaaatacctggctaaaaagggaaaaaattattaataaatatattgtgaaaaataatgaaatggttaaacgacaaaata

SEQ ID NO: 3548 - DNA, 1598 bp, Heterodera glycines
ccatcgcatacaatgaattctaatgggacgatggcccaatctaacaatcagcagcagaaggcgccactgagcagtgcgcctccgcctccaccgcctccgccggacttcaaaaacttattggctggcaaacaacaacaggcaacctttgccgacaaacttagggatgtcaaactccgaaagtgttctgcaggtcccttgatttagcttagcacctcccgcccccaccttcgcctttttaggaaacggtgtccagaaacgtaccgtctcgccatcaaatagtgttggctcttctaacgggagtgggtctgtctcgtctaaattccaaagccaagatttgatcagcgaactgtccgatcgactaagcaagcggaaaatgactgtggaagcttcgtcaagtcggataagttatttgatttttaaaattgccaatttagatgcaaatggcaccccaaatcaaccgaattcacagactcttcccgtgaacaatgcgaaaggctctcaatcagcgattcctcctttcggaaagtcgctttttggaaatcagcatttaattgataaaaaaaaacactcattcttagaatcggcttcgttgttgcatcgtacggagagacaccggcgacagcgggcgcagcctccgctgctcaagactcacaattaacttgcgaaacggtggtgaaaggcccaacacaattaacttgcgaaccgatggtgaaaggcccaacttcatcagctcataatgacattgccaattccgaggctcgaccaaaggcgacgactacgagcagcgatttcgagcggatgaaaggcgaactcctggaactgttctcgaacgaactgcagaacctcaagcgggaacttgcgcaaacaatccgagacgaagtggccaaattgtcagccgatcggagatgactcaacttgttcagaatatgtctctgttgtacattgtcttcctttttaatgtgcagtcactacgcaaacccagattttggtaaaacttatctttgtgattcattttaaaaatcatgcaagggcatctactgtatcgcttaggcaattgcattacatgtgtaaaactttttaatttcatttgggacgcataaaatgcgatcggacgcgtaaaaccgattagaaccgcaatttgtttaagaagctatggtccaaaaattaatcacgcgaccttttgtcgattgttcccgaaatgtatctttattcaaaggactaatttttaatgagaatattaatcatcatcatccaattgaataacaatatcattgttccgacgaatttctctttcttttatcatttctggagaagaaaattgtccgatggagagttcacgtccttccgtaatcaacacagttcctccaatcctattgatctaaatggcgactgtgtacagtaataaaagacaaagggaggctatttgtttatctgaatacctacagagtgggtatcaaacaaattcatggcaattgtgaagataattggtcccgaaattttttaatttaatttttttatcttaaaattttttaacacttttctatgggtgttttgaggcgctgagcacgattccggcctccagttcgacggattccgaa

SEQ ID NO: 3549 - DNA, 4026 bp, Heterodera glycines
ataattttgaattttcgattttttgatcgagttcggcttcaatgttcgaaattggtaaaatgaatggcagattcgtgcttagaaactccgaaaacactaagaaccatgttttaaaagaaatttatacaaattttaaaatttaattctcgaaaaatgttcgggttagggattcggaattggtcgaaatggaggccggattcgtgctcagcgcctcaaaacacccctagaaaattgttaaaaaaatttaagataaaaaaaattaaattaaaaaatttcgggaccaatgatcttcacaattgcccaaattcattcggcttatgtgaaattcgaacagttcagtaattaatatatgaaaaatcggcctttccaagacttattttaaattttttattctaatattgtgttctcgcgattattaccctgttaaccgatggaaaaaagttctggaaaattggagtttcgccattatttggttgctgaatgaaatcacattgcaaattgtctttggttgtcagttcagtcgaacatttattctttgaattgtccggtgtgtgcagagcttaatttcgagtttaaaaagattgagattttttcttcacttacggttaaatggaatgacattcggcgagtgatttgtgcatttggtgggaaaaattttctgcccgattgatgtagcaaaggacgttccattcaaatgttgtttggtaactcaatgaaagaaaaccgtagaagaaattaaatagaataagacccccgccccaaaccctctatccaccaaaaattcgaaaattttttccaaaaacaatattagaaattgtggtgaaactgttaaattgtattaaattttctaaaattcttccggaccaggcccgtaacagaaaaaaatttcgggagtggcaacccgcgccgccggggaagtttttaaatagaaaaacgcgacgcaaaagtagaagtttcttcaagatttaaatctttttctttcaattcaggttaactttgttgaatttcgggtttggagtatcaaaatctgtgatctctttgtatggtaaatttaaaaaataaaaggctgactcgcgatgaaatacctcgcattttgtttggtgctccaaattcattcacattgtcatcagaaatgtgtcttttgaggcctctttcgtaaatcggacctgcatcaccggtgttcacagaagcatttccaatcacacagtttcccatttgttttcgatgtccaagaaagtttgaagtcacagtttttggtgtatttgagcaatgatttcctgcacagatgcgcttatttttagtgactgttccttccggaggcgaaagcgaagaattcgttgccggaatactgccattgtttacgagaatcgaattgaatgaccttttcccattgtctgtctcccgtaacgatgtttcgcaaccatttttttgtgcactgttctcattgtcaatagccactattgaactggaagaagacccacctgaaaggcaacaaaaccactcaaacaattgggaaagtcctaacttactcttcttgcgattgctcagaccagaaaagtcctttttgcattgtccattgatggaagtcaatccagaggattgcaagttctcatcgaaatttggatgcactttacttttcttgttgacctctcttatttttataaaatgttggtaaatcttaacatccagcttcatttattaaagagataagaaacaaatcaccatattagcgactttgtcgatctgactgaattcctgttgtttcaccaagtcaattttcaccggcagaccaaattgtatacagaaatccttgtataaattgctaattctgctcatctcacgtttctaagcacccgcaaaaaattgtttaaatcatattttggttgtaacctgtttttcaaacattttgtaaatgtcgtaaaaatttcttgccagcttctctatggtgctaagcaactgttgtcgttcagtttggcacttaacatctaggcatttgtgacttttgatgtgtagatttaacagctaaaattactagtagaatacataaaaaataacaaaagatatattaaaaaacctttgaaatttgctgtggagtaaaatgagcgttttcatctttcattggaattattgtcttttctttttgaaatagaaaattttaaaaaaaacgaaataatttgtttttctataattgagggaaaatttgatacatttttaatggatataaaaaccaaaaagaaccgtcgatatgaaaaaattaaacatttgggtgaaggtcaggtaagtaaaacaaaagatacaagaatagttttgctcttttaagttcgcaaatgtttaccaagcaaaggtaaataaataccagaaaatggcaaatttttaattgacattaaaataaaaataggtatgtagacttgtttaggtaccttttaataaaccttttataaaacgacatatttgtttcatattttaggacattgaaaccgggacgatagttgctgtgaagaaggtgcaactctcagcattttattgcaattaaattcaattatggctttatagatcaaacttggctcaagacatgaagcgcgcgatggtgttaataggacggcaattcgcgaaatcaaattgttgatggaaatacgccatgacaacataatcacacttttggacgtgattggtcacagaacgagcatccaattggtattcgactttatggagacagatttggaggcgagttatccaaagtgactttcaaccgcattttgccttatgggcacttcatttagcgttttaagaagcggggattctcccctttctcattgtcagccttccctcttgatgagtttcccgtgaataaattttctcaggtttagaatgttatcaaggatagtgaaacaattctccagcactcccacattaaaaatatgcttttgcaagtctttttgggccttgaacaccttcatttgctcttcatactccaccgagtaagcttttacaatttatttattcgttaaattttatttccaggatttaaagccaaataatttgcttatgaatacttctggtcgcataaaaattgctgattttggccttgcccgttattttggctctcctaaccgttattacactcaccaagttgtcactcgatggtaccgagcaccggaattgctctacggggcacgggcatattcgacgggtgtggacatttgggcgatgggatgcataattggcgagctccttttgagggtgagttggtttcgcctttgagtcagttttgacgatattattcctttctaataatttttttagggcgcgaggtgtaagtctgaaaacggttttttttcaggcgcacttttttcaaaaaaattttgtcttttaatccgtttttcggcactgaattttacttcggagtccgtaacatcgtcttttaggttcctgtttttcaaggcgagtctgatcttgaccagctgatgcaaatttacaaagtgcttggcattcctacggaaacggattggcctgtctgtctgtttttttaaatttgttttaaaatcgcttcagggcatgacttctcttccggattatgttcaaatacaaaattgtggtccaggacatgaattgactgccgtttttcctgccgcgagttctgatctgattgagttaatcggccaatgccttcgctttgatccgttgaaacgatggaattccacccaagcacttcaatccgactattttcgctcccagccattcgcatgcgacgactccgaattgccggttgcaggcagacgaaaacgaaaacagcaatcgttgagggagaatgttgaagcgggtgatgagccgccgtttagtcgaaggcgtttggattttgcttaaaatttcctttattttattaatcaattttgtgacttaaaatttataatacattgacttttaaattacttttgtttctcaacatttcatattaaatttgtgattttgttttattttaaccatttcaactgcaaaggatgctttatcccccgaaagtccctgtga

SEQ ID NO: 3550 - DNA, 2254 bp, Heterodera glycines
  unsure (1)..(2254): unsure at all n locations
tccaatattttttaatcagctatattggattataaattattaggcagtanaatgtgagaaatcgtcgagaaggnnaggagaaaagtgatttctgatcatttttctgctgattttgcgtttgaaacggatgttgaaattgactctgagtgccaaaaaggggaaggcgaagggacggatggcacgacggtggaccaattggatggacttcgacgctttctaaagaaaaacagcatacagacgaatttggaagagaaaatcaaacaggaacgaagatggatctggggaaaagaacgggggaaaaaggtaatcactgaattcaaagggattttcacaaatttacgattggataagcttaagggatttttaattttccaagtcataatttttgctcgttacaggttgacaatgatgagtttattgttagcagtaataaatcccgcaattctgatgcgaattgcactgatttgtttgatgacggagagaatgaaattgagttgttgcaagaagctaccgacaaaacgggtgctttttttgttatttatttggtaactaatgaagagttaaatattttcagatcaattagatttgaaattgaaaaacaaaaagtcaaagtccgttgggtccgaccactttttcgatgtccgttcaaatcaaattgctgcatcagcaaattgtgctcatctctctttcaccgatctgaatttgagccgacctctgctcaaagtcggcctttcatccatttccaccttattttcccgtttagtccatttctgaggccggttttcaaaacccgaccccaattcaaacggcttgtattccggtcgccttagctggtcgtgatatttgcgcaagttctgcgacgggcaccggtaaaacagccgcttttatgctgccaattctcgagcgtctgcttttccggtaggaaacggatttacaaaattaatatttttctgttttgcttttagtccctcacggcgaacttctgtcactcgtgtgctcgtgcttgtacccacacgggaattggcaattcaagtcttccaagtcagccgacaacttgcaaaatacactcaagtggaaatttgtcttgctgcaggtcgaatttttaaattattattgctttttaatattcaacgaaattaaacatttaaatgttccgattgaatgttatttttgttttgttatgcgcttccgatttgtctatgttgtgataagacttggcaaaagggtcctcagccgcgcgttcgtttgttttgcgtacacactgatgtagccgatggtaatgagcataattagagcacttaattgttcaaattagttggtctgttggtgcttctttcttcgtacctcgtgtaaaaggcgtaagtgtaatgccaataattgacgaggtgagaggtgtacaggggcacaaggaaatgcgcagtccactggaccatcgatgccagtccggttgcctttcccaaatcactcggctggactgcactgaaattgttggcaactgattgtgattcttgtttccctttgagtggatttgcctcgtgatttgtgtagacgattccgcataagcaatggcataggcacccgtgtgaattgcggttattagcaaatattggtacagtgagttggtcagtgtgatgccggcgtacgcacacagttgagcaaagcatgccaattgcaaaagtgtttttgggcttacgtgtctttgcagaaatggcaaaatgatgaattgcgtgagcacaagtgacacactgaatggccgtcactgattggcaccgtttaattactattattattaccccattgtgaccatcacttccgcgttgtcactagtcgcgtgcatgtacgaacgaagtacaaaattccgcgcaatcagttcataacaaacatatgcaacgatcaaaagaccgcgcaaaataagtccctcgcgcaatgctccatttttggttgtcataggccaataatccttgaattttgtttgaatttggaattggaaaatagagagcagttgcctgaggcctaagtcgtgctgtggcaaggcgaggcactgaatgagtggtgggaaggaaaatcagaatgaccgggatgagaagtgtggccataacacagccattgacaatttgtgagaaacgcagtgttgtataaatggcgatttttgagcctaatattggcccgaaaaacatcgagaatgcctgtggtatggtcagaatcatcaaagagccggttctctcccgttcggttgtcactgttgcgagataca

SEQ ID NO: 3551 - DNA, 916 bp, Heterodera glycines
ataggacaggtcgacgatggagagcacctcgatggtgtcccattggaggaaagagaccaaagttgtggtccaatttgtgccgaaatgccagataccgtatatgaggcataacaccccgagaattctgtgcttcttttcgaagttccagtacattttctgcaattgaattgttggttattgtattgcaacatgggatacacaacagtaagctgtttcaaaaatagtctgatttttgggatgcataagaaaagggcagtttggtgagcggtgcgatttgctgctgaagtggagcacgaagaattccgacggacggaggacactgcccggcggaccggatttcctctgccttttcatcgcgaacagaggcgacagtcgcgcgagttctttcccaatggatttccagttttatccccgctgatttatgtgaatgtaaaatcgatcgccagaagaaggaaaagtgttattaggagttgtggagggtgacggcgatggaggagaaaaaacgaccaattataatcgaaaccggttgacaaaaaaataccagtcacaaatggccgactctgatcattttttgatgaaaagaagatataagcaaaaaaataataaataaaataaattaggtgtttatatttcgtttaactcacttacaaatttaaaaatgattcttcagggggactggaccttaaggcccaggaggcggctcttcgccttggcctggacattgtcatcgcaacgccaggccgactgattgaccatcttcacaattctcccaatttttcattggcaaatatcgaggcaaatttgtcttgctaataaactaactttatttaatttcgattaaggttctcgttctcgatgaagcggacagaatgttgcatgagcaatttactgaacaaatgaaggaaatcatcggact

SEQ ID NO: 3552 - DNA, 4328 bp, Heterodera glycines
attatataaaaaagattgggcttgtgaacgaccacttgtatctattaattttacaatttgttgtcttttttatcttggttgcctctcagctttgatcgccaggaattttcctgaccgttgtattcttttcatgcgtaccgaagggactgtgaaaggatgcatattttgcttggcctttttggtgtcaaaatcggacgattgcacggcggaagaacgcgggcgcaacgtgtctaatgtcttcacgcgttcaaaaagcaacaaacggtgggaagtgctctgtgccacagatttggcagcacgcggctgatacattgagggagtgacaacggtgggaaatgcgacggactgtcctctgacggcaaagggtgtcaacccaaaaaacaaatgagatgattccgcaaattgtagcgtgtgaccttcagaatttcctaggctttctgagttataaagtacgactttgcagcgggacggtcccaggatttggcttgaaggatggtacccggtccttggtgatatcccttttttacactattttttgcatattttttcgccgagtgaaatcccttgtttttttagattttcatctctaaattgctaatttagttgatttttgaaaaaatttagcaaattgattggaaatttaatgagggaggtcttggagggggtaccattaagaattggaaattttcgtcaaaaatactatcccccccttgtcgtcttcttccctccctcaagatatttacattaaaattaattcagctttcgtatatcctaaaccttttaggtcatcaatatgaatatgccggccactttacagcattacattcaccgagttggacgaacagcgcgggccggcaaagcgggccgctcagtttccctaatcggtgaacatgaccgcaaattaatgaaagaaatcacaaaagtgaaccaaatctctaattcctttcaacttatgcaacggaaaatcgagccaggttcgtctttacaagtcaacgtcggactgtcatcattaaacttttcagatgttatcgaggcatactgcaaaaggatccaggaaatggagccgagcatgaaaaaattaatggaagaggagcaaatggagaaacaattaataatggcggagaattcaataaaaaaggcagaaaaacaaataaaatcattgggcggagatggcacgcagccgaaggtattttcaattgaaagcaaagttaggctggtcgaaaacaaattttagttgtattcacggaaatggatcggtggcgcagaaaagggacagaacgccacagaaaagctccgaatccgatcaaaagggaagagaagggaggcgaagaaacggttaacggaagcactccctaaacgcccaactgctgaatttgcatccaaacaacaccaaaaaagcggaaaaaagagtgagcaaatacattcaatggggctttattgcaggattaattcataagatttaactttttttgaatgaagtttacgatgaaaatgcattcaaatttaagaaacgaacacattcagaaaatctcgattagtcccttgaaatttccaaaaaatagtcctgtaaactgcaatagagcctgcctttaaagcaaccttttaaaccaattaaagaatctgcgttcttcactactgaaatcgcgagtgttagtcaaagggcgataaaacgcgtgaggaatgggtgagaatttgtttttaatgtttgcttaaaggcttattttagtccggatgacatcgactttaagcgagcgaaaagagagaaacaaagggatggtatcattcagaagaggacaaaacggaagtgaaacgaaacggtcgtttataatgttacaatataaaaatcaacaattctttgatttggtctgttgttctatgctaattttctggataaaatcctccatttcttgatggtacacgaaagtgtctttgctgaaggcctcctttacagtcctcttcagaactttgaatccgtgcatccacgcgaaaataccttaattgaccaaacagtcagttgaagtatatttcagcattagttcacccgcaataactgcaattgtcgcaacatggggcttaaacggaattgcagaaatgacacgcctgacgatcatccttccgcctccgaacttcctcaacaattgcctaccaaatacagtcatttgctacaataagcaaatgcaatttatttaaaaggcaagggaaatgaaagaacaaaatttattggcgtggaagccaaaagaaaggatcgaaaaccaatcaaaaggacaaatgtttatcaaaacaaagcatcgaaacaaacgcaaatcagtcgtagccctccacaggcagaaacggaacgggcttttcaggattgtaagtggagtgattccatcgccaactcccgcgcaaatgcttcggcgcgtaaagaatggcagtgcacgggtgctgcccttgcatttcgcaaatgcattgctggcaatcaaagaaagcaattttgtaatttcgtttgggtttgtcaatgtaaatgtgttattaccctttcgcagtcgcagccgaattcggccgggttctcccttttgtaactgtccattttcattcgcttccgtacagtctctgtcatgcccaatgttccgattaatgcttcgcttatttgctccctcgtacggcactccaaatcaaaaacaacttctctgccatcgcctaaacatctttatataaatgcaggttttcctctaaaattgtttctgtcgaatcatttttacctaagaaagcttgcgcaaatggcgtcacacaaacatccacgagtttcacgaattgaacgtgagggttcttgaattggagttgggcccagtgccaaaatacgaattctttggccccttcctgggccacgtttgggaaattgtggaaagcaattgcaaagaccttaattcatttatttatttaaattaattattcgtctttcatattaaagccaaatgttaaaaaaaattaccttcacttcctcacgcaaatgtatttttccctgagtaaagaaacaaatatagaaattgttcggaacagtgacttaatccaacctggccaagataataaaaagtccgacggagcggcatagtgccacgcataaaaggaccacgcatttttagtgtttgtttgacaatgcaaagaaaattagaatgaatcgacctgtaaatttaaattaaataaatacccaaatataaatggaattatttgttcgagttgagcaccgaagcaaacaaatttgggtaatgcgggcgataaaacagtgtaaacgaactttgggtttgggtgagttgcgcatgactctatttacctatatttctgtttttggcaaattttcataaatatttttgcattttttaaagcccccccctaaattagagccctaatgcccccggcgtttttaagtgtgggtgttattccgcaaagtggaaatgatagtggtggagatgttttcctaatatacctattttttattttcaaaatttatgtggcgtaaattaattacaaatcaaattaagaagtagcaacagcgggatcgagccaattccctaccggccaattccctaccggccgattccctactaaggcatttgggccatttccataccaaaagtgttgaatattgataaacattgagattaaaacatacaagaaaatttattcactgctttttagacagctcgtcaagagctttcggatgataccaaatttatcaagattcgatcgttttaaaaaagttagaagtgtcaaatctctcaatttttcgagttttgaaccctcctaaaaataggttctaaacccatttccgcaactcccggggaacccgaaaccgggctcaaaatcccggagctttagggacttcggattcgtaaagtacctgcttgtatgaaatttgaataattaaaccccggccttacttcctaattttcggacccctggaagtcctacaaagcgatttgaaatcaattgtaaattcgaaaaaaaattcacgatccaatttaagaatccggagactggataaagctgctaaaatagacaaaacactattttaaaatttttacttcgatttgtgaaaaagtatgaatggtcattgttttgaagctttgtacgtttctttttttgttagaagtattttcattttcttctctgcaacattaaacaaaaaatttattgttttataattcacgagaaacatcaaaatgttgaaaatcccctttctgtttttgaaattttccgaaaatttttgaaaaattttttggtacgaagatggcccaaatgccttagtagggaattgccggtagggaatcggccggtagggaattggcggt

SEQ ID NO: 3553 - DNA, 3314 bp, Heterodera glycines
  unsure (1)..(3314): unsure at all n locations
ttgatcatcggaccgtttgcattttcaccattcgttcctttgtgggtctctcctcaacattctctcgtttaacttccccctttgctccccgtcgacacattcgaaatcatcgtccaaagcttccccataaacgaatcattttcaccagcaaccgaatgttggaaactcaaatccatcttcaaatgtaaaggactgttaattgtccatgtgtacccgttggagagaaaatgctctctcttttagtgttttttcatccttacactttggttcggtccgtccgaaatggcactggcattcaatggacgcattccggcacgagacgaaatgctgagtcgagcccggctgaatgtaaaggtggcattaaaatcgggacaaaactacgccaccttggaagtccattggttttgtattgagatgttgaagggaccatttgtgagtcgtcatggatggaatagttgccgtccaacaaagagccgttctgtcgagaagtgtcatgaggggtcacagaatgtcgcgggatgagcggagttgcacttcgggaaagtgacaaatcgtcttccagcgcttccttaaacaagtgctttagatcccaacttatcccgacaatagccatttactcacgcggtcttggcacggaaccacgccgatcatttgcccttcaaaaatgctgccgtttctgcccaacgcctgttttgcatggattggagtggagtagcgaatgtgcacccaattgccccgttttggagtctgaaagtcaaatattggcaatattttctagttttgccatttagcgattgaccttttgtgccattatatcgccgtggcgagaaaacagttccaaaatgtgttgtaaatggtcaggagaaaagccaaagacggtcacccagtagcagctgtcctcctcctcctcctccatttgctgctgttctcgttcgtccagcatttcgacagaattcgaacccataaatttttctcgtttttttaattccgctggtgaaatggttgcgctcgttcgagtgcccacaggtttctggttctgatacatcgtcaaatcagtcgatgaaacattgtcgggtcggaacaatttctcaggagggccgacgacgtcttcgttaagggaacggagaggggggcctggtgaaaagaggaaagtgtactcaacaaaaagggaatttcggtgcgaattcgaccgattttcatcgctctcttcccaatctttccattgtcaattgaaaagatattccaatgcaaatgtctgaccattccnaagtccggaaggcgtttgcttgtcgctttgtgccgaatatcgagcagaagcgaacttcttttcatcaatgggcgatttggagcgctctctcacaagcaccggcgaccaatgcacacttttgccagtgccagaagcaatcccttcgcgactcttcaaaattcctggtgatccatagccttaaaattcaaagaaatgaaaaattggttaaaaactaaaaaaaaaaacaactgacagtaaacttttcggtttgtcggagtcccaaaactgcgccgaatgtgcgccggttgggagccgaaaaggaaatttggcgcaaattgcacttcctgtgagtcagtgacagtctcaacgggggaaatgttagacgaaggactggcggaagcgaaataattagctgtctgcgataaagtcgagcagggagaactcacattttgagtggaaccaaacattttgcttggataaaaaattcacttttatcataaaggacgagaaattatggcaaacaaaatatgtataagttaaaaacccttttttataagaaagaattgatggcaaattttattgcaaggcaaaaaatataaattattttgttgttatgagatcgtaaatcagtgaatcggcgaattagatgtcatttcgttgtcagaatcggcctctaagtcctcaaattgctcatcttgctctattatatcgacgaaatcctcctcctgttcctcaagttcaacaattcgtacaacagagcgaaattcggcattcctttgaccattcgcctgggttgtaattgccttcgatccttaaaaaccgatattatttagtctattttcgtaattttacttggagagcatgaagtgatcgtattccaagcataagctaatgcatgttgagtggcttttgacgcgtaatattgagctgaagccatcaaaacttctcggttcggctcatattcctggagaaatggacttacgaactaaaagaagtctaaaatttaaaaatgccaatatgtttaattactttttggtaaatgtgctcgtaaccgacgagataagtgtaaagaacaacagaaaacttcagaaaggagtaagccggaatgaaatagggcaacgaaaacaaattggccacagattcgaaggaaacccatgctgcgaaaacaatccaatattttgagagaggaatcttaactgtcgaaaaattttaataacccaaggaaatgaagttcactcactaattgtcttgatttgcgactcttcaaaaccttccaagtacggaacatcggcaagacggcaccaagaataacagtggccaagtcgaaaataaacgacaacattgggccacaattaacttctttaatgaacggattgagctaattaatgaatgagccataaaacaaagatttaaaaaacagttcaaaatacattggatatggagcagtagaacagtaaaaggctggctggttgacttaaaccgaagaacgaagccggattttttaaatattaaatttaaatggcataatgttttcatgccaatttgcgccatgccaagcgccaaacctaaaataagaaatcaaattttttttaacgctttaaggccacattcccaatccaattggctttctacagttttataagcttcatattttaattaattatatttaatttagcgtatttctaaatggtgcgaacacgactccaaaaaacaaacaaatcgaaaaaaactggaggagaagcgaagagcaaacgaaagggagagaaaaaaatggaagaagaagaaaaccaggaaaaagaaagtaaagaagaaaaaagggaggaagataaggaaatgacaagtcaagaaacaaaggacatcacaatattgaagacagtttcaagtacggatttggaagaggtaaatgaagtgttaaagtcaatcagatgaacttaaagaatgaccttttaaggacgggaatcaaaaggaacagaaaatcgaacttacgaacgaatcagttaatgttgagaaaacaccgtcgagttagggaaaattgacttttggggagaacttgaaaaaancggtggaa

SEQ ID NO: 3554 - DNA, 2573 bp, Heterodera glycines
tacgaaattatctctagtgtgtaataaataaatattaacctatgaaaactaaaagaatattttttaggcgggaaatgaacacaactgccaaaaaacagctgaacaaccgaatgacgcactcgaaaatgacattgacaaaaaagtgaccgattttcaaacaatggtggaaacgacagaggaggacaaccgaagtggcactgccaccttcgaaagctttggcaacagtgccgagccgacaccaatggaaacgacaatttaccattcggcaaaagaatcctcggaaattggaacggacaatggacttctttcaaaaatggcggaaagtccgccgaaagtgccgccactcactcccccaagcattctgcgaaaagtgaactcccctggtggcaatggcgtcaaaaaggtagcgggaaagggtgaatttggtcaaatgcttcaatagattcgacgcgtccaattcaaagaagacgaacttggtcccggcagaattcgttttggtcgctccttttcggcgtcaccatacccaaaacgggtacaactgaaaacggatgggcagggcactcatagcattacagttttttatgcttttagctgcttgaacatctcgaccaaagcacaagcgaaggcgccgccagtccatcggctgacaatgagtcacccgccaagcgaccgatgaaagcgttcggacagatttggcccatcgccagcgccggtcgaccatcgacgaccactccaacgcgttggtccaagtcggccagaaggcttttgccaattcatggtgatgccattggccgttccaaataaatctcatttttcgtccattttagaaaggggttcgccttacgatgcgccggagagtgtgcaaaaggcgcagtcgtcggacaacaaatcggaccaatctgagaacaacagcaacgacaaacagcagcacgtggacgagcagctcgagaaactgccacggatggacgagcagcaaaaagacgatgaaatcgttttggttgggtcggcgaatgtttgcgttgtccttccggaagaggtgagatgaccccgatgatattataaaatcattggaaaatttttttaaaggaagccaacgaaaacagacatcagcaaaagcgggatttcgagcaaccgaacgaaacgatttcaaatgattctgacaaaacagcgaccgatttgggcaccgtttcgaaggaatctgaagagaatgccgtgcaaagtgaagcgatgtttcataagaaactgacgacggacaacaaatccgaaacatttgagagaatcaaaaacaaattggacgaacaacaagagaaattgaggcgacaaatggaggcattggtggaggagtcgacgaagcgaatgttggcaattgttgcggaagaattggcaatcgctgaaggattggccaacgcaatgccaacaaacgacggacaataaaaggcggacggaataattccgaaaagggatttgacaagacttaacaattcattgtgcccttctgatactttctttgaatattcatttcctttctccgtttttgacgtgtctttgtgctgtttcctatatatttgattactgaccaaccaaatgtacgacaaatattattatataaatagtccgcacttttatgtactagctagaaaagacttaataaattaattaaagcagcttcaaagtgaaaagtttatttaccttattgggccattattatcctgaaattcgcataaaaagggcaggaaagggggcggactttgtactttattgtaaatggtcataaaaatggagtaatatcaactgattgcccattgtctgactgagaaagacgctttttgaatgcattcatcagtctcgaaatagcaaacaaaaataaaaaaacgtgcgggactgaaaatgatgggtcggtgaggggctggaggataaagtcagaaaagaaaacagggaaatccattggatttatttggttggttcgcttttccattggtttatggcacgccgttggtgcaacactttttggaagccatttcggaaaattagcatattgaggaaaaagctgaagatacgtacttctcgagtgtttcttaaatttgttaaaatattttttacaaatcaaaaatggatgtttatgtaaattcttttttcaaattcgccgcgtttcctttcgttctttggcattccgtcccttccctttccttcatttctctttcgttcatttttcgcttatttgtcttatcagttccgcgatccatttagatgccaatgcgccgccttttgccgctacttcgagcacttcgtcgtgcgaaacttccacggggtcatcggagtcgacgctggagcaattggtgatcagagagaagccgaacacgcgcatgccgcactgccgggccacagtcacttcgtggcacgtggacattcctaaaaagggggagggaaacgatcactgagagatttggaaaaatggaagaatttagtgatcggacaaaatgatcagtgagtgggtgatcggataaatgcgaatcagtgtatgatgggacaaacaatggactaatcaatgagtgatcggcaaatggacagtgagt

SEQ ID NO: 3555 - DNA, 2243 bp, Heterodera glycines
accgacggcgtcgccgcccatccgcgcgattacttctaattccgctgccgtttcatactgaggacccgcattcatcacataaatgccctcgcgcaacggcactttcatttgacggcccaaactcatcgcctttttcctgtgaaaagcgaatcaattaagcggaaaaggaacattgattgcttgtgagcagcaggactcaacctcaattctttgtcgtacgcattatgaagagagacaaaacgcgagccgaaacgggggtcggaaatgccaagcagcggagagtaactgaagggggaggggaaagtgatcagattgatcattgggatgaaataaaaaacagaaggtgatcagaatggggaagaagaaaaagataaaggtgatcagcaaaaccgaggaggaaagtgatcagagtatatcgaagagattattgttttaagtgggcaatttgcttctcacccggacagtccgggcagaaagatgtgatctttgatgaccattaggtcgcccgtttggaagtcgccgttcagtgcgccggctgcgtttgagacgatcattgtgcgaacgccgagaaaagccatcagacggacgggcatcgtacactgaaagggcgggacagacaatgagggatacggtaggcaaaggaaaagcgaagcgaaagctgaccaatgccatgtccattttgtgttcgtaggggtggaaacggccctgaagacacatgcaaaagtgaccaccaatccgaccgaacaccaaattccctacaaatcatcgacaattaatcaatcgcctctgatttgttttgcctttgtgcccaataacactcggctgtggaaagccgggcacctcggagaaaggcaaaatccgcgccccctccatttggtcggcaattgcgcccaatccggagccacagattatgccgaactcgggctgcaaagtgccaaggtcggccatggaacggatgagctcactcagacggaccaaatggtcgaagtttgtcggactgaaaaagccaaaagtgcgttttcccattttttaagcattttcttaatagcaaccccaaaacccaattattttgaataagatccaaaggcataaaatattaaatgccactcattgtgccgcctcactcaattgggccccttcggcggtccgattgaatgtcttcgatggaattattgttgcagtcattggccgcggttggcattggcacggcgtcgacaggcgaaatgccaccagcgaattcggacaattgctgttgaggatgttcggcatgcactgcttgtgaaatgccgaacagagctataaaaaagagagagattttattgtaacgaattattttattttaaaataattttaaatgttcaatcttttcatgcatattaaattagaatatatttcaatttcgaattcacttttctttttcctccgtccgccaccgccggtggatccatttttattgacgagaatcggctcaacaacagtgccaattccaaaattgttcacttttgcgctgtccacaattgatgccatcggcggaatgatttgaataatttacggatgaattaattggcttaaaattttgggaaatatccaatttttgtgtcaaattgagtttttgtttgatgatcggagaatgtacaaaaaaagtaatagaacaaacaaatggaagagaagaaataaaaaggccgaccgattcagaacgaaatgaacaatcgaattgttggccccgtcaaatcattagtaaaatgaacggattaaaaagaatgaatggtaattggatttaattgtcggcagatcaaacgaattaatttgaacggaaagagaacgaatgaagcaaaactactgctgctgcggttatttgggtgggcatttaccattttatttatttattttctttttgttgtgctgacaaatgaaagttacggaaaaaatgcaaaggaatttaagtgcaaaaatgatgaaattgacaaaaaaaaaactgatcagtgcgtgaaaaaatgataacaaaaaaaatgcaagggtaattagctaattagaggcatttggggggtaattaaggggtggtcgtttgggagagggggtaattagaagatacagcaaattcaatcagcagcagtaacagaataatatgcgtatgactatagtgataattttaactttttttttggtcataaaataactgataaatgggcgaacggatgaattaatgaatgattaattaatgaatgatttgatcaccaatctcg

SEQ ID NO: 3556 - DNA, 1765 bp, Heterodera glycines
  unsure (1)..(1765): unsure at all n locations
atttaattcaaatttaatttgaattccgtcgttttatttcgcttcgtctgtccctcccccaaatgattcacttcgcttttcgacttgtgactttcccctaaaaagggcatgatcaaacgaccaaaatctgagcacatgtcacagtcattctttacaccgcaaccgaaagtccaaaatggtctcaaaattggcgtgacaaatgaacaaattgaaaagggagagaaatggccaaaaacaggtcgacgaaacaaaaaataaaaaataatttattattaattaataaccgaattaattataggaataataacaataatttttgggtattacgaattaatagaatagaagaaaagatttttaaaagtaagataaaaataaatgattactgttaagtgttgttaagacaaaacatcgacagaaaaaaacactggggaggcaatggccaaattaattggcaacggaaaatgataattatggtaattaattactttgttgattaatgtaacaaaatggtgactcgatcatttattaatttaatttttattttttatatatttaattttaatcctttttgtattcaatggacaaaggaaagtgaccatttatccgtttgtcgctgtgctgtccttcttacgcttctcttctgactgtcccaaagatcatggcttagaaaaaatggccaatttcattgacaaacgatgggaaaggacggaaagcgcggaggaaaagcaaataaaaaggggagaaaatgggagacggacgaggggggggggggggatttgggccgaaatggacggggcgatattcacaaattggcatcggcacatgagggacaacacagtttaaatgtaatcctcggaccaaaaattaaaaaaagacatntcgtctcacttttcggcgaatgccattaaagtgcaatgattggatactctgatgagcaaattggggacaatgttatcatatcatcatatcattgccatggtcactttcactttcgcatcattcggtgggaaatggcggcgaattcgccgatcgataaaaaaaaattgacaataattacaaatcaaaatttacacaaagaatttccgaaacaaaatgccaatattcattcagatatgtaatttttatcgctttttgccatttaaacccttcgctgtgccatcggtccgtacatttgcccgatttgccccccgaaggaatgtccggtgccgaatccgccgcccattggcattggcatcggcattcgtggcattgctccacccgcgaactgtccgcctccgttcaaagggcctacacttcgtggcggaaaaccaccggaaatgagaaaatgatgtagattaagccattgtcaattggacatttcggacctccgccgatgactccgctgggccaacccatccacggggtggaagcgccggaacaattgcagtccaacccatccgccaaggacagcacttgggctgaacataacgccaatttgcaaattcaaataaaactgaccaacggacacattcactcaccgaattgttcaaaggccgtctttccctgctgagaacgattgatctgttcttgcaatttgcgcacttgctcttgaagcttcaaagaaatggaaaattaaattagaaattgcgattagaaaattggcgaagggatagaaagagaggggtggagggagagacggaagagaaagaagggaagagagagaaagggctggagagagaatggaaaagggagaggggagggagaaaggaacggagaagggtgaaag

SEQ ID NO: 3557 - DNA, 1190 bp, Heterodera glycines
agttcaccaaattgttctctttcattctcgcctccgctttacccggccgcctcatgcggcggaacaaggtcagttcagaaggagatgttgtcgtatgccaccgattggagaagcccttttctctctcactctcttccggagcattggcactttccaataaaacatttgtccgtcattttgccattcccatggattccctccccctcccctctcatcagtcaccctttgctctttccccccccccccccccgccttttgccgcttcctttccctctgcccttgcgatttcattatcccttttaatctcagtgccaattccatccctccaatgttttcttatcgactcccctccgcataattatccttttcgtcttcctttgagggagtacgtcttggcaaattggccgaagagtgaggaaagaacccctccggggtttgctttgactctttcattgccattgctccgacaaatgccttccggtaatttactctctctctttttctaacctttcaaacaactaaacgccagataatgtttgaaatggcaaaaaagtcgatcgatttgtgctatttgctgcggactaatgtccaagaattcaattagagagcgagaaaggcactacgaatagatcggcacatttggagggggcaaaaggggaagaagcgaagtcgaaccccgagacacatcccccgggggaggggcggcagataaataaagggaaggcgaaacccaatttaaggggcgagaaatgtgcgatggaaaagccgacgaaagggagggcaaaaggtgaaaaattaggaaaagttggaaaatcagagagaaacaaataataataataggcataaattgaaaatttatcaatgaacgaaagaaaacacacaagattttatgaaagtcccaattaaaaaattaatcaaaaaaaaacaattaaaataatattacaaattttattcttttttttgtgttgtcttttcactcttctcttcccttaacattcccttggaagggtaagacaaattgcaaattgaattgaattggtgccgtcctcagggaaaatgacggaatggtcgagtgaacagagaatgactgaatgccctccctttccttctgacggggggggggggggcgtgaagggcgactctcagcaatgaaacggacaattcaattggggaattgacgtggcgggggg

SEQ ID NO: 3558 - DNA, 4049 bp, Heterodera glycines
  unsure (1)..(4049): unsure at all n locations
ctgcannggtcttgagaaataaaaaactaaggaattgaattgtatggttccatttttagataaaatcaccagttaatttgaattcactcattttaaaactagaaaagcactgtggttactgtgaatagaattccgaaaaatactgtaccaatctggctggtatttgttggaaatattcatatttaatgaattgtttcaattttttttcaaaggccgagtttatgtgcaaggcatggcagatgatgaacgatgcgcaaggaattttgcatcaaattcggaccaatccaaattttcgatgatgattcagaacggggattgcaccagtaaggaattagctatttaaattattgtaaagaagttgaaatgggcggtaaaatttcgaaatccataaaaggaatggagggagggcgtgccacccggtagctcaatggtagagctgcccacaaactcggtggaggcgtgggttctattcccatccgagcctgagagctagagattaggttaatctcaagaatggattaaaacatggcacagacgccgagaaaaagaagcgaaattgtgaaaaaaaataatttaatggcacaaattcagagacaacatctctttaaattgcggggtcatcattgtttaaatagttaatttatacatgtgagaaaaagaattttttgtcaattagatgtcatattatgacttcgttttatgaatagaacagaaaagtgccaaaaaaagaatttttattaaaatttttagttaaaattaaaattttcttaaaaattttcgttctgagattttttattttgttagtgcaacgccaacgcgtcaccggctcgctggagggcatgatgctttcattgaccattgtggtgtcatttcatggcacttttgtcacacgttcggaccgtgcctatcgctgcatgtgcttcttccgtaacatcaaaacattgacaaatgcaattgacgtgaacctggcggccaccacggaattgttaggtaggcaattttaaaaaaaaattttaaatttttaaaatggcgcgctctggcattttgcagaccctgccaagaccccgtcaccctttctttccttccaccatcagtggtggcctggccctcctccctagtaaccatttgaatgttatcccaaagggttgtccaggggaagaatgaaaggcgggggaaggaatgggctgcaaactctcaaccgcctcgccattgccccacggcttctccccccccccccgcaacccattttatcttcgccttctccgattcacaaaaattgctgtcccttggcatggaatgggctccgacttccttcaggtgttctcctacttccttgccaatgtgtccgattttgctcacccctggggtcagtcattgtgtcaatctgtcgccactaattaagtcgcttttcctacccaaaataattcccccatcattcgtttcgctttttcattgctccttttacgttaagcctatcgcctgcactgtcacagctgcatgagtccctatttggaggatcagttccaattcatttcgcacctctaccgacggcccctcgtgttcagtgaaaagtgcgaccacggccaattcgactggcgatacatcgccacgaaaaactgttcagatgcatgtgtaacactgcgaatgaacgacagagtgggcggtgagtggagacggacagacagacagagacaaaaagggaattttagagagaggggaaaaaaggcaaatgaggaggcgaaaagaatgattgataattcacacagttttagtaattgcttctgttttcccaggccggcgccgtttcggctttatgcgcgggtgtctctccgacattatccaccacaatcgaacggctgtccgatttggcgaactcgccaggacagcaaagtcgggcgcaacaatatgctcggctatccgactaagggatttgttcatctcttcggacaggtcataggcaatttctgtcgaaattggcataaacttatccattgtttaggtatgccttcgatgcgcatgatcacatcgaactttgtgcttgcattcggtccaattgcaattccgccaccaaaaaatttggcattaaaaatgccattttgggagtgatcagcacaataatcagcttcatgtttttaataaggacatcgtacggaagtgacggaacgaattcatcccaaaatgaatttaatgggaagaaaaaagtcataaagaaaataagtgaaaaagagcaaaggaaaacaggagaggacgagaaaaggagaaatgaaaagaaaacaaagaggtggaggaagaagatgcgagagaaaaaggacgaaggaagaaagaataaaggaaaagaagagacggcaaagacaaaaagcaaaaacagacgaaggaagaaagagtaaaggaaaagaagagaaggaaaagacaaaaagagtaaaggaaaagaaggaacggaaaagaagagacgaaggaagaaagaagagcagaggacaagaagcgaaaacgccaaaccaagacaaagacgggtcgaactttgtaaaaagaagaagtgttatgttcaaaacctcaaaattttaaattgctaaatttattttcattcttttttattttcacatgaattaaacatgaaccagaatgtttaaattatttttgcgagtcacaataattccccacatcgacttccatttttcctttcttttcaaataatgaaaatatttattaaacaaaaaaaatgcaacaaaatattgtcaatgacttacgaaatcaaaggctgtgtgtgctttatcagtcctttggctttcatttttgggccccaatttttgcctttattgtcctgaaatcgaagcattccgatgaatttgctctttgggatggaatccggatgggtgctgaagttgatttcacacctaaaaaacatacgttcactaataataatcatggaatgggtcggtcggacttcgtttccttcgccaaaatgcgactgcgcggactgtcctcccccgcctcggccattcctttggctgtgattccgtttcgttttgcctgcaaaaatggaacggactgatcatttgcatcggcactctccgcgtgctcctctcacccattcacggcacacgtcccacagaaaagaggtcggcgcgtccgttttgactgcccgcggattgcagtgggagatggagcagcggaagcccgcgttgagcagggcggaccggaagacgttcattttgggcgaggggcacttcatgacgaccatcagctggtcgtgttcgtagaagaggggcacgtcgggcagttcctccgacagaaccgtcagaaggccctccaggcgttcacgagtgccaagtctcagctgccccgcattcgggcctttcaatctgaagccaatcgcatccgaattagtaattcattgacatcaccgacattgcgagcagtttcccgacgaattcggtgtcccacgtcggcgccacccaaatggggccgcccgtgtgaatggccgtccccccacaatgcgcgcatttggccaccattcgtccgtccatcgacgcgtcggactgtcccgcggggagacgaaccaattcggactggaaatgggcggtggagaagcgcacgctgggcccactgacactctttttgagcagaggctgaaagtccaaactttggcagatgccgcagcagttcacattggcgagttttctgaaggaaagacggagacttattattttgtgcgtttaaaattttcgttttttccttattgggtacatcttccaatatctcgtgtacccaaattttccccataattagcaattttacagaacaattaaaactaaattttataaatccggggaccatcccagatttgaggggccgaaagcggggggggggggggcttctcccccatgaacttcgttcgtatggactcggatcgaccccaacttttcacaattaattagtgctacaaaaaatgagtcagtcaaaatcccctaaatttgtcctcatttttccctaaacgtccctaaaagacaaaaagagaaatgcccacgtcacgctgtctttggccatcgcag

SEQ ID NO: 3559 - DNA, 995 bp, Heterodera glycines
  unsure (1)..(995): unsure at all n locations
ttgcgatgtgccatcatcaaatcgctgaaaggacacaatnccaagcgaaattaagccgaaaagtcgtctctcaaacattgcgtcggaaaagaccgcctcgacttgtctgggacgccgttcagctgcacattccgacggattgcttcgaatgccttctcggagaagtcattggccaccactcgcgtcacatttggcacttccaacgcgaagcgaatggcgcgcagaccagaagcggacaaggcatcgagcacagaaaaggcacggggctgctgggaggcgaaaatgggcactttcaatgactaaaaaatgcttacggattgcgctgcatttgcttcgggtgcttttccctcgtccattttcctctgtttggcttttgggccctcctcttccgttttcggctctttttcgttgggtatttcggcagcgaatgccctcaaaacgacgaccctaaactccttaaggtggaaagagacgcgcccttcgctcggcttttgaagccttacgtcaagtctcggttgaactcctgcactcggttgtagaaagtctcgccgccctccgccgtcgcggtgattctcgccaatccctcggtgacttcggccaatttgttcgcctcacaatcggccgcgactgatggaccaacgccatttcctttctcagttgcgcactgcaaaatgactgattcagcaccatccattttcgtcaaatgtaggtacgaaatgggtacaaaagaaaataacaataaatttttcggcactatattgaaagtgacagtttttgaaacaaaaggggggacccttttgttttgcaaaatttttttaagataaaaaaccatgataattttttatccggggttttaaaggtcgctaatcacgaatctgacatgtattttgactaatttctaatccctaacccgaactcgaataaaaatcgaaattttgaatttttaaaattatgattttttgttcnaatttagattaggaaatcggaattgatca

SEQ ID NO: 3560 - DNA, 2877 bp, Heterodera glycines
  unsure (1)..(2877): unsure at all n locations
tttcagaaaaaaagggatttatattttctgaatcctaaatttaatccaacattaaatttttcccggaagcgcccaatggtatcgcctgatcccgaacttttaaaaaaatgtccaaattttaggcgtttaataaaataaaatacatttttcatcgaattttaatttctgtttaaagaatataatatgggtcgttgaagtttatgaaattacaatgtatggtttaatatgcttgtgttggcataactttgaatttcaataaacaaattcggtaagtcagcatacaaaaattccttgtaaataatttttaaaaacttcggtgggtctcttctcgtgattacctcccgcagattccgcattcaatcaatcaacaggaatgtctaaataagcaaacgatattttattgcttctttgtcagtaaagaatcgactcgagattaaaagtgcattgtttctctccatttcggggtgtccttcccctccccgtctcgtgttttctgtcccctcaaaaccgtacttaaattcttcatcaacatcttccaccagtgctttgttgggcgatcctggtcgagcaaattcttgaaggtgtcatccttaagttggtccgggagacattgggccaacgcctgaagagcacgattattttcggagagacgatgataacagcggatgaggtgtttgagcaaacgatgtgaaggctcttttgacaattgaatgaccatttttccctgagaaaatgggaaaagcctaaaaattaactaaaattcaaatcgtttcgctcaccaaaacaattgcgacgtgggagaaacgttcgtacgtctgacaaacataagaaaggccgatgtcgtcgagaaggattttctgaagtataaaagttgcgacagtgcgagaaagctcagtgccctgctccataattcgtaagcaaatgggaatgatttccgtggacagcaagaatttgacaacctaaacgaattccaaacaatcaaacacaaaaaggggcgatacgtacatccttttcatccgttttcaccagagcgccaaggacaccgagcgaagtgagacggaggtactcaaaaggacgagaatcgctggtggtgtgaaggaaagggtaaaggtacaacggaaccttagctaaaaggaaagaaaaaagagtaagcgaaagaaaacaatcgaattatccagcattgaaagaataaattttgatagaatggtaaaacatccaaagaaacatagtgttgatgatagataaaatggtcagactaactccttcgggtgaacggaacccaaaaatgcactgaaaacgggagtatttggttttctcccatcgccccaccccccttagaaacttttgaaaaacaaatttcttaatttaattttctaacttcctttccaataaaattaattttagatttttaatagaaaaaaatatgtcattgtctgatcagatttcccttaatttgtatttcatttaccgtccagaaattgtttgcgggtgttccgatgggaggcaatgcattgcattagtgccaatgcgttgcagacgcggtttgactgggcagcggtgagagtgggcggcaaaatgaacgggtaaatgctaatgatctcttggagaagcacgctaaaagccgaaggaaatgcagtttcagttggaatcaaattggagcagcacctcactgtcccataagagaaccacaaccaaacggcgaggtcctccactccctcgcgacgtttgctgaacaaaatgtgtgattatttaggcatttgaaaacggatttttgaatttggaaaaaacaactaccaaattcatcagttcttttctttttatttatggatagtgggaactaaaattttattaataaaaacaaaaaactgttcacattttaacaggatgttttttattatgtcgcattcatccaaaatttttataaaatttgttttggcttttatttgacagagtctgccttaaattgcgttaaaaagaacggcaactccccaacctaaccttatctgcaaaagtgcattttctcgcttttcgtgctcccttagttcgcgaatccagtgacaaatttgttccgcgtccttttctttgctattctcttctttattattggacgacgctgttgctgaagttgtcgttgtcgaggtcgactgagcattggcaatatttggcgatagcaatttctccattcacttatacaaatccgctgaaaagaaaatggaaatgatttttactttatttaggcgatcaaaggctttttaaaggaagttgtttatgtcagaccatggggtaaacccaactcatccaaacccaactcatccaaacccaactcatccatacccaactcatccatacccaactcatccatacccaactcatccatacccaactcatccatacccaactcatccatatacccaactcatccatacccaactcatccatagcacgatacgagtcgtcaccgtggcatttaatgccacgactaagactgtacaaccaaaaaatgccacgaccgagaccgcataatcaaaaatgtccacggtcaagaccacataagcagaaaatgccatgccacgacgatgactcgcagcgttatggatgagttgggtatggatgagttgggtctatggatgagttgggtatggatgagttgggtctatggatgagttgggtatggatgagttgggtatggatgagttgggtatggatgagttgggtatggatgagttgggggtgactctcagaccatgtttaaattttgttacaaacaaaaaatgcaaaaaaaagcatcatgccaaaaaaagtatatttgctcaataattcaaaacaattncaacttttaagagcttttattctcaaaacagattaggtatacctaat

SEQ ID NO: 3561 - DNA, 886 bp, Heterodera glycines
ggaggaggaaaggaaggaatgccaaagagggggaggaggaggaaaggaaggaatgccaaagagggggaggaggaggaaaggaaggaatgccaaagagggggaggaggaggaaaggaaggaatgccaaagagggggaggaggaggaaagaaaggaatgccaaagagggggaggaggaggaaaggaaggaatgccaaagagggggaggaggaggaaaggaaggaatgccaaagagggggaggaggaggaaaggaaggaatgccaaagagggggaggaggaggaaaggaaggaatgccaaagaggggggagagggagggcagaaatagcgatgccattggaagaaaatgccaaaagggtgtagaaaatgccgttcaattgaggcgtggatgaggggagaaattgtgcggcgatggagcgaatgtgcggaagcatcgcacagaaagaaattatggacgcattctgcaggaaaacgtgcaaaatgtgctgaattacgaagagaattctaccgaaagagaagggaaatccatccgaaaaaatgcgattaaacccaacagtcattagcaaattacatttattaattgttctgttgaacaaaactcttttccccctctctcaacgaattgcgaaatgtttttgcattaattaaaaccctcgaggcattgaaacggtttatcccttcacaaccaattattaattacagcacataaattaattttgtaaaggaaataataattattatttaagagagggtggtaattcaatttgttcgaatttttcttcccttttccaaatgatattttttccaaaagttggcttcattttcttttcatattatttgttcatcttcatattgttgctgaattcaatggataacgacatattatttc

SEQ ID NO: 3562 - DNA, 2093 bp, Heterodera glycines
cagcaaaagtggacacttgcgccgctcagcaaagtcgacacttgcgccgcggatatttgcgccgctccatttgcgccgcgacatttgcgccgcccagcaaaaatggacttttgcgccgcgctgtcaaaaatattatattcataaaaattccactattatcaataagttttactaaaactataagccatcgacaaaaataactaattgaaaattcgaaaaaattactaatgacattcaattttttaaccattaaatcttaacattgaataggttcatcaaagatatgaaaaaatgattaagaatacaaactaacaaaaaagtgaaaaaaaaagaattttctgtagaaaccccaattatttttttgcttcgaaaaaagaatgaaattcaattcctttgtaattaatttgctcaataagttattttcatcgattttaatttaatttcattgaaaaaacgcactgattttcaattttcgttcctattttaccatttttcgcattatttcgcaatttttatgcccttatttatttacctatttttttcgcttaaaatccgccgcttaatgatcaggcaatacgaaggcttgttatcgcatatggtcccaatgaaaaccaaaatgatcaagatttgatcaatcattacgtgcacttcaatatggaattgacatgaaaggcttcgaaacaggaattaataatgaatatctatcaattcttattctataaagcacataaatttattttaatcagagcgcaaatatcttttttcgctgtacggcgcaagtgtcgcggcgcaaatggcacggcgcaaatgtccgcggcgcaagagtcttttttgctgagcggcgcaagtgtcgcggcgcaaatggcgcggcgcaaaagtcggctaaccgtgaaaatcttctgaaatttgtaaaataaattttatctgaactgcgactttttgatgattttagatcaaaatttgacaaaattctgaagggaaattttcttaacaaaaatgggcttagctttaaacttttctagaaagtgaaaatttatttgattaagaaaattttcattaaaatattgccaacagttcggtgatttatccaacaaattctaagtccgatcattcatccattcactttgctttctctcctttctgttgtccgatcgtttgtccgtcgattgatcagatcagcgaccgatcaaattccatcggctcaatttgactgtttccattgctgtccatgtggccaaaccattcactgttctttgccaaatggtcagccgaagtgccattctttgtctccaccaaatatgcaatggcttccttcatcgaaatggcaccgcttttgtccgcatcaacctaattaattaatattcaaaaataaaaattagttttaggggcaaatacaataattaccgtatcaaaatgttttcgcgcagtttccaccttcttcaatgaatatacaaatggagagttttcagtgagactaaaaattgtaaatttttatatgaaacgaatgctaataaaagagaggtgtataattatgtgaggggaagtgaaggagagaaaagagtgagcgctacaaaagactcagacagttagagaaaaaaaacgagagacacagagtgtccaattggacatttggacaaatgatgaattgcgaattgttcaaatatttactacccaaatgttcacttttcaaattgtacactgtccgaatatccgggatccacccgctcccttaatgggatcgtacccaattttaaaagcagatcgtatgaaggcatataattatataattttcagttttttcactaatttttagaggggggacattttgactcattcacggaatcccgatttccgaacttctaatttcgcgcatttttgggggtcggaatgccgagttacgaaaaatttttgagcctcgtaatgacatctcttatacccaatctctctactttacttgctacttgcgagatgcgaatttggcttgttgttctcccggcaaccgccctcttcgtccttttggcaattgaggcacccttgtggacagtatttggcgtactgtttgtcgcaacagtaataacaactgcagcgtgttg

SEQ ID NO: 3563 - DNA, 2332 bp, Heterodera glycines
aataaataaagaccggacttttaggcacgaaaatttctcaaataggcacctaaaataggcacgaaaaatgtgaaaaaaatgttcaaaatagaaaaaaggataaaattcgatcctgttgtgttcttgccaatgaacacacaaagaataaacaaatatttattgatcggtcggtggacaatgcaaaaatataataaaaacgaatgaatgagggaagagacaaagaggaggggaatggtctccttataaacacaatgagaaggggggaaagggcgtggagaacaaagtacaaatatgaaaataattaaaaaggtcaaaacgccaatttaacattcccaacacctcccttctcaagcttctaactccttcagcggccggaaggcgagaagcgaatcaccggcttcggcttacgctgcgatcgtcgaagagccattgtcggcgggtcatttgcggcttgttgatcagtccgttgatcgaccggatcagcaatttgatgcgccaaattttgagcttgtccgttgactggtggaattggctgctgatcgggaccaggattgtgtttcgaattctcttcgaaaacacaatttcgacgaagttggttcgaatgtcggtggacaattcgaccaagaactggtacatggactcggtatgtaggcgagttcctgactcgctctacaattgtaccatggagccaataagttttttggttcctgtagttcaaaaggaggactggttcggcggggaaaaagactttttctttggcaccatgccgttcatcgaattgttttgccattttattcgaatagtcctttcttcttttgtcgcgctgaattttgtcgatgttctccgaatcgtttcggtgtcctttcggaaggaccaatgccaatttcgttcggagtttccgtccgaagaataattgatcgggagaatagccatcaatggcattgtttggcgttgtcctgtaagcgagcagcaccttttcggtccaatttttatcgtcttttgaacactttttcattgctcttttaaaggtgtcaacaaatcgttcgacttggccatttgactgcgggtgaaatggcggtgaaaaggtatgcttgatgccgaattcttgacaaaaagcggcaaattcagctgatttgaattgtgtgccattatctgacactatttccttaggaatgccaagacgatggattatcgatcgaattgtgaaaacggtgtatttggccgtaattgaagacatttgatagacttctggccatttggaaaaggcgtccatcagaataaaataaacaaatccatcttggcagggtccagcgaagtcgatgtgtacgcgttgaaacgctttgtcggtgactgtccatggggccaatggtgccttaatcgggcatttctgtgcactttggcactcatcacattgccgtacgactttctcaatttccgaatccattcctggccaatatacatactggcgtgccaaggccttcatttgcacaattcccgggtgcgcaaaatgcaatgcctttaaaattcggccacgcaattggcttggaatgatgacacgacttttgtagagaaggcagcccccaatttccaaaatttcatttcttttcggatgaaatggtgcaatttcgggttccctgcacttcgttggccaaccagaaataacaaaattaacaattttctggagtgtctcatctttggttgttgattccgcaatttcttgtgccgttactggaagatgatcggtttgcgactgtaaaatggtgttaatataacagtccgtttcgacgcaaatgttggcaatcaacacatcttcctcaggctttggataattggctattagccttgagaggacatctgcttgtccaaatgatgctgtattcgtgtatttgatgtcgaaatcataatttgccatgatcaacgcccaccgttgtaatcggctagcggaataaaccggaattccctttttggaaccgaaaatggcaagcaaaggcttgtgatcagtaaataaggtgaatttcctgccgaataacattcggtggaatttctgtactgcaaacactagagccaatgcttctttttcgatctggctgtaattttgctgggaatctgacaaaacacaagatgcgtgttcgatcactttctcggacttatccggaaaaatgtggccaatcgttgcgccaattccgtttttggacgcgtctgctgccacgatgattggaagagaccggattataatgagtcaacagcgagatcgagatgtcatgatcttcttcgctttttcaaaagccttctgttgctcttcgctccaattccaattttcgtcctttcttag

SEQ ID NO: 3564 - DNA, 4842 bp, Heterodera glycines
atccctcaagtccaaattgagaaaatatgacgctccattcagtgcggcataaatatcgtccggtctcgcaaaagggtgtcggtcaattcgagggcattgttagccctgtgaaaagtcgatgcaaacccttgttttgccattcttctttttcactgcgagtattggtgcagcccaatggctgaaatcaattggcttaatggcaccgatttccaaaagtcggtacaattcagcgtttacggcttcagttgcaccgtgtggaattggccgtgccttgcagaaaattggcttggcatcctgtttcaggatcagataaatccgttttcaaagcctcaatcagtgatgcttcatccttgatgtttgcctttggcattggtgccaatgtggcatggatgctgattggctcgcacatctctttttgctgaaccttaggaaacatgacttcccttgggatcagatcaaaagccataatccatggcaatccaaagagattgtaattgacagcactgctaacatatgcagttagcctttttggcggcttgtcaaagcaactgacgacacattgaaacattccttcggtgggaaatggttcctcattacaattatgcatttcaatgtccgacagttccaattttggtcttcccaatttaatccatgtttggattgtgatgattgttgcttgggctccggtgtccccattcatctcacaatcattgtcatttatcttcacttgaagcttccaccaatgaccgcgattcagtccgacattcaagcaatggcttgtcactttgactgtgtgcacagcccgattttgacgtcttgaatttgatgtcgaagctgatctttggggacacatctttgctatgtgtccctgtttttggcatttatgacaaattgcactgaaaaatctgcaatcagatcgccaatgatcagaatttccacaagcgccacatgggtagatcggctttctttgatttgctttgcctcccgttgtgtgctggtttgctgtcgttttcccagaattgtaattgcctttctttgatttgggctctctccattgttgtggacgaagttggatggcatttgttgagattggcggtgaaagaagagccaatgcactgtccttaataagctgcatggctttcaactcttcttcaatttgtccgagagaaatccgtgtgccacttttctctgcctcctccaacattttcaaacatttttgtctcatgtcatggtggtcatcgctcaatgcgattaccaaaatcatgcattttaactgctcttttgtcaatgacaaattagcattctcgcatgatgcattgatgtgagcaattaatgtcgacacgtcttggtttggctgctgacgaatctggaaacattcataccggcggacaaataatgaccgggtttctgaaaacaaacccttcaatttgtcaatggaatctttccaattgactgtgtccggttgagttggactaatgctgtccctatatttggcgtactcgccgtcagccaattttccgagcaaaagtctaacttttgctgactccggtaaatcctttccgtcctcttctatcaggattccaaaccttttaaaccattgctcaaaggtatttcccgactcagagtcgtaatgaaattttgaaattcgtccatcgattgagctcgccaaatttgcatggcttaggctctcagaaggtccaacattttgctgcgcattcatcatttgttgaatccgcttttcggattttgccaaaactgcatcgagaatttgcttcagttggtccgcgtccattgccaaattgttgaaatccaaataaccacacctggtggctccctacacttgctgagtgttaaggatttttgaagatttgaagataaaaccgcgtattgcggaacctcaccacaattgtgtcttttggtttttagttgaattgaactgctatattagcagacctcacaccacctgggtgctattggttttcgatgaattgcagtgtcttcagtagagaagatggctgctgactgcgccaatttgttgtgttcctccaattgaacacacaaagaataaaaatatttattgatcggtcggtggacaaatgcaaataataataaaaacgaatgaatgagggaagagtcaaaaaaaggaggggaatggtctccttataaacacaaagaggagggttggggcgtggagaacaaagtacagatatgaaaataagtaaaaaggtcaaaacgccaatttaacatctccaacaaacaccgtacagtggttcaattagacactaatcagcaaattataatcaaattacttattgtctgagcattagacaatgaaatgatcaaattatttttctggaatatgcaccaacaaagaaatttgatcattttatgatcaattgatcagtgatcattcaaaatgagactagaaaaaattcagggaggggagtccagagactatgttctcttgatcataaaatttgttctcaataaatttattcaaaatttggtgccaatggagaaaaatagcaaattaaactggcgaatattattgcccaaattgttcaagtcgctatcgtatccctccctgttttgagtgtttgatcaatcaatttttagtctactatgtataccaattgagtgtctaattattggagtgtctataaaggttgtcgtcctatttttgagaatttgatcaacaatgaattttgtttggtctaccgtacccccacattgagtggtgatcagatcaaaacctccacaattccctcacattgttgtgttgctgctgtgccaacaatgctttcgctgcaatgccaagtgtgatcggttcgcatgcctgcagttccttctccaccccgtccatccattcgttcagttccgtgtattcggcgtccaactctttgcacagcgcgaaagcctaagcaaatttagggatgaaatttaaaaaattttttataacccctacccccatttattcgttttccaaagggttcgtttgaaatttttaaaaattcacaagttttgcaaggaccaaaaaaatctatcaattcgtagtgtttaatttatattcttatcagtgggcccataaactgtcatgtcagatacgtcttcataaaaacccgtcataaaattgtaaacatttcaaaccgtctcctaactatcgtgacactgatgaaaagctagcaattaaagccattaaagcatactgtatcggggtatcagtgatacagtaatcagcaactatgagaaagaaggcaaaatgccttaaaaattatatggaaaccctgctaaatccatgttttttgtaacaaaattaattctacggcttgacatacacagggcacggcatttacctgctccaactcggccacccgctccgtgcccagctccatcgtctcgtcagccaggcgcttggctcgctccaccttggccatcatcgcgtcttggccctcttggccgccgagggtgctgctgagttctcgcgcaacttttgtcgcctcgacgaccatgtcgcgcagtccgttcttctccgcaacaatttcctggttcagcgcgtgttgctggcgcaactgttggcgcaactgttccaggtcaaccgccggtttgtccgcctgagcgacagggaattgtcgtgtcaagactctcgacatgtcatgaatttcgaagagttttaattattaaaagacttgccaggaattttctggcaaatgaaatattttattttttaaatttgtttgaaatgaattttcgaatatatttttataaaacaaaaatagaatacataattacaaagaaaattaattttttgagagccttttcttggattatggaaaataaaatttttgaaaaaaaattcaaaatttttgtaataaatttattaatttttgggtaagaaatttaataaataaaaaaattcttttaatgtctatcggagagagcgagctgtccgtcctatattggatggggcatgatttttaattttagttgttttatcctctcggagtaaataattctgaatttttggttgttattagataatctctctgctctcgaccgacagtcaattaagggtaaactatttcaaaaaattcattttttgctgggaaaatttaaaaatcaaaagtgggtttaaaatttaaatatttgaagtttaaataaattttgcgaattataaaaaaaatagaaaaatttttctccgcatcattaacatattttggtaggttctcggcgaagaacaccgttcccgaattactaattgctcttaatcgacaaatgacgctttgtcttcgtcattcacttgcctgcacaatttgctcctgcacgtcgttgaaccaatcgacccaaaagtccaacacgtcaaaggtgtgccgcgattggcgttccgcttgtcgcagttggtcagctttgcgtgacacctgtgttagaacaacagttaattatgagaaagttaaaaggcaattaggcaaataattaaaaaaaatcagaggtgatggggggaaggaaagaaaattttaatttttgtgacataaagcaaccaattttaaggggttttggccaaatttagaaaaaaacaaacaaagtaaactgctaataagaatcatcgagaaaaactcgaaaatttagcgaatttggcaaaaataaataaaacgaaaatttcaaaaaatttatagacagggggttatcatcaaatttcaaaattacgcaaattaataaataatcttttaaaaaataaaaataataacaaattaatctaaataattaattttaaaaccaaattttccgggcacaaaagtaggaaattttctattgaaaaattatgggagagagggatgaaaatggcac

SEQ ID NO: 3565 - DNA, 1212 bp, Heterodera glycines
ttaggcttaggcttaggctttattttgtaaaatacgagttgccttttatacttttgtacgagttgccactgacccggaatatggatatcatatgggcaacgatgcactttatgatggacctttttttgagatttgtcaaattccgactcaatttttttcaataggatttccaaattattaatgacaaatttcaaaaatctaatttgcaaaattccaaagcttaataaaagcattaacttcccccccccccaaaaaaataaaaataaaaattccctccgtcggtcagaaaaaggcgcgttcctccaccttttccgcctcccccgcctcgcgtggcatttttccgcgcctccaccgttcgctgtcctcccagcagcagcacaaattgttccgtgccaatgcgccggcgcacccaccgccgccgttggatttgcgcgcattggacgcggcggacggaacgccaaataacacgacggactatttggaggtgattggaggggggatgagggatcgaaatcccttctcacattgatgtgttgggcttagatcgtaattgtggtggaagtttcgagaccgagtgaccataagactcgataaatgaattcgagaccccaaaacccaaccaagagtttggcgagtgaatgcctcccccggggacgggacaaatctcggcgctgaaacttttttttttttaatttttaaggtgggccgagcggagggcggttggattcgggacgcaaatttttggagcaggcagcaggaattttggcaaatgcaacaaaaccaacagcatcagcagggcaataccatggaggatggaaatgacaatacggtagtggtggtgatgggacagcagggcgggactacggtagactgggacagcagggaggagcagcaacagcacttggacatggagacggcacgcacatcgcgcaccgaggacattatccagtgagagggggggggggcagaaaacggggccaaaatggagaggggacagacagagagagataattagcagaaaatggggagggttgggaattaattaattagttgacgaatgaatggcaaatgccaaggaacaattagcaccaataattggactcatatggaaactgtgaagtgaacgatcaattaagcagaagtgatcgagcataaatgaatgaactgttcgctaattgagttagtttgaaacctgagaatcagaaagtttca

SEQ ID NO: 3566 - DNA, 4855 bp, Heterodera glycines
  unsure (1)..(4855): unsure at all n locations
attgttttttaattttattatttagtttaatcaaaaacatttaaattcataatattatttattcatcaaatgtatattttatttattttaaattaaaatgcaaaaacaaaaaaataataattgttttaattaatcaagaaagcaacaattttataaaacattaaattttctaacattgaaatgaaaattgtgccaaataaagtgtcgaactctttttgtctgctgatgttttcatttttcactaattactgctaattagtgggtgtttggcaccacagaattgtccacaatattttccgccgctttttgtctctccgtcaaagtgccgtcccggcgatttttttgaagtcacagaatggcacatgtggtcgagtttgactgcagcttttgccgttcttgtccgcattgttctcctccgctgctggcgatgcttttcgaccgcggcgatgggacggaaacagcggaagagtaagcgggcggcggaggaccgttgacgggcggcagaccgccgggtgaattgtgctggcgccgcagcagcgactccaactcggccaattttgtctacaaagccgagagtcgggatttgaccggattatgcatccatgagattgggaccgaaggagttttccaaattttaatttggactcgtatttcccggaactcggcatttttgccgcttttttggctttggcatcctttccaaattgtttctcgcctcctcctccacctgcagttggctcatttggctttgatgcccccggacagtgtttttgtgctccgccaattgacttctcagcgcggcaatttcctcgcgcagtctttgcgcatttttgggcaaacttaagacaaaaaatggcactttttggccatttgttttttttttactttctgtgcaaagccgatgagttacaaatggaatcggaattagcctggaaattgaggaaataaacattcgattccaaaagtttaaattcaaaagttgcgagtgattgtcggaagtttcgccataaaacagaaaaaaatgccaccgaaaattgcactaaacatggaaatgaatgagactctgtgctataaaaatgccgggaaatgatttgcatttccgcatcgagagtttttatgttgtcgctaatggcatgccataattgaaattcaaatgactttacgatttttcggtatgggatgacttcggcactttccaactcttcccgaatccaagtggccgtcccttgtgccattgcgctttggtcgggcgccgaacttcgtctgatgtcaattacttttgggaccggcgccacttttctgctttaaaaattaattataaataatttagaatattgcagcaatcgaccttctgtcactgttttccgccacttttttgtcgctttcgccgctttgtgccgttgccggcgggaaaggttccgttgacacgtcgaccacgcagaaaacgcgcgagtgcgtgccgaccagcgcggacagtgcgagccgcggctgctgtgatttgcccgcgacagaagtggtggaatgtgccgacggtgagggcggactcagctgaccggaagggtccggtgccgacgaagtcgccgtgggggacgaaacgctgccgaacgatttgcgacagatatccaacctggacaggggatgacaaaagcaacggcttggagagagttcagttcagacaatcggattaacggaccagcagatcactatcaatttgatagaatcactgatcagtccttccgatcgaccgtctaatggtccaaaccaacaaaactacagcacagaagagaagtgccaacctgagcaccaaatggggctgcatcataaacggttttggcttgtccattaggtcgtctctgtttttcaaccgcactaattggccttcgcgcgtttgcgacatttcgtactgcagtggttcgcggaacaaatgcctcaccgtcgtttttgtgctcttactcttcttcctcttcttcctctccttctgctgttttggttgttcgacgggtgttgcctgaggcaaattcactttttttgttttatcatatttactgaaatagaacccaccccctgaattagaagccccccccccccagaaaagcccccattttgagggaggttgaaaaatagagtcccgagttttattccgtaagtacagtatctaattgtgttttttttaattttaaaattcgcataagctcgattgaatggatgccctccctaccgtattcccgtcgctgttggtcaatgaggtggcggtggaggacagataggagcaatcgctggtgccgccggcgccgtcctccgccgcctttgcgctctgatcggcaccgccatcattttccttgggctgctgcccctcagccgcccatttgtgcattccccacgagtacagcttgttgtccaatgttccggccattgtgaagccgtcgccacagaccaaatgctaattgtaaattataaaactgcaattaattaattaatcggtaattaatcagttaattatttgtctctaaccacgcaagcctttgacaggagcgccttgaccggacacgtgcaccctgcgggcatttcctggcaattgccgtggcccaattcggcggccaaattgcgcccaaacaaatggacgtgcccattctccaaaagcactgtaagaaaaatgattttgtgtggcggttttctgtcccactgaaagatggaaggcctaattagacaatttgcaatggctaataagccaattaattgtcattgatcagtcagcctttgtgccgtaccgccactgtgccaaaggccaagcgaggcgttgaccacgcgcgaggggaacggtttgacagcggtgggcgttaaaacgttgtcaaccacgccgtacattttttgctgaaaattcactcatttttaaatattttcggaagaatttcgtcgaaaatttgacaaatgagaattactccgtttgtgctgctgctgctctttttggcatttgcgaagaagccggagcgttggttgagctgaaaaatatgtccaactttcacaaatttgtctttttaattatgccaagaaattgcattaattaaggcccaattaaacgcccaataataattaatggttggcgcacacacattcaatttgttgtacatgttcgaccccatagccaaaactgtgccggtgtttgtgattaacattgtcgctttgggaccacagctaaaaaaagtgggacaattaaatttaaattaaaaaataataatccgctttatcactcattacacaatgctgttgatcaattgtcgagtgggaatttgaattcggagagggacaaaaactgaaaagggaaaaaaggcgtaaaaaagagatgaaaaaaaaacatttaagagaatagaggaacgggcgaaactgaataatccaaattaataattaagtcccatttcggcacatttccccccccccctcggcgattatggcagtatttttggtacaatttcaacaatatcccccagggccctccctattcggcacaatttgccccccccccggcgaccatttgcggtttctcctgtgccaagtcggccattctctcctacgccccacacgaacacagcgccactttcctgttaaatgtatgcttaatgtgccaaaatcaaagcccatttgtgtccaacaacaactcactgtcaaaacggtcgcgtgctcttcgccacagcaaacgtcgacaatgtcctccctttgaattgcaaaatgagttggcaatttaattactaatttgtaagctattttatgagaattttagtccaaattgggcaatttgaaatgtcatcctttcactgaaatggttttcggcacttttgctttgccccccccccccggcactctgtctgtccattcacttgagcagtgcttcgatgattttcggcttcaacaagtccacatccgcctgcgctgtgcccataaattggcgatggcccactgccatcgcaatgccacggccagcacagaacaaagagaagtgtttgcctgtggggtaattaagggttaattgaccaattaactaattgtgcattgaaatgccgaataattctcgggttgttttcgcacctgctgccacgcgggacacgcctttcccgcgcaacgcttcgatcagagttggccccgtgcgcacgcgacggtcgccgtggcccaattggccatggccattctctccccaactgaacacgtgctcgtccgcagtgagcaccaattggtgggtgacactcagcgcaatcttggcacaattaattatacaacattttggcacaattttaaataaaccattttcctttgaatcattaaaaatttattttaaatttaatttttataagaaatcaagaatttatgctggatgatgctgtggcattgtttgaccttgaactttaaacttttcatcaatttgactttaataatggaccctaattgagtcgactcctttaatcaattgcccttttgaattttaattaatttttatccctttttttcatttttttttttcatttcatttatacgcataagcgtgacgccgaaaaataagaaacaatgaaacaatatcaaataaaacaaacaattggtcacttttggagctggggtggcaaagaaatcaacaaattcagatcagatctttcaagaagtttggcaaactcatttggatttagtaatctcgtctctttaggtaaaagtctatagagacgagaggttcgaataaagaacgagttgtatctaacattggttgagcaataagctgttcttatagtgtattcattttttacaatgtttttggaaaaagaaaaggattcaaaagattgtaaatttattttacctnaaaattatttcatgaaaa

SEQ ID NO: 3567 - DNA, 3122 bp, Heterodera glycines
  unsure (1)..(3122): unsure at all n locations
aaatttgaaaaaatatgtaaaaatgaaattaaaatattttaatggatttaattctcattgaaattaagaaaaataaaataaaaaataaaaaagggaagtgcaccctcacccctcccattaataaatttctcgactttcaaaaaaactgcagaaaactcgtaaatcccggtacggcgtcgccaagcaggactgggacgcgcaaaacgcatatgttccaagactcgagactcaaaccgggcacttttgtcgtgccgagactcgagaggactgaacaggaaactctccattcccgagttaagtggccaatttcaacaaaaaaagtggctaattatgatgatcataaaatctccgaatgatcgattggctttgcctgtgcaaaatgttgttgtcgtgcaagtatgaaactgcgctggtcatctgctcgaaaatgtccaccacttcgccctcgggcaacggctgcgcgtcgtcgcggtgggccaacagttgcgcgagagtgccgccgtcagcgtattccatctcaatcatcagagtgccgtcctcctcgaacgagtcgaagtagtggatgatgtgcgggtggtcgagccgggacagcagcgccacctcattcagcgacatctgacaaggcaaatgagcaaaggactgttgcagatcagacaatgtatcggctgattgaccaatttgaaaagcagacaaatttttttgatcagaatggtgatctaatcgaatcgagtgataagatggctctgaccctactgaccagatcagacagatttgatctatcaaaactggtggctgttactgatcagacaatgctcatctgacaattgattcagtcaggtgatcaccaattgatcaatgtgatttctaattaagcgattaaaaagcgatctagtcaaattaagttgatcagagaccaaattaggtatgttaatggtcaagcgggctttatgtaatcacaagcaaccatttgattgctaaggtccgtcagtgattaaccacattaatcggctcaatgaatgcctaatgaatggaatactgatgagagcgattaaagaacttgatcagagtgttttctccccgatcaccgacagacattgcgttcggttggcgtcagctcgtgcaaatttatttccttgaggataacaaatgaatcgtcgtctttgcgccggtagagaaccgcgatgccaaaagagcctggaaaagtgccaatttcatctttggccattttgcctttttttatttgttttttttaaatttttgttttttctaatttttctcccttccgacctttgccaaccgttcgaattcgctcatatgctgccgaactgtgttttgccaatgcgcgacattcgctgccgccgccttcggcaaaagttttggccacgggcgacgcgtgaggcgacggcgtataggaggaataaaggggcgccgtgttggaaagggcggccgacggcaacgaatttttgtgcatttgtaattttgaaaattcgaattcttgctttgatatttaacaagaaaaatggggtccagacaatccgtcaatggacaattcttcagtgaaggacagacaatccgtcacaattcgtcagcaaatttatttgcttgagcaatgatcaaaattttgcaattattatgtaaaaaaaaattggatggaatttacaatattcctaattaccgtatatgctctaattatagcccatgggggattatttttcaacctcctcagaaaaggggggataattagagactgggggattatgatagagggattatttttcaaaacacctcgtagactgggggataattgagactgcgggattaatagagactgggctataattagagcatatacggtactatcaattctatataaattatattttaattttttttaatgcttcttcattacttttttaaaataaaacaaattaaattaatttttttttaacgatttaaattctttttcacgttttaacaataaaattttgctgacggattgtccgggagcaaagaaaaatagcaaaagaggggccgaacgatggcaaattgggggtgggggcggggaaggaaagcccgagtttctcacgcattgtgccgcgccgagggttcaagcgaaatgtgccaacttttgatgcccttcccatttcggcattcgtcgctcattttgagctgtgcccgccgcatttcatttgactgccgcgactctccgccgctgtttttgtttccatgtgaacaacaacataatacataatattacacatattattattttgctgctcctccaataatggcaatggcacacataatttgtgtgacccgacaaaaaaagaaatgtgacatttaatgggaatgtgaggagggcacagaaatgccattgtttccctacaaaaaattcataaaattgtaagccatgggtcagaagaggcattggctntaagacattggaattctcgaganaattcgctttntacgaaattttaaaccgaaaatgagtctgaaatttgagggacaattcaaggcaaatgtcaaaaagtcagttgatcaatggatttatggtatggcaccaaagttcaaaaaaggatatgaaagtgtgagatcatttgaatttgattttcttggcatttctcggcgtttccgtcacatttttgagcggttttttcggcgactcaatcgcatcggcggactctttgacccacgggacgcccgccaaatccacaaaaatggaccattcctcttctgaaaatgggatttaaaatttaaaattgagcatttcgcgcattaccattgttttgtttgcgcactttgcgcagcaaattgcgcaatttctcgctgatttgcctgtatttggtgatgtgattgtacgggtcggcacccaactcgacaaaaaggagcacatccaacaaaaggccgaccagacgagcgtacagccgagaagtgcgaatgtgttgctgaatttgggggatttgttattaattatagacaaaaaattccggtaaaaaagggggcaagtgcaaaatgtccatgccgcaaattcggacagaaaaatcatatcatattttaaagggaaggatgggtgagtcccactaaaaccctcacaatattccagcagatcagattttaat

SEQ ID NO: 3568 - DNA, 1050 bp, Heterodera glycines
acctccggatttgccgggttaaatttcagcagcaagtcgagcaccagcgcgtcaagtttgttgtgggcatgctcagagaagtgggtggtgttgggatggacatggcacagcagcaaatagacgagagggtggtcgtccaagtcggcaacactgttcaacagcacgttgcgcttgtgggccgacgcggaggaaacggaagcggaggtcaaccgcaacagcgcggaggaggaggaggcggaaggcggtgccaacgcggagcaggaagacacattcgcggcggcggaggaacaactgctgatgttgccgatgccgtggtttgccgccgcccctcgctcttcgtcaccgtcgctgcccaacaacggcgcctcggtgcggtggcgtcggcgcgcggcggtggcggcgtaatcgtactccaacagagtcaacaggaacagtttgtactggtcggaacggacgtcatttctgcgaaaaagcaaaaatgggagtcgtgtagattcaaaaaattaaaagaaaattgtaaaatcgagcggagagatttgcccggaacaacttttttttttttactaaaaaaggacaacccaatttattttattgggattaaactcggaaaaggctgaaatggcgaaaaactttcaattttaaataaaacccaaagtaattggatttttggggtcgatttgcatgaatccataataaatttgaatgccatatgtgcaactcattacctgaaaatgttgcagcatttgtcaataaatttgcgcacattgtcccgcacttggccatcatcattttggtccgcctggtcaccggtgacgacgcaaatccaaagccagcggaggtcggcactgatcggcggtcgaagctcaaggcaatccatcagaaaatcgtacacatccaacacgtgctgttcaatgtcctttggctgattctataaaaaacagaatttaaaaaattcgctcgtttttcttttaaatttttaaaattcggggagggaatgaaagcaattcccccccccccagaattcaattttcacttcccctcaaaaataaa

SEQ ID NO: 3569 - DNA, 6671 bp, Heterodera glycines
acgtaggccagttgatcagtcagcgtaatgtgcgaaattttcccgttgaaaactttgagctcaaatctgccaatttgctcggtgaagtaaaagcggaaccctttgaccagctcgatcagctcctccttttcctctcgcgttttcaccgcatagttttcatcgtacacctcttgctcaaacagctcacggaactccccaatattctgttggatgtgcgcggatgggttaaactcgggcgcctcccagggtagctctgagtgccggacacggtacttgtgtacagcattcacaaagtggtaatcatccgtttcgtgcagatagtgtacgtcgggggttgggtctttgccgtgcaccagcctcatgtacccgcctcgccacggtctgaactctttgagcagctccaactctttttgctttcttatggcctgttgctgtcgtttaagctcttccaactgcttttcctcctcttgctttttcttggtctcgttttccgctctctccgcttccgcctttgccgctctctccgcttccgcttttgccactctctcttcctctgcctttctttcttttgccactctctcatcctctgcctttctttcctttgctactctctcctcctcagcctttttatccttggtctctttctcgcctttcttttcctttgctattctttgctcttccttcttttcccgtgccaatttttcctcccttgccttcttttcacttgcctctttctcttcctttgccttcttttccttggctgctttctctgcagtcttccttctatcttcttcttctgtcttacgacgcctctcctcttcttctcgccgtctacgttcattttctcgctgctttctctgctcctcttcccttcgctttctctcttcttgtgcccatttttcatgccgcaacgtttcttgttgagccgctgattgcttggccaaatatgaaagtgggtttaagggcgcttcgcccgtattgtcttcttcctcctcaacaaacgagacgtcaagaatctcgccctcctcctcatcgtcgtcgtcaatgttcccaaaactttcatgcaccggtgaggacctttttcgagtcaacagccgttccacttcggcaatcatgccatgatgaatgcccctctcaagctgctgtggcgagagaaaacttccctttggcacacggaaacggtattttcggccgtcgtgcaggtgaacaatcacatattgtcggtctgatgtacccagctttgcccaacttaagccaaaaatcggacccaatagccatgatttttgcccacctgtttgggtaaattatgcctgacagtccaaccatccacccggccccatcaaacaccaacttctttggcaagtgcactttgaatttgtttgttttatttccaacaaagcctggcgtattgctcggcaaaattacaaagaaagagtttgtcatttgatcaacaagtataaattcttcaaaatgagatcgtccttatatcgtggtgtgccatctcggttcactttcccccatctttgatccagcggaaactctttgccatcgtcgtcgtcgtcgtcgttgccggttcatccttctttaggtgcttcatgatcagatcggtgcaatcaaagttcagctttgcacagtcttggcaaaacgattgggtgaactcaaggcgttgctgctcgccattctgattgatgagtttgaatcggctgttcccctgccggaaattgtcatcacgacactctttgcacatgaacgtgaacactccgtacttaagaaattttcctattttttcaaattaaatattagccaaaacctttgggcgggccaatttccaaaatatggtcgggtactcaaacacattggtcggttgttttttgggcgattcatctactaaaatttggctaatttaaagaaatttgcataaaaaagccaaaccttcagcttccatggcttttgctttcttcattgcggaagcaatttcctcatggattttgtccaagcgaggcttgcgtcccctttttgagggccccggttgcaggtcaagcagtgtttgagtgttgttgttgtctccaattgtgatgacgtcatcatcatccatttctttaaatttaaaattattataaaaaactcaaaaaatgattacttttgttctcaaacaccaattgatcattgatttttctcggggccattacgattaagaaatagtttatgattataattgttaaaagcataaaatgaacctgcgaaaaaacacgtaattatttattgatagtgagaggggtgttagcgcgcagcgacctccagacgggctgtcccttcttaatcgataggccacgcccatccacaaacacatagacgagagagtagtggttagagaaagatacaaaagggcgccaattcaaacacacagtgaatcccaagccaatttatgattttttacagattatggtactccctctgactgctgccctatccaaactgctaaactgtaaacccgaaaatttagcagaatatttgaacaaccccgaggcggtaaacaaagcgaacgcttacctggccggcaaaaaactcaaaacaacctaccagggtcgtgattccaagaccaaagaggtcaagttcggcacattttcggtgaaagccgctgcggaaacctacgcctttgagggatttcttggcaagtttccaaaaattctgtttcggtctaacacacatgcgttcagaggttaaagtccaccagtatttctacataaagcaccggatccgcctactgtacccacagctgaagtgcattgttgagtaccacaacaagggccactgcaaatactatcccttgggtatacaattttgtccggaaaaaaatcaataatcattttcagagttgttggccgttgaggaaggcggggagagtgaacccgtcgaaagacctgccgctgaaacggactacctggactacttgaactttcgcagtgggtggcaatcaacactctactgatcaatgaagcgggtgcggcaatcggaaaagttgggcgaattcccggagattgagttcgccgtcaacacaatgggcgtcacggtgtactgcccgcggcacctgcaaacgcctcggtttgtgccatgggaccagcccgggcggtgctcgagctgtagaagcggaactgttgagctggactacatcatccagcccgagggggtgaccatcttttcgaatcggctaaagacagacggcgagaactttgtgccgtttgatgcaattggtaagctgcaggtgtatgtcagagtttgactcttttcttaagtggactttgccgatcgtgcgaaattccgcattagggcccggaacaaggtgttcacgctgccgctgcgacacccggaggtgcacgccaccggcccaagcttggaagaaggcgtaaaagaacaaaaggaaatgactcagatggcataaacacttgtccatttttctattgttgatattctgatggactacccaagaataaatgaaagtgaactcgcttttcccatctcttcggggattattgtcagcggtccgtcctcatcgggcaagacccagctggtccttcgcctgttacggcatgccaacgtgatgtttgacccgccgcccaaggcaataggtatgtgcaaagggggtttctgtgcagtgggctgttgctatttagtatgggcatacggtgagtactcgacgcagattcccgatctggagcggcagggagttgtcccccacccaggtgccccgtctgacgagatgctgaaaaagctgccaaagccttgtctgattgtttacgatgacttgatgggtgacattgaggccaagaaattggccgatctgtacaccaaaaagtcacaccataacaatttttccgtgattttcctcacgcaaaacctgttcgataaatcaatgcgggtgccaaggtccaacgcccagtacatcttcctgatgcgggctcccaacgacatgcttagcattcgtaatttggccagccagatgttccctcgcgagcagggattcctgatggatgcctaccgacaggcatgtgccctaccgtacggctacctgttggtgactctccacgcgaacagagacaacattatacgcctaaggacaaacattttcccagatgacgaagagagaatcatttttgcccccaaaaatggttaagcgggaacagaagatcggtgagcgggttgtgcacaactacgactatttgaagaagttgggaaagacaacgtcggagaagaagcgccgtcatttgttgaacagtgccggttgtgaggaactgttaacgcttgtcgagatttgtctcaacgttttgaacgggagtttctgtctgagcaggaaacaaaagcagagacttgcgccatttgcaaaagacatcagacagttggcacgtgtgcgaagcgagaggggtgcgcgaaaactagtgcagcagtcaggcggatcactttttgcccctttgttggcccccattctgattgaggctgcccgatacctgctttcgcgcagcaataatggccaataaacttattctgctgccgtacgagcactacaaggggctggttgcagcgagggagacaaagaatgacgacgacgacgacattgctgagcggacaaacttgggctttgtcaaacgacaggtgaccgctgcagtacagaagcggaagggaaacgtcagcgagcggaacgcaatgtacaaccagcagctgcgccggtacctgaagatgcgcaaggaacataaggagcggcccgtccgagtacagctcagcaacggcgctcaactgctaaataaaacagtggagacgggtgtgcaggtacggcctggtccggacgaaccgaaggacaagtccgtgatggttaccgacgaagatgaagaggaagaaattgaagtgccaaagtttttaaccccaacaagccagacgcagggaagcagccgaacacccaggaccaataagaaagcggctaaacagcaaaaattgatcgagaagaaggaccacctgttggccatcattatgtctgatccgcagagattcggcgcaactgaccgtgggaaaatcattaacccaaagacgggccgagagtttatcgactcggacctggcctggtcaattgaacgcctggtggaccctcgcccggagaatgccccttcgccacgcggaaccaaagagttgaagaggaaactcgcacagaatccgctcgccagtagcctactcaatcgactgtttgttgggtctgggttcgtcggacaagtcaaacaaacgagaggatttgttccctcaaaatggacaagaaaataaacaaaatatacaccgacccggccaatccgggcgggtatgcgggtgcgagtgccctgtacgcggcggtgaagaagaagcacccaaagttgaagcgtaccgagtttgaagactttttgcagaggaacaccacctacacgctgttcaagccaaagagggagaagttccgacgcctacgcactgtgcctacgggtttcatgaccggtaaattgtaccggggcttattgcgcacaattcagggttcagacgttcaggcggacttggccgatttccaagccctttcgcgcaagaacagcggctaccggtacctgctgttggcggtggatgttctatcgaggcgaatgttcggcgcccccgtaaagagtaagcgcccagtggacatgaaaagggcgtttgaggagctatttgagcaaatgccaagggtgccggacacactgtacaccgatcgcgggttagaatttgtggcaaaaccgttgaaggagttttacgcggagaagggcattcaaaagtttgagaccagttcaaagaagaaggccgccgttgcggagcgtgccatacgcaccctaaagactcggctgtacaaatatttttcctccaacaacacatcggtgtgggtggatgtgctgccaaagtttttgagtgccatcaacaactcggtgtgccgcgcgaccggccttagacccaacgaaatcagcgacgccaatgcgagggaggtgtggaagagggtgtacggcgaaggactcgcacaattggacaagtcatcaaagatcagagctggggaaacggtcagaattcccgagcctaagcacattttcgaaaagggtactgtaatacacacactttctgacctatttattttaatttttaaggttatatccccaattactctgatcacgtttacactgtggatgaggcccgctcaaccaacccccagcactatttgctcaaagactattatggcacaaagttgaagagaaaattttatttaccagaattaacaaaagtacaagtggatgaaaacacaatgtatcgaattgaaaagaaatacaaggaacgagtgagagatggtaaaagagaaatgttggtgaaattcattggatttccggaaaaatattgggtcacaaatgaagaaataaatgaataaaaatattacaaaatgacgaaaatcaatttaaaaaataaaaacagttatggcataatatcggggtcatttaactcctcttctgtgaacatgttcacattgaggtctgggttgaacagacaggtacaagcgccagggcagttccacttacaccactcttcgtcgctgtacccaaagggcaccactttcaagccgtgatccctgaccacccccttattcacggtcgggt

SEQ ID NO: 3570 - DNA, 2378 bp, Heterodera glycines
caaccgctgatctgatccgatcgatcagtcactctgccctacttaaattggccatatccctccccccattttcaacatgtgctcttttcttgccatttcttccaccacttccgctctcccccctcattctaccgatcagatcgatcaccctcccccgaagcgatcatattcattcccttaattaatcatcactccgctgcgtcccttcccttccctcctcttcccatccacccttcctttcccttctccttagttgttcatccaccttttcccctcgagggtgcttatctctctcccctcccctcctcccccttttacctttccaaatgccgccctctctctctctctcccccatttttttcgccccttcggcccattgccctttcgccaaattatcattcgttcccccaaaggcaaatgccccgcaatttgtccaaagtgttgccgactcactcctcaaatagcattgcatcgcttcaccagcaaaaagtgcattttgcgcgcgcatttttttccattgcttcgctttcctttatttttcccgccccactcgctttcagccgatgtctttccctttgaccattcaccgacactgatttaattaatttattcaattacactgatcattcaccaatgtgcctcctcccaatcgcctcacttcgctttgcctttgtcggccttttggtaatggcccaatcgattggtaatttattggctaattgtttacccatttggtgactatctccctgattctgatcatcttccacagttccccaatcatctcttccctcctcgtccttttcttccaccgactccgtcccttccgatctgatcgccactttccccctccaaacgcgccctttccttgccgagcccaacgaagagccatatttggtgcgcgagggagagaagggcccggagttgaactgttcagtgttggagcagtaccgaaacagaagccgatatgaaatggaatggaccaaaattgtgggcgaaacgccaatgtaatgttttaaattagcattagccattggatgtggacgggatttaatttttaaaatttagtttggtttcacggaacgaacggctgttttccccctccggcaaagatggctattcgttgacagacactgcggcacaggtgggaaaagcaaacgcattctgtgattagttcccatttgtgatcagaacggggcctaccatttgcggctgaaaagcattcaatttgcacgagacaacggccgctttttctgcgctttgatcgacacggagacgcgacagcaaatgctaagcgaaccggcccatgtgattgtgttgggtgagtgacaaattggacggcgtaaagctaaggtggaaccgatcggatagcaaatgatactgaacagaagggactgatcagtctccctctgctggtgatccttcgatcgctcccccccccccctttccctttcaattggctaaaaaatatttgtctttccctgaagaaacatcccatttcaaacattgcgcattcatctcaatttttataatttgccttaaaatattcgtctttctctgagcccatcggaccatgccaaattcacttgcaattccattaattcttttccttcctctttcataatcatcatcttccaattttctccgattttccatttcaaccttttattgttggggaaacaagattgagaaaaagagagagaaagagagagagagagagaaagagagagagggggggggagagaaaacaagagatagggagagagaggaggataggagagggaaaggggtagaaagtttcttttttcgacctttaaaagtttcagaacagatgggccaaattgacatttgtgcgtcataaattttaattaatgccaacgattcgcgccaacagattccgttggtctgtcccattgctctctctctctctttgtctgtcattggtccgttacattctctcccccttccaaccgcattctcagcataattacgccgatactaattggtctggaatttgtttctctgcgcgtttgtttggcaaaaatttggaaaattggctatctctttttctgctccacagcaataggaattccaaccgcattctcagaataattacgccgatactaattgttctggaatttgtttctcggcgcgtttgtttggtaaaaatttggaaaattgaatatctcattttctgctcaacagttataggaattccaaccgcattctcagaataattacgccgatactaattgttctgcaatttgattctctgcgcgtttgtttgagaaaactttggaaaattggctatctctttttctgctcaacagtaataggaattccaaccgccattctcagaataattaacccgatactatttg

SEQ ID NO: 3571 - DNA, 2156 bp, Heterodera glycines
  unsure (1)..(2156): unsure at all n locations
ccccccccccggcaaaagtgggtttttttttcccccttcccttttttgcaactttttcccgcttgcttttgaccatttgtcaattcaacagtcaattagggccccccccccccctaatcgtccacaaatgtgtgctttccttccttttctttcccccgggcaaagttacccaaatggactgattcttttgcggataattgcctcncggggacgaaattggacagtgagcaaagggaaaacataacgaaagagcgaaggaatgaatttggaaaaaaacaaggcgtagataaaatcggagaaaaacgtaaattataaatggggaaaaggggaagggaacaatacaatgatggatgatgggatttggggggatttggggggagggcatttttatcagattagtgacgatggcattgccacttttgacttattgtaattggaaaaaacgcaaagacaaaaaaataatatccaataaattatcaaaagatcgcatttctttttgcaaattacggaggaacgaaaaatttacataaacgaaaatgttgaaattcaatacccaaaaagaaacaaaaaatgagagggatttacttggaatttgttttttccgtatataatccaaatcaaaatccccccaatagtgaaaatggcgaatttatcctccggtgaatgcgttaatcccttaatttggcacagatggattagtggcacttcgccaatggtgaaagaacaatctgaaaaagtggtaaattgtaaaatgtgagaggaacgaggaaacattaaacaattataaattaagtattaggggaggaaattgtgcagagacaatcaaagtgagaaagcatttgaacatggaattataagtaatttttcattagaatttttaaatttcattgcatttttagcgatctctaatttccctttccctttctctctctctctcattcccatttttgtccgacaattgtcattatttgccgaacagatcaaattgccacaaaatatgccgccgaaaaggaaaaaattgcgacggactgaattggatgagaagggagggaatggcacagaaagaagtgccattgtttgtcgaagaattattttttcgttgaagggttttcatccgatccaaagctcgaataacaaaaaagccttatatttaaaaaacagcgaatgtttttctgctttagtgccgccccaaacgccgcaaatcactgcccaaccgacggaagcggtgcgcgagggcgaattcgtcactgttcgctgtgagtcgcaggacggaaatcctttgccgcgcttccaatggcttttcgacaaccgcacgcgggtgccggacgcgtggttccacgaacggcacgaaggtggcggtggaagcggaacaaagccacgcgcgataagcacgttacaatggcatttgacacgcagcgacaacggcgcctatttaacatgccaaacttggaacaaagcactgcgagagggcgaagtgatcaatgcggagacgaacagacttaacgtgagaaagggcgagagaagagagcgagagagtgaaagggaaacaaaatagtgtaaccaggaagagagaagacaatgaaacaaacgaaatacaagggcaaagagagaaacagacgaaataagaaaagagtgacagaacacaaaaggatcgaacagaaagtacggcatttgttgaacaggttttgtacgcgccacgggtgaaggttgtcccaacagtgcccgaattgaacatcgaggagggcgagctggccgagctaaagtgcaccgctgatgcgaatccacccgcgacaaatttcgcctggacgcatttgccgtcgggcgaaacgcacgccgaccgcgagtggcgcgtacacgtgcgacgcgcacacgcgggcgaattccgttgcactgccgtcaattcgttagactcggcttctgatcgcatccgtctcaatgttctttacgggccaaccgtacgcattcgaacagtcgccgggggcgcatcgggcggttcggtggtgagcccggcggagggcgatcggctggtggtcgactgcgaggcggacgccaacccaaaggcggacgctatcgcatggagcggacctgggggcttccaacgtaccgggtcgcggttggtgatcgaagcggtcaatcgggttggcctttttttgatt

SEQ ID NO: 3572 - DNA, 1880 bp, Heterodera glycines
cgcttaacgtgggcgagacgatcacgctcagctgctccactgacggcgacgcgggcagtccgccggcgcatttccgctgggcggggccgccaacgaaaggggcgtacgaacggaaagccaccgaatggaacaaagcgcagctgagactgccggacgcgcagttggcacacaacggcatcttccgatgtgtggcacacaacgaactcggccaaggcgaagaagcgaccgttcggattacggtaatggaaaaacgaaaacaaaacggtcggaaaattaaattgaaaaggttgtcgaacccgcacggatttcgcgaatgccaatgccaagcaaaatactgaacaatggggccaacgatgtgaccatcgaatgtgaagcgcgaggctttcctcggccgtccattcgttggctgcgggacggagtgcaattgcccatcgaattgtttgtccattggacagtgacggaacgcatggcggacgcatccccggagtaattaatattcactattatacccaattaattcatgtcccttttagtaaccgcttccctttctcttttcccttaattagtgtcattaactcacttgattagtcgttgcctttccctttttcagttgtccttccgatgagagttgcgtccgttccattctgtccattctccgatttgcgcatccgatcagttgggctgacaagggcaattactcgtgcttggcccacaattcggccacttctccgcccgtcagcagtcaatcgctgctcagtgtcatccatcagccgattgcattgaatgaacgatttgtggacggattggcactgacagcggcagagattggcgcatcggtaggaaaattcgaacataatttgcatatgccaataaattaattcgaattaaggctcaaattgtgtgtcggatttcggcacggcctgaaccaaaagttacgtggagccgagacggaacagaaatcggcacggaatttggagggggcgattacaaacggcacatttcgcgggtcaaaggtcagtgacgcgggaggggggaggggggctgtccttcacatttccctctccgttagatgccgtagacgagtttgaggcggttttggagctgagagaggtctccgaacagcactttggcgtgttcacttgtgaggcgaggaacggagtcggggcgaaggcggcggtggacattcgattgcaggcaccaagtaaagtgccaaaattgacaaacggaagggcctttgatcaatccatgccattatttgttttccccttttcggtcgtcctcaaacgccgcttcaggccaggcttattcagtccggcaccacttggcttatggtcggatggcgccccgccttcgacggcggtgatcggcaacagttcgagttggaatatcggctcgtggacccgtacaaaggaaaggccggcggagacggacaaacggacacttttttcttctcagcgcacaattggacggcaatggctttttacggggtttttgtttattttgatgccatttggcattcatttgataattcatcatccctttttgagattgacggcgatcgcgagttctccgctcgaccggacacttttttggtgcacaatttgacccaacttctgccccaaaacggcgtttggtaccgcgtccgtgcgctcaattcgcgcggggtgtccgattggacggcaattgccaacggcgaaacggcggatgcgcgcgaaagtgcggacattcaagcgccagagcaagcgatgtacttggaggacgagcagaaactggtggttcaggtgaagcgcaccaatgaatttgaagcattgcttttttataacaataattaaaatcgtaaatttaaattttcatgccatttcctcccggccattttcagc

SEQ ID NO: 3573 - DNA, 2129 bp, Heterodera glycines
ccccttctgtctccccattcgcttcccgcctcccccgtttttttctccagtccatccatcttcttctacatccttcctcgttttgtttataataatcacttcttttcttctcccttcctatcacttctgcctattccatttctccgtcctctttcacttcctcttccgccccatcgtccgtttcttcttcttccatctcttctcccttttcttttccccttcatttcctcctacctctgttcttcctcttcctcctccaattccttttcatcctttcttcactcccccccccccttttcagttgaacaacgttcttctgtcctctccctgtggatgatcgtcctcatcttctgttccgtcgcttttctctccttcttccttctgctcacccttttgtgctgtcgtcgacgcgttcaacaaaagatcaacgccaccgtaaggcgatcagcgacagcgaacggaataatcaggccgacaaagaagaagctgaatctgaacgggggagtggtggtggacaggtgggaaaagaccacaacatttggggaagagaagcggaggcatttggggcaatttgccaatggctttttgatttttgtgccttttcctttagaattgacattacctctccgatcgctgttggtgccaacggcaaacattcggcaccgaatggctctcagacggacagcggcgtgttcacactcggttcaacttcagcggccgcagcggcaaatgcagttgcggccaacggactgaacggagggaaaatgggcggcattcttttggggagaaagtgcgtggcgagtttggcacattcaaattcgcttttaaacttcagcatttcgccctccggcgacggcgaatgggtcgacggcaccgtgccctcctcgcccccgcagcagcagcaccagttggagccgtacgacttctccaacgaccctttcctgcaggaattcgcagccgcaaatgccctcgggggaattgtggtggtggagaacgcgctccatcagagcagctcgacggagagcagtccaagcataggccagcagggacagcaggggaagccgccaaatccgtacacaaagtgaacaattggatgggggatggacagatcaatccgaaagaaaggccaaggagtagggacagatcagtcggaaaggaataattgagaaaactcattaggaagtggaaaggacagatcagtccggggatgggaaaaaggagaaacagtcatttcagtgatcagattagctaacacatttacaaggttcttcaaccatttcccgtcgtcactgatcggaaacggggagagaacggcggcggccaatgggcggcgattggcgacggatcggccgacggaggagggggaaaaaggcacaaacgaaaggggcacagggaacagcagcaacgagcagttgatcagcgcggggagcagcgacagctccgccagcgactcgtcctccttcagaaacggcaacgccggcggaggagttcgagtgatgcgcgaaatcatcgtttgatgtgaccgccgattgttcatccatcgtctgcctcttaattgtaccccctcccccgataattgcaattgtccccccccccctacgggtaatttacccctcactttcctttccgtcactccacagatattttgttatttaataattgtccatttttaaacactgagtttcccatcctttgcaaagccataactcctaataatcaacaaaattccttttcacttctacacaaaactcaaatcccttcctcaaattatattattattttgtacaatttgtgatatttatttgtttttgtaaatggcgatttcattttccattttctcattgttcttcccattttaagaaaccgccatctccgcccaattctcttttaattacgcatatttaattattattttttgttgtgatctcttaaaaagtataaattttttgccgataaatatcaaataacatgatgaaaaaggtggaaaacagagtttgatcacgcccccgattgtttccatttcgggcgtgtcgtcccctcgcttccgtttggcttctcttctcgacatatttctgcaaaccgtctttttggttgcatcattttgcgttttccttctcgcctcaatctcc

SEQ ID NO: 3574 - DNA, 2840 bp, Heterodera glycines
gccgacgagcggaggggggaaaaaggcacaaacgaaaggggtcagggaacagcagcaacgagcagttgatcagcgcggggagcagcgacagctccgccagcgactcgtcctccttcagaaacggcaacgccggcggaggagttcgagtgatgcgcgaaatcatcgtttgatgtgaccgccgattgttcatccatcgtctgcctcttaattgtaccccctcccccgataattgcaattgtcccccctacgggtaatttacccctcactttcctttccgtcactccacagatattttgttatttaattattataattgtccattttaaacactgagtttcccatcctttgcaaagccataactcctaataatcaacaaaattccttttcacttctacacaaaactcaaatcccttcctcaaattatattattattttgtacaatttgtgatatttattcgtttttgtaaatggcgatttcattttccattttctcattgttcttcccattttaagaaaccgccatctccgcccaattctcttttaattacgcatatttaattattattttttgttgtgatctcttaaaaagtataaattttttgccgataaatatcaaataacatgatgaaaaaggtggaaaacagagtttgatcacgccccgattgtttccatttcggtcgtgttgtcccctcgcttccgtttggcttctcttctcgacatatttctgcaaaccgtctttttggttgccatcattttgcgttttcttctcgcctcaatctccgacagttcctgcacatttaaaaggtgtgtgtgtaatttttctccccattctctcctccccaccttttggtgcttttcccagcgttccttcgtctgcgctttgtccctctgccgcttttcctccttcactgtcctcagcagttccatcattgcgttcacccgattctcctccggctccatcagcagttcggccgtgtgattccgcaccaattccgagtccctcccctcttcggcgtcctccaaacagagtcggccgactttgggcttcaatttgtacggcaaatccttttgcaatttctttgggataaccaacggggcagacacaaagaatttctcagtcgcttccttcaaaataagcatttgattcaccgagtaaatgaaatgcttcacatttttcatgtgccgatggtagcccgagtcggccttttgctccggcttaatgcccaattcgtgcctcaaacgccctgtcgttttcatgcccagccaattttcacccgacggcagcaatttgtccgtcattgacacacaaaatttaggcaccggcacatcgacccaagagcgaaggaaaatgacatctgaaaacaaaggacaaaaaagagaaatcaccaattaaatatgtgtctttcagttaccgtttggcttaattttgtcctcaaacgtcgctctgaacgccccctcgggctccctcaacgcctttttaatcagtccccgaattccgctgatcgtccgaattgccaccccttggaaaggagtcacttcaagcgcactgttgaacattccctgaagatacaacaaaaataataaattaaaaaatggggctttggcactttgacaaaggcggtctttttgaacacttccaacggctgtccaatcagtttgagcttcttcacaatgtttgtgcttttgtccattcccaacacaacgccggtggcagcaatgcgaaaacccttctaaactttggacaaaattttatttttaaacaattagaaattggcactcatttcaaatggacccaaattctgcgcctcctaaacttgccttttcctcgtcgaccgattggaggcaaagaaagccggtgttttgcgtcacaaaaggtgcccaaaaagcgccgtgacaaaaggcttctttcggcgtgtatttgaagaagcgcagccggtggttatggtcaagaacagagtaaacgaccatcgattggaagcgccgccaaccgcacgaaatgatcagcggatcacgcgacttcagcaaacggtcgtaccagcggtgctttttaatgcgaacctaaacgaataaaagaaatgattcaagaaataaccaaacatagatagagatacctgaacgtatccgtcgttttgttcgaccggcaaaagtcctccgacaatgtaaggaaaggttgggttgaaacagtcaacaaacgccgcaggaacgtcctcaacttcgacacgtatatacagaccgggacggaacccttcgagtttctgccgttgttcttcgtccaaatcgtcgaagacacttttgttcaactgaaaggaaaacattcatttaaaaatgaaagtttcccgctttttcactcactttcgactgtttgtccatttcctccactaatgcgttgtattgttcgttggtttggtcaaactcagcatcaaaaagcttccgaaggcgttccttttttgcccctttcgccactccatcgcctttttcggcgttttgtcccttttccgccttcgtcccgtcctctgcttcttcctcatcctcgtcgtcttccgatgattccccctcttcccttttcgtcatcgcttcccccgcctctctcagttcgttcggttcgaattcgtccccactccaatccgacagttcgtctccattttcctcttctttggccttccatttttcctctttcttattgcgttggctttgtccttcgtcgtttttccgttcaccgtcactttcatcgtcctccccctcgccgtcagaagcccattttccagtaacccacgagtcttttatggattccctgacctgaaacgtaagaggcaaatttagaatttaattacatgttttaa

SEQ ID NO: 3575 - DNA, 660 bp, Heterodera glycines
ccccttcgcccgcaaagtgccccaaaatggggaccccttcgcatcgaggggggaccggtgtaaaagaggtggtggggggggggggtcgccggcgaaggggaaaagaggaaaatttctgaaaattttggctattttcttaaccaaattcattaaaaattctgaaattcccccccccccggcggcgcctatcggcaccgccggcccccaaaaatccaccctatttttccttaaaaaattagccaaaaatctcaatatttggtcattttttttagacaaaatctacttacacacaccgtttcagtttttgcctcccagttccaaaaagatttgcatgtgtggcgaagtggtttttgtaagatagtaaagggacaaagggtggtggttcgagtccgttgtgcaacatgaatatttttatttatttttgtccaaaatattaaaaaatgacgaattttgggaattatttttgaagctttttcccaaccaaattggaaaaacttgatatcattcggaagctctttatgaggagaagctttttctaagcaaatgctaagcatttttataagtttgaaaaaagatataagcgtttgaaattttattttttgaataattttagatcggagagtaaaaaattaaaactcgagcgttaaaaatattcataat

SEQ ID NO: 3576 - DNA, 1374 bp, Heterodera glycines
acgttcataggggttaatttttgtatgtcttgcctcccctctcacagttcgtggtaggaagaatcaccaattttcagtaaagacattattgcttaagaaacgtccccatcctggcttacgaaaagtcctaacacctcccccctccccccccccccccccccacccgttttttgagagagtgatcctttcgccatttagcgaccatccgacactgaagacggactttttgatcgcacacgccacttttgcacactttgtggcgtggagggaccacaagtacggaacgtactttgtccaaagcttagtcgaggtgctgtcaaaaaaggcgtgtcaggaggacattctgagcgtgatgacgcggatcaacgacttggtaagcaagctgtgcatgggaccgcccgaccaccaaatgcagacgcctgtggtggagtatacgctgagaaagcaattttttttcaatcccgttgaataaacaatttattacaaattttgtttgtttgctcaaatttattgaatgaaaatttgtatttttgttgttctattttctttttgttaaatttatgattggcatctcaaatatcaatgttaaataaattttgcagtttttttgcttgtttattaattaggtgtataaattaaaaaatttaatgtgccgacttttgcgatgacaatcggttgatcatttgacatttcacttctatttaatgtttatgtggaaatctttggagctgagctcagtccatttcagtcatcccgagaataaaggggcgccacttattgtttgtttgtccatcgaaaacgggagggatttcccaaattttcatttatgtaaattaaacattttaaattttgtccatcgaaaacgagggggatttccttggcctgatcaccagggcttgtaatcattttgaaaaattgcaaatatcaatcacttacttgaaactctggcctagcctaagcctatatacgaaaattcaatatttatgggccaaaaagcgctgaaaattgccctaagttatcttttatggggattaaaagtctgtggcactaacttcatctgctgatcacataatcatgataatgtgatttgtacaccccaaaatacactttattgcaatttttgccggtcgaccaaccacgcaaatcccatgtggtttgaagcttctaggatggagctttatacccatcttttccatacttcgcgatttatgtccatattttggcactaatttccatgtccattttttatgtccatatttctatatttgtccatattttcacttgtccatttgccgtgtgttccgacccgagaggatggcaaattggcaatgtccgattggtgccgagtgatcagcgaccggcaagaaatggtga

SEQ ID NO: 3577 - DNA, 4327 bp, Heterodera glycines
  unsure (1)..(4327): unsure at all n locations
cgcttaaaatgagcatttttatctttttttttatgggaccttgttcccgacttttacncattttttggtcatcatttgaatgcttaaagtctgtgaaaattattccaatcaattttgattgttatgcaataaaaaagaaaaaaaaaattttttttttttttgtatcttcgtttttcctttgcattttttaaatagcaaaatttacctcaattttatatccagtcattagacgcttaaaatctttaactaactaattggtcttcaatttgaaattttaaccgttttttcaatttagtgagtcatcgtcaagtgcttcaaactaccgactttggtccaaatacacaatttatgcagtcaacatcattttcatggttttttaaaaaatttaaatttcacccattcaatcatcgagaaaatttgcggcacttttgttggttatggcaccaaaaaaaaaagcaaatggcaaaaattgggacaataactcacaaattgtgtactatggtttgttttgtggcccttcatttaaatttcaacaaaaagctgcaaatatggttctattgcagtttatgcgtccattctatgaatatcctgagtttcttaggccctaacttttttcttactttgtcaaaacatatattcctggtaccatacgaatgcctagagtctcgggaaaatacaatgaaaaaaaaactcgaaattcagaattttttgaggatattttttttgtctgttgcttttaattgacaccaggagaatgtatcattgataaagttcaaaaaaaattatgtcttaagaaactggggatgaatggtcgttgattggacgcctaaagttaacaatcatgactttttaagtcaacatttgtatgatcagtttataaaatttcgattcagattatgggtccggtattaactgaaattgatacgggattcatgaccaacgatacctaaccctaacccaaaaaaaagtaggatttttcaaaaaaaaacaaaaatgttgaaattttcgaccaaaaaatggtaccgatttttttacggtgatactttatgctcattggtgccataaattgggtcttttactaaatttaaaatacatttttcttattttcggttgtcggcactttggtgttggccactggcgcttggttgcgcacagacagccgtttccgcgactttctcagcgagcgctaccgccaggcggtccacgaggcgttttgggtatgcatttttttttggggggggggggaaataaatcctttttattgatggcttttttaaatatttgggttggcggagggctgattgtgagaaaaaatgggtttgatgaaaatagtaataaaattttaccataaacgaaaaaaatgggtaaaaatttacacctcacaaatttcattaaatgtatgtttaatctttttgttgcaaaatgttgttctatcggcaagatttgttgacagatttacaccagaaattgccattgttttggattttttttttttttttcaaaaatttggcgaaattttgtgtggtgatttgggtgaaggagattttgaggcctttggagaagggggaggtgtgtgtagaaagcggaaggcttggaaaattatttttcaattttaggcgctaattcaacaaaaggcgcgccctttgaaaattattaaaattgtaaaaaaattgagactttacgaagtgaaaaagtgggttttcaggggtttgcgcattacaaatcaccgccctatttttatcattaatctcaaaaaaaaattcttttttaaaaattttttgggaatgttttttgttgcaaaacaactgaattttttaaagatttttcattggagagaagagatgagccatcaatttcaattgcaataattcgctgccatttttcattccttttttaaatttcatttctttccatgatttttttttaattccgtgccatttgatttaattctgtccatttatttatttgccatttccctcaaggcattatcatccgcgagacgtccatccagcacttggacgagcaggaacagtaccatcagcaggagttccagtttcaaacgttcgtcaattcgcgaggttggcaaggcattcgggactcaatgtacttcataaatgtctgtttggcatggcattaattttgcggttcttttcagttggcctcatggaatatgctgtcacggacgagcgtcagcttttaccacgttttgaggtgcttactcaataaataaacaaatttaggtgttttttcgaagttttggcaaatttccacaatattttaaaagtattatacccaattttcttttgttttcggggagagggtattcctatttagccttttgaaatttcaaaaaaaaagttctaatttctttttggctaaaaaggacaacaaattcctgtttttttctctccggcgctaaatttttttagattaacatgagaacaaaattttagtccgaagagcaacaaaaaaaaaaaaaaaaatttttctggctatggttttgaaatagcttgaaaaaatttttctttttttcctcataactcaaagaaaaatttttcaattttttttccattcaggccaagcagttgccctcgtgaatatgctgacacggaccagcgtcatcttctaccactttctgatcgcccattgacgtggtgatcctcggctcggacaccgcctacgcgctgatcggacagaagcatggcggcgtcatcggactcatccaacgggcactcagtcgtgcgtcgtcccacatttggtttgaacgctcgaggcaaaggaccgctcgttggtgcggaatcggtgggtgtttgttgttaaatgtcatgttgttcatattgtttattcaacgggattgaaaaaaaattgctttctcagcgtatactccaccacaggcgtctgcatttggtggtcgggcggtcccatgcacagcttgcttaccaagtcgttgacccgcgtcatcacgctcagaatgtcctcctgacacgccttttttgacagcacctcgactaagctttggacaaagtacgttccgtacttgtggtccctccacaccacaaagtgtgcaaaagtggcgtgtgcgatcaaaaagtccgtcttcagtgtcggatggtcgctaaatggcgaaaggatcactctctcaaaaaacgggtggggggggggggaggtgttaggtcatttcgtaagccacgatgggggcgtttcttaaaaaaaaaatttttacagaaaattggtaattcttcctaccacgaacaatgggatgggtggtaaaacatacaaaaattaacccaaatgaacgtttaccaaaattgccaatatgggcatttccattaattttaaaatccataaaaatttaatattttcccaattttcagcaaaatattaaaaaacaaattataagtcgagaaatttgaaaaaattaatttttgcattttttgttaatatttcattttgtaaatcttacttatttgttggtttttaattgattgttttttttgctaaagaagttcttcaattactatcaaaaataaataaaaatttaaatttgattatttcccggaaaaattatgaatttggtaaattaaaaaataataattttcttatttttaagaaaagccctgacaattagggggtttcctctcaaaggacacatgaacaaaagacccagagactttgggcccactaagacaaattacctacggacaaatccaaaaataaattgcttcaaaattctgatttaaattttcttttacttaccaattgttcaagtaccggtgcaacagcttcggttcgccacgtttggatgtgcttttcttgtcgcttctggttttgcccctcaatctcgatcggccactttgttcggaagtactgggcttgtcgatggtggcattgctgcttgattgtccggcgctgtgcgttcgtccaccgcgcatctccagagctgtaatcataaaatgtatttataaatatgattaaaaaataaactgaaatttaattaaatataattttaaaattaattgttatttctgtaagcggcaaccatgccattgcaaagagtattttgaaattatattattatgaactttattttaaaaaaattattttatttaaatatctttaaaaattatttatgtgtgtgagtactgtatttattatgaaaataataaacgtacagccacgacacgcttgcacgaacacctaaataaattacatgtgntaaaaaattattttgttcgattaataaaattttaaattcatttgaaaatccaaaattaccaatttcggtttgtctttaagtgctgggcatttgtccccatccagcaaggca

SEQ ID NO: 3578 - DNA, 4729 bp, Heterodera glycines
tatgtgatagccaaaattttagaatacaaaaattttcacctcctcgactaatgatgaaaaataatagacaaaatcaatgactttgcaaaatctgagcctgggttcattaataagaaaatttattttttccgtctggacaccaattccgaaggactaccaaatttaggtttttgaaaattaaaaaaaaaatttttgttggaaattactagtaattcctttttataactggtcttttaataatcccaactttttccacaggaagcgcccactctttacgccttctcctacatcatgatactgctcggtgcggcgctgctgctgttggccatgtttggctgctgcggtgtcaccgcaacggcaccggcacaaaagcggacaaagcgtcgtctaggcggcggacaaagtggcgacaacaacggctgggaggaccccgtcgctgtggtctacacttcgtcaccactgctttggctgtacacggtgggcgccggtgtgctgctgatgttcaccatcggctgcggctgttacattttgtacaccaaagatggggtaggaacggacagagacaatgtggggtcggtttttggccacttattctcaccccccagggcacaaccgtgtacaactcaccgatttaaaatgcaattaaattttttttgagaaatcgaatcattaaaatatagctgacccatttaggctttcgaataacactaattatccccaagaaaagggtgagatttaaaaattatgccctatttttttgggggggggggtagctctatatttcagtgtaaaatttttttttcatgtacatttattttataaaattcgtcagattgatgtggagttgtccgatgctctcaactacatggtccaacattactaccaagggcccggcattgtgcaggaaactctggaccgactgcagcaggcgtttcgctgttgtggtaaaaccaatgaaaaaaaaattcaagaatttttctaacgatattttggaaaatttccaattttttcttgaattttcttgtggaaaaatttaaaaaaaaattattttaataattgatatctctcgaaataaactaattttcttcaagattactaattgacattcaattgccccgttgtaggcaatgcgggttgttccgattttcgtgcgtttcgccaagacccgccccggacgtgcgacttgcgctgcgacgggtgccactaccgaatttggcttgcgctgcgcatcggcttctccgttgcgttggccatttttggcattgtgattttggcacaggttttcttttgttagtggttgtaagagccaaaaaaaattttcctaaaaaattaggagggggcctccactttagggtccacttcgtttgggcgccagaccaagtttttggactataacctttttctttgtaaaccaaatctaacattcttggtatcattcgaaagcttaacatgtttagaagctatttctaatttgtaagctattgtttcgcgattagacaattaccaaaaaagttataacatgaaattgcaaaaaagtcgaaattttttggagtttttttcttaataaattttttacaggctagaaaatctttttgtaaggctaatagaacatgtgaggagcttttgaatgataccggataaaaaatgggtaaaatttctgcaaattttcggctagttttctgtcatttttttcattcagaaaaatttttgcccttctattcattctccattagaaaatgactcacaatcaaaattaaaaaattagttttttaggacgaaatttattgccaaatttcctctgtttttcaaaatcttcgccggcagtgcctatcggccgatattgagtattttggccaataatctcacttttttgagatcttttgaaaaaaaaagagtcctcaaagcgctaaacaaaataaattttaaaaaatattcatttttcgtttgttttacttatttgaccacacgcaaaatgcaaatttgttgacagattgccgccatttcggtctcactgattttgctgtgcaccaccgaagaagaggactacgacattgactttgacaatggccatggctatggttggacaacggtggcacaacggcagccgtcacaccatcatcatcagcattactaccacggtgccaatgccattggccatgctggtggcggcggtggtgccgttgtgacggcgatgcgcactttgggccgtgccaccgccaatgcgccgcactatcagcagcagcgacaacacatggatgatggtggtggtggttttggatgccgtccttccacttcatcttctgctggttggtgagaaccatggggacacagcggcgggtgggggaagaaaactcaattaaaaatgatttaattttcaaaaaaaaaatttttttttcggtgctgcccagggctcgtaaaaaatccaaaaacaagaaatttcctgtaaattgttagcctggcgccactacgacacgacacaattcccttcaattttcaaaaatttaacctaaaaacataaaatcgttttgcaaaaattgctaaaaaattgtttttcttttcacccattgggccaataatttttgaaaaattttacgggggggcaaagagcaaaaaaccttcgcgtttccctccgaaattttttctggtcacgggcctgctaaaattccaacaaccctttatttctaacagagattgttggcaacatgtacgacgctgtcggtggtggtggtggcactcatgcgccgtcccgtcaacaatggcaccacagcggcggtggccgtgtgccgcaccaacgcccatgggacggccagcggcaccatttcctgtccaacaatactaataataatgctcctccgtcctccttccattactactaaattttgcaattcaattttatcatttttgatttgcaatgtttttttaactttttttcatcgctccgttcataaaaattcacttaataatttttttgaaattctctttcatttgcattcgattgaacattctcaggattctctcatttctttgatggcttttttatatatttaaattaaaattgtttccaattttttgtcagttattttctcccaaaagctaatcaaatccctccaatttttcgtaattccattacttttcgaaaaatattaaaatgatttttccaaatttatatggcttacttggattggctttttattttcgttcattattttgttgtattaattttatttagctctttaacattgatcgattcatatataagaaaaaaagatgcattttcattaaaataatgtctaaaaatttgtttgtcacatatttttcatttgttggcatcgcgaccaattcaatgcttttttatttgtttgacttttccatataattgttacaataattaatgggttttatttattttttgttccaattaaacaagacccatttggccaacaaataccgacggcactgccagtcaaaatgagcggtgcaactgcaaattcaacttcggcaccagcagcgaacacttcttcgagcagttcaacagtgtccagcagcagcaccattcgggcccagcacaatcagcaaccacaatcgtcgtcatcgtccacctcttcgtggatgaatgggacgacgttcagcgtgtcaatcagtgttcgtttttctttctttttttctggggtggggcaattttggtaaatttttccatttttcaacattgtaaactcacaatctgaataattcgggaagggacaatcccatggggaagagatgggctgcatttcttaaaaacaagcaaaacccactcgaaaaatttgcacttttcctgccccctcccggaacagacggaacacgattaaaccgaaaaaaatccccgaattagaaatccaacactgccgcactttaataaaaatacagtttgtttttgatggatttaacatttttggcatcatccggttgtcctccaaagtttatgaatctacaaactttggaaaattctaaaaattaacggctggctacatttcgattcaaaaaactcggtgaaaatacgtcgtttcgagacgatctatgggaaaaaattatgtgttcatcttttcctatatcctttccttcttactcaaaatcatggttcaaaaacattcaattttttgtgtcgcttttttcaaaaaaaaaatttttaagggaaccggggggggggccggtgatgcttccaaatattaagattttcccatcatttggtccgtttttttaaattgaactttttcaaaaaattctttctatgatagtgccaagaaggtgtttaaaattggttttagtcttaaaaaaatgctttaaaacaattaaaatgccttcatttcccccatttttttttttgcagactccggtcgaggatctgaacatccaatttccgcccatacaattgccgtccggcatcagcacactgttcggcgaacttgctgctgcccaccagcatcagcagcagcagcaacaaaaccaacagcaacaaatggcagcgattagttcatctccgtcaaccactgctgctgcagcatcatctgtggtggcgagtgcaagcagttcgacctccaatgctgccctcctacagcgacagaacgggttcgtgttaagagggaagacgtagtgcggcgggtgggggtgaaaattttaattttgtttttttttctagaaagtttagtgaattttcattcccatccccccgaaaagttaaaattttcaagga

SEQ ID NO: 3579 - DNA, 1639 bp, Heterodera glycines
ttgatttagaatcagattatttctgcctgcgctgaaattatttaacaagatttatagaatgtcaatagtcaataaaaagtgcgctcctgcaggatgaatcttttcttaataaaactctgcttttctgtttcttagctttaaaatctctttttctttttggctgaaatggcttttcattttctttttaaaaactcgcaggcttttttcatggcttttcgttttcttttctttttaaaactcgcgggcttttctttttttttagcaataaaatttatttttattttaatggcttttccttttcttttcaaaactcgcggactttgcttttttttagctatagaatttatttttatttaatggcttttccttttctttttaaaattcgcgggcttttattttattagctttaaaatgtcgtttcattttcatggcttttcgttttcttttattttcaaaactcgcaggcttttctttttttttagctataaattttttttatatttaaatggcttttccttttcttttctgtttaaaattcgcatgcttttcttttctttaaaatttctaatggcttttggttttctttttaaaactcgcaggcttttcttttcttagctaaaatttctatttttttttttcagggcttttcgttttcatttctttttaaaacttgtggtcttttattttcttagctttaaaagttctttttgtttttaatggcttttggttttcttttctttttcaaaactccaggcttttctttttttggctataaatttgtttttcagggcttttcgttttcatttctttttaaaacttgtggtcttttattttcttagctttaaaagttcttttcaatggcttttcgtttttttttgcttggcttttcttttgttttcttggttagattaattaattaatttgttagtaagttaaaataaacaaaataaatgcacaaatacaaaatattggacggaacaaataaataaaacggacaaaacaatcaatataaggtggagaagtggaaatgaaaatgatgggttggtggagacgggccgttgctgatgaatgatagataagaatctaacggatgagggggggggggggttacgcgtcgctatgcaaagtgaaatgagaacagagggggtgggggagggacatttgaatcgttggagaagttcagacggcacatcaggtcgtctatccaacaccccctaagctgaacggcgaaagaatttcgcctctggcgccattttgagcggagttttcccgacgccccgccccctcgcgcaccccgagacttgcgcaccaaaactcgcgcaccccttgtccgattgacttcaaattttatgggccgtcattccaccatcccctaagctgaacggcaaaagaatttcgtctctagcaccattttgagcattacattcccgacgccccgccccctcgcgcaccccgagacttgcgcaccaaaactcgcgcaccacttgtccgattgacttcatattttacaggccatcattccaccaccccctaagctgaacggcaaatgaaatttcgcctcaggcaccattttgagtggagttttcccgaccgccccgcccactcgcgcaccccaatacatgcgcagcaaaactcgcgc

SEQ ID NO: 3580 - DNA, 891 bp, Heterodera glycines
taaatggtttgccgaatgtgtaaatagagcgagtgagctttgccttcacaaaattggcgaatgctgattggtcgaatgacttttttcgtattctcccttctatgatgctcattggcggaatttttgtgcaaagacgactgaattaaccaaataaacgattttttgttaatatattataaaataatacaaatattttatataaaataaagaaattacaaacgaaaaccatttaaaaattgttaaataaaatattctagaaaagcacaaaaatgtccaattcttctccccctgctaaacgagctcgccgttttttcatcgaagagttgcttcgggaaccatacaatgagctttcgcccccacaaaagtcggcaaaagattacgtcaaaaaactcgactcggaaattgaacacgttccaaaatttcaatgggttaaaaacaagtctcgcttcgccattgaagacgtcccttccgacccagagggcttattgattggcatttttcaacactgtatggatgaatcgattagtgacagccggtcaagaggagttgagccgacacacctcggctgcattgtttccagtgcactccttacttcggatatatggattccaattcggcaaatgacttcagacacaataaacaccattctcaaccgctttaacgacgtggctcaaagcaaaaaacaggatggtgtgacgctttggggcgacccatttaccgtaaccatgacaacagtcaaccgaaacggactaccagccaaacgacaactgaaaggaggagcagcgcggaagttaacacatgtccaccacagagttcacgaacagtgtctaattaaggtttttaattaataaatatttttaacttatataaatttagatcgaaaattttgat

SEQ ID NO: 3581 - DNA, 2900 bp, Heterodera glycines
  unsure (1)..(2900): unsure at all n locations
cccccccccccccacccattcccgtcagagacgcacacacaaccacccaataggcacggacccgcccgctcatcctctctgcttttcagtggagaaaatcaatcgatattaaaagtaatcgcatatagtagtaatacgacacagttgtctactcacatttcggtggacgctttgacatggtcttggtctttcgtgagctcttcatggaaggactaaacccttcaatgatcaaaaaggggaatcgcttatttgaaatgaaggcaaacattgattggttcactatttgttaaatataaaatttaggtgaagagcagaaaaaatctaaacccaaatgtgatatttcgcgactcatggaatctgattccgggtccactggcatcaatggtcccaatgttcggcttggacgtggacgacaagccttttttccctcatttggtcaaccgccctgaaaattacggatgccatatcttccccacaaaggccgattatttggcggacggaatgaatccggtcaaacgaaaagaattcgacaaatggtttgaggaaaaccgaaacaagtcgtttttcctcgacgaagcattggccaggtattatgaatttttaaaataaaaataaaattttattttaagctattgtaaaaacgatgtggatattttgatgtccggtttaattgcattccgagcggaattcatggagatgacgaaacggtcagctggaacagacggaaaagtggaccgagctgctcacaaaacaccccatgacggcattgattccgtacgccactgtattacaattgcctcagcttgtatgcgccatttccgcaccaatcacctaaaaccagcccacttggctcttgtgcctgagaagggatatgacagctgtggggacaaccaaagcgatttggctctaaactttatgcagtggtattctgaagagcatggagtacggatacaaaatgctttttcggctgaaggcgaaaaaaggtaaaattttgaaaatgtaaaaataataaaattagagtgatagggtgggtaacttccgtctggatggatggattgagtcggagaaaaaaggactggaaattcatggatgtgtatggcatgcctgcccaaaatgttatccggacgacaaggatgtgatgccttgtggcaagacagctggacgaatccgtgagcggaacaaacagcgcatggattttatattggaacgcgtgctaaatgtggaaattttttggcaatgcgagattgaacaaatgctggcccgggacagaaaaatgaaggacaaattcagcgaatttacgggtgatgggggtccaatcaatatccgtgcttgcttcatggggggcagaacgggagcattgaagcttcaccacgagatagcagcggacgagacgattagctactacgatgtcacaagtctctacccatttataaagtacatacgatgaatttgtcaatatttaaatttaaaatttttttgtagttatgtgacccattatcccgttggtcatccaactctgcatgttccatgtgaggatgttgactggcgccgatccgaagacaatccatatcacctggccattctcaaagtgttcgttattccaccgcgccgaattgacgttccagtattgcccgtcaaagtggatgatcggctttgctttccgctttgtatgaaatgttgcaaaaaatttccaaatgggggtgtaagggagacgtacaactgtacacacattgatcgtcaaagaggatggattagtacatgcacgtctttagaggttaaaagaaaaactgttttttgttggtatatttggtaaatttagctaaatgtcgcattggatgaggggtacagagtaaccgagttattgcgtgttctcgaatacagcaagagtgacaaccagctatttcggccttatatgagcgaattcatagccgaaaaaatgcatgcttcgggattcgatgatcagattcggggaaattttgaagcggaggagaaattcatcgcggaatgccgggaagaatttggaattaaaattgaccgagcgaaaatggtcccaaacaagggaaaaagagcgcttgccaagttggcggtgaataatttatgtaagagtttaatgaattaaataattgaatacttacatgttaaggggggcgtttttctcttcgtaattttgggcttacccaaactctgattacggacgacccgtcggagcttggcaattatttggacaacaaaaaaattgaagtcacaggacttgacatgcttacaccagagaggatcttgatcagctaccatcaaaagaatgattgggtcaaagaacacccatgctcaaacgtcgttgtctcactttttactacttcggcagcccgattgcacttgctaaaagcaatgcaaaaagttgttcgaactcctgggtgcattcttttatatacaggtaaaaattattttttaacgcgacgatttttgaacttttagacaccgattcgctgatttatgttcatccaaagggggcaaatcctttgaaaacaggccctcatttgggtcagtttacggacgaatttccgaaggtgacaaaaattattttaaacatcataatttccaaattttttagcatgatattttggaatttgtgagcggcggtgcgaagcagtacggactgaaactccgcaaaaagggatcagaagaagaagaatttgagtatgttctcaagctgcgtgggatcaccctcaactatgatgtaacagaaaaccaaggattacgctccgaaacttttaaaaaacgcgtcttggaatttgcccgaaccggaaaaacccagccaatcaaagtcatttaccccaatttccttcgccctaccgttatccaaggaaatgtcacctcagctcctctccanaaaaatatataag

SEQ ID NO: 3582 - DNA, 5381 bp, Heterodera glycines
gatgttgactggcgccgatccgaagacaatccatatcaccttggccattctcaaagtgttcgttattccaccgcgccgaattgacgttccagtattgccagtcaaagtggatgatcggctttgctttccgctttgtatgaaatgttgcaaaaaatttccaaatgggggtgtaagggagacgtacaactgtacacacattgatcgtcaaagaggatggattagtacatgcacgtctttagaggttaaaagcaaaactgttttttgttggtatatttgttaaatttagctaaatgtcgcattggatgaggggtacagagtaaccgagttattgcgtgttctcgaatacagcaagagtgacaaccagctatttcggccttatatgagcgaattcatagccgaaaaaatgcatgcttcgggattcgatgatcagattcggggaaattttgaagcggaggagaaattcatcgcggaatgccgggaagaatttggaattaaaattgaccgagcgaaaatggtcccaaacaagggaaaaagagcgcttgccaagttggcggtgaataatttatgtaagagtttaatgaattaaataattgaatacttacatgttaaggggggcgtttttctcttcgtaattttgggcttacccaaactctgattacggacgacccgtcggagcttggcaattatttggacaacaaaaaaattgaagtcacaggacttgacatgcttacaccagagaggatcttgatcagctaccatcaaaagaatgattgggtcaaagaacacccatgctcaaacgtcgttgtctcactttttaatacttcggcagcccgattgcacttgctaaaagcaatgcaaaaagttgttcgaactcctgggtgcattcttttatatacaggtaaaaattattttttaacgcgacgatttttgaacttttagacaccgattcgctgatttatgttcatccaaaggtagcaaatcctttgaaaacaggccctcacttgggtcagtttacggacgaatttccgaaggtgacaaaaattattttaaacatcataatttccaaattttttagcatgatattttggaatttgtgagcggcggtgcgaagcagtacggactgaaactccgcaaaaagggatcagaagaagaagaatttgagtatgttctcaagctgcgtgggatcaccctcaactatgctgtaacagaaaaccacggattacgcttcgaaacttttaaaaaacgcgtcttggaatttgctcgaaccggaaaaacccagccaatcaaagtcatttaccccaatttccttcgccctaccgttatcaaaggaaatgtcacctcagctcctctccaaaaaatatataagccttatgttggcaaaggcattgtttgttctcgtgactttcgcgtacttgattttggctattcatctcgataaacattgttatttttatctgatcaataaattttgaacattaatgatcggtttaaaattacaaaatattaaaataaattacaacaaaaatacaattgagaaatgaagggtaggaaagagtactttctggctggaaaattgaaaattaaggaagataagagacaattttgcaaatatcaatctaccaaaaagtgtaagtatcattttggctacattcatgacgtccttcgttcgaaatttgagttgattcttcgttcatgccattgaccttttcactgcggatttcagtgaacattctcccgagccaatccagctcgtttggcacatcttccatttgacatagctcaagtggatagaaacggtcctcttggccttcttgaaagcgctcgacagcacagtgaagaaacggatgacggagtttaattcgatggcgaacataaaagtgtgcagcaacgcaaacattgaaaggtctgcctaaccggccataggccatcattgttgaagctccttggggtgtgatgccgccaaaagaaaaagttttggtgtacccatttcggtctttgtatgttgtctgaattgggagtccattcaacgcctgctctacaattttacaatcagaagggtgattaagccgatcacgcagttcactgacacgacaattcaaaattttggcgattttttcagtaaaaagcaccatttagacaatttggaagctacaattttggaaaaattagcgaatggaagactgcaatttatagggtaaaactgaaatattaatgagatgaagacaacaaaatgaaaaaattaagcaagtataatgctatttataatgatttcgaatgagccaaatttattttatgggttaaataaacattgaaaggtataaaatgcaaaatttttagttctttgtattattattcttcaattttttcctaaaaatgtccacatcctctaataaaaattatttaccaaaaaaccaatgcccaaattgtgatggtaattgcaattttttcaatagtgtacaaaaattttttttcaaattttagatgatgaagttgacactgacccttcacccgaagaagttgagaaatggacgccggaacaagtgattgagtgggaccagcgttgctacgggaaaatgccagctgaagaagagctttggcaagaattcctcgacaaaggagaggcaaatgtcagtaaataaaatttttgatccattttttaaattatttctttaggttctgcgtgagttctttggcggaaaaggggcgcttgaagttgagaagagccttcgagaatacgcgaagaaaaaggaacgccgagacgcaattctgattgagaaaagaaacgaatacaaaaaaatgatgggaaaaaaggatgaaaattgaatgttcgaatttctccatccgctatatcaatggcttttattttattcaattattttgatttttaatactcgaaataaataggttaaacaaacaaaaattggtataaaattcgaaaaaactgggatcttttttcatttaaataaaaataactcttaaaataatccattcacctgaaataatggctgaaaatcataatgagcaaaagatgaatgagcaacaaaatgaaataattccagctaaaaaccccagaagcatccaatcctggaaacttttccgcccaaaatatatgctaacttttcgtttttgcgacggtaaacagctagtctaattacagaatatcataattgttaaaattcagcatgtctttcgtgcttatggaacaatacaaacaaatattcaaatagaccaagtgacggaagccaaaataatgatcttttgatttttaaataataatgataatttcgatgattcaatttttgtaatgataatttcaataattgtaatgataattcgatatttaattgtttgcagttaattcataataaatgttttttaataaaatcatttttttaattttggtcatctcacaacttatcgcccctaacctccattacctcccaaacaacataaaaaaggcaaaaatttgttatgtttgcatagcaaggaaaatgccgagcgcggaagcaatttgatctttagctcattcctctcttgatttaacgccggctccgcactgcaatggatgtgcttatttatttattgccttgttgggataattggcggtaacctaaaaagaaatttaccggccaacagttcaagcactttaatcgtcccaatattcccctaaatgcgcatcgcagaaatatgagatgtcgagaaaagtaggctgtgattttttattgaaataataaacaattcaagtgcaagtggagaataataataatggggcgggtccaagtgatggcggtgttcggaccagaccaaatgaaaaccgtaaactaggaaatttttgtttaataaatttcgatttttttttgaagaacagctgactccgctcagttcacgttcgggaaataatggggctttgcaaaatcgtactaatggtgtgctaattttgaaaaaaataaaaaaacaaattttttttagtgagaaatgtggctgggccaagtacggcgagtgatggtgacgatgaacgtgaaaacggtgagatgaacccttaataattttacccaaataaatgcattttgacaggccccgttctaagcgctgtcatcgaaggccacatgaaccgttcgcggatgcgtctcattcgcgacgagatggttcatcgtgctgttcagcagcaacttgaacaccagcgccatctgttgcttcagcaagcgcagcagcagcagcaacgagaagagcgagaaagacagcaacactttgatcagcaaatggaggaagcagagcttcttcacgaacaactgcaggcagcagagcaggaaaacgacgagaacatcgaaccacagccccctcagcagcagccgcaaccgctgattcgtcatcagcagctgcagttcgaacgtaatgttcgactgcagctgcgcgagtcgcaacgatttgaaaggggagttgcctcgtcaatgctcgttccgccagcccagctctattgggagaccgaatgcatcatctgcaccagcaaccgcgcacacctctacagccgtaattgcggacacatctaccctgtgctcgacatgtgcggtgaacgcggtgatccacaaggtcgcgacttgtatgctctgtcgtgcgcgaattgaggggatttatccatttgtccgctgatggatgtatttgataattcttggacccctttgtcattgtccatcctatcattaccctattatcacaatttttgtaaacgatccattgattgccacttggccttagcaattctcaatcattatttaaactcagccaaaaaaaatcaataaaccttattaattgaaaaataaataaacaccaattcgttatgcatttataagagggggacgggaatgaatcaatgaatgattttttgcatttagtgtccataaacacggggttgggcactagcaccgtgtccaacttttcgccctaaagcgtcagctggaggccacaagccgcaaccaagcactagcgcaccagccccaagcacagggctgagcactagcgccgtgtccaaccgttcgccgcaaagcgtcaggccggaggccacaagccgcgaccaggcactagcacgccaaccccaaacacggggttgggcactagcaccgtgtccaaccgttcgccgcaaagcgtcaggccggaggccacaagccgcgaccaggcactagcacaccaaccccaagcacggggttgggcactagcaccgtgtccaaccgttcgccgcaaagcgtcaggccggaggccacaagccgcgaccaggcactagcacaccaaccccaaacacggggttgggcactagcaccgtgtccaaccgttcgccgcaaagcgtcaggccggaggccacaagccgcgaccaggcactagcgcaccag

SEQ ID NO: 3583 - DNA, 8952 bp, Heterodera glycines
attgaccgaattatcctacaattacaatcccaaggcgaagaaataaaccacccccaaatcaagcaatcgatcgagaccaaactcccattcaatctccgattaaaattgagagaaaaatccaaactttattcaacaaaagaattaatgaactttctcaattcccacacccaagcgcgtgaagacatagaacgaatggaagattcaaacagacaaatgagaaatttcccccctcaccgaccacctcaaaacagacaacaaaggcaatcctacacaaactattcacaaccccagctaaaggcaacccaccgaaaccatcaaaacatgcctttccctccctatcccatcacttctgcattaacaaccaaatcaaaacctgtccgtttggcagaatttaaagcaaatccgtctcaacccaaaccacaaaccaaaataatattttgtcgattctgtgaaagagacaatcacttgagcaaagaatgcaaaatttatgcaaccactgaaaaacgaagtgatcgagctcgcgaattaaaactttgcctaaactgtctgaaaaaaggacatcatttgagagaatgtaaatcaccattttcatgtttcaattgcaaaagcaaacacaataccctcctatgcacccgaaagcaaaaccaatataatcaaagagaaaattttacaaaagtaaacgtcacgcaaaaccccgaggaattcgaagaaacccaaacatttatgtcaatggattccgatcaaaatcagaaaattatacaaaatgatgaagaagaattgcttatgaccacggaagcaccagtcttaaaccccgaccaaaacaaaacacaaaacgaagtaattttcttcgacaatgggtcgcaaaaaagctatataacagacgaatgtgctgattctcttcaattacccacaatcgaagaaaaattattggccatatccacctttaaccaaaataaacccaaaatcatttcatcaagactagtcaaaattggcatcaaaacactaaacggtgaaatcgaatacgtaacattacagactgtggaaaaaattactgatgttacaaaaatggtcaatagagagactgttgatatattcaaaattaaaataccgataaaccatgcctatccacaaattctaattggtatagaccattattggcactttatgctgccgaactcacaaattcaaatactcccctccggattttactcaatcgatacaaaattaggaaaaatattatccggaaaaggtactattgaagacacaaatattaatcttgtgaaagaaaagcgaaaaaaggatgagacaaacgaaatccttcaaaaattctgggaattagaaaatattggaattaccgactctccacatttgacggacgaagatacagctctcatacactttgacaaaaatgtcatttttgaagaaaatagatactacatccgatggccatacaaaagagaaacaccgaatttacccacaaattttggattatgtctgggaagattaagaaatgtagtcaaacaattgatcaaaaacaaacagttggaaaattataataaaatactgcaagagcaaatggacactaacgttaatgaaattgccgacttcaaatccaaaaatttaattcactatctcccacatcaccccgttataaaagagagttcaaacaccacaaaaattcgaccagtttttgatgcttcagcaaaattaagaggaagcaattcactcaacgacgaaattcaccaaggaccaaaattattacctgatttatgtggaatgattctccgattcagactcaaaaatttcgtcttaataggcgatttagaaaaagcttttctacgagttggattaaatgaaatagacagagatacaacacgctttttatgggtaaatcaatcatatttggacgaaataaaccaaaaaatatcgagaaatcgaaatgagagacgtagaattaagacgtttcacccgaatacccttcggagtcaatgcttctccgtttttattaactgctgttgtgaatcttcatttatcaaaaacagatgaaatgtttgaaaagtttaaaatattacaaatagatgaggaattatgtcttagtggaaaagagaaacaattcaaagagctatgcacagaacttaaagaaaatgcatacgtcgacaattttgtaatgatgtgtgacgacgaaaaggaaataaaattcaaacattactggagcaaagaaatattcaaattagcatccatgaatttgagagaattcgtgtctaatcatgaacaaagcaacaaagagattcaaaaaatggaaggatcagagataccaaaaatgacaaaaatgttgggtataaaatggaatgtcgacacagacgaactcgaactacaaataaaaataccactaatgagtagagacacgacaaaaagacaaattttgaccatgatcgcaaaaaatttcgacccaatgggttggatatcaccagtaatactcaaatacaaactatttttccaaaaactatggagatcaaacaaagactgggacgataaattaaatgatgaagaaataagagagtggaacaatatttcaaatatagacgaagtttccataccacgctcaccatttacaagtcaaaatttaaaatgtgcttctttacaccttttttctgacgcctctgaattagcctacgccactgccgcatatttacacgcaaataataaaactgacttattattcgcgaaaacgaggcttaccccactcaaaggcctaacaatcccaaagcttgaactattgggactattaatagcagcaagagccgtcaagtttatcatcaaagaatcaaaattgaaatttgaaacgatatgtatctggtgcgattcaaaatgtgtactcagctggttaaaatgcaaaaagaatttgccaatatttgtaaaaaacagagtggaggaaataaaacgaattgtgtcagaatttcatatcactttctattacgtaaaatcagcagacaagccagctgatttggcatcaagaggtacaacaatgaatgaaatgaaatacaacgaattatggtggaagggaccaaaatggcttaaattaggaaaagaaaactggccagcccacagtttctatactcctgagcaaaatgattcactttatgatgttaacataatggaaatcgaaaacactcagacaaatttagtcaaaatggactaccaaggatttattgaatggaaaaaatacaattcatgggataaagtgacaagaatttgtcaaatcttattaaaatttgtattttttacattaaaagactctcccgaattcaaaactaaattcaaaatacagaaatttcaaaacgaattgagcttaaaattcatggcacaaaaaatgctaatacgcataattcagaaagaaatggaaccaaataatgaggaagagagacaattgggaatttacagagacaatgatgaaattttgaaatgcggaggaagattaaaaaatgctcagataaaagcgacaaacccaatattcttaccaagaacacattttggtactcatttaattattatggaccatcaccaaagaaatttacacgctggaacaatgacaacactagcagaaattcgtaaaacttattggatccccaaaggaagaagaattgttgaccaaatcagaaaacaatgtttctattgcaaaagatataacgcaaaaccatatcagcaaccaaaaatgccgcaattgccaaaatcaagagttcaaataacagagccttttcaaaacgttggccttgattacatgggtccacttcaaattaaaagttttactgaaaaatgttggataatacttttcacatgtttcaccacacgtgggatacacctcgaattagtgacatcattatcaatacaacactttctcaatgcattccgcagatttatttcaagaaaaggaacaccaaaaattatttggagtgacaatgcatcacaattaaaacttgcatcaaaagtattacctgaagtcctaaaattaaaggaaatacttaaagacgactcaattaaaaactatttcgaaaaggaaaacataaaatggattttttcaatcgaattagccccttggcaaaacggagcaatagaacggttaaatcaaaatgtaaaatcagcaatgaaaaaggcaatcggaaggaaattaatagaatttgactcatttcaaactcttatttgtgaaatcgaagccttagtaaattcacgaccaattacattcatttatgacgaaataaattcgtaccaaattcttagaccaatcgattttatactcccgcacaaaaatctatgcattcccccaattttggaagaaaatgaaactaatgacccaacatatttaccaaaaccaacttattatgaccaaacaatagagttatggaaaaagacaacaaaaattttggatgactattggaaaatttggacagaagaatatttaccaagcctgagagaaagatataaaacagaaaataaaaatccaaagaattgtgtaaaatcttttccagaaatcaatgaagttgtcataatccatgatgagaccccaagagcaatgtggaaaacaggaattattaaaaatgtcataacaggaaaagatggtatcataagaggagctaatgtcgagttaccaaacaaaaatgtcattaaccgtccattaaaattactatatccgttagagattaacaaaaatgactgtgaagagaatgagactatcacaaacttaataaaaaccactgaacacaaacaaattggtgcaaatcgaaagagaaaacaaagtgtcctatcatccccaaaattaagcaaagtatttttaaacacactcacgtttcttctattatttatgcaactcttaccatgcttatcccatttatatgaatgtccaaaaaccaatgaaatatggagaacgaagtatacaacattttgtgttgaaaatggatttactatcagacaaaataaattaacaatggaattttgttatcgtaaaatattttgtcacaaacaacacgtcataaaaaatcacccaccctattgtggaccacaatgcaaatgtcctgattggactaattcttgtagttttgcctcatatcacagaataaaaagagaaataactgatcaggaaaatattcaaaaaattatttcattcttcaaaccaaacatttgttcattcaataaaacggaaaaatgctccctaatggataaaaatatatttagttcaataatgctttatgataatagcattcattcagtcaaaagttttaatttacttcatacacaagccaattctcgaattgattatcgttgccttggggagggcaatctgacgattggtacacaaaaattctgtcaagaacacgaatgcactgacacacatggaacaaaattttgcttttacgagccacacgaaaaaacttatcttgtgaaatcagaccgagaaattatcccaataaaagcatggggaagcatcgaaagaattttttatttggctaatgacacattgatggatgaactcaaacgtaaaaaaagagaattcgatccgttcgaaaacgaacaaatatccgctgaatgtacaaaaggtggaataaaaataaacccaactcatgctaccacggaattagaaattttggttgataaatactttatcctaaagcgaagtccacagagcgaagaatttatttctctacctacaaaaattactatgaacgaatataaaccagtcattaaatttatgaaaggcacaagcgtatctgagtacaaaaacttaacatgtcctccatcaccaatctgtgaattaattatctgtcgattctgtatggaatacattcgaaacccacaatgcataggtcaaatgcattgggcactaattctgatcatgataatgctcaccctttacgttatcacccttagtcttaaaattataaaaatactataccgcttcaccatatttatttttctatcagtctacaattgctgtagaaaaagaaaattaaagaaaataaaaataattaaacggaaacaatttatttatttaatcatgattagccttttactcaattcgccgactattttttcatgtgatgaagtcactaacatggtagcaggaacaaacgactgcgcaattgatcaaaacggaaagattgaatgtatttacgatcaaacaacccaaatttcaatcacaccggaacataaaacgtgtctgaaactcgacaatgaaaagacgcacactacgatggaaacaattgaattatctgttgaaagtctaacaataatttgtgcagagagatctgaatattttatgcgagattatcaattactgtcgagctcacaaaagcgatgttcaggtgcaggaaagtgcactggccaaatatgtcaaactttaacaatgaagggaaaaaatcctgaaatcggtgaccatgccaataatcaaccaggatattcctattgtgtgccttcctgtggtggttggcactgcaaatgctttcttgccaccgatggatgtttattttatagaacatataccgaacccatcgatagaaacatatatgaagtggtcaaatgtccgacttggacgattttagctacaatcaaaatttcgcttgatccaaaaaccatacatactgtggaattaaaacctggtgtcttaacacatgttaaagactcaaatttatctctgacactcacctcaacttcaattccaccaacgccactatttggatccaaatttataattaatcgttcaaacgcaaaagctgtaatagttgataatgagaatttacttaagaatagcctacgatgcgaaactaaagaaaaggcaacaaaattcagttgcacctttccaccagaagcttgtcaatgtcacggaggtgactccgttgttcactgcgaatgtgagaaaaacccactcactgaaatgttcacgagaaaagaaaatattttgcctctcgagacacatggaagccaagtattcttcgacactttattaagggcaaaaataaaattaacaacttcactacaagtgcaagtcacgctaaaaggtcacaaagtcaaagcaatttacgacaaaaataattgtactgtaaaaacaaaatcgttagaaggatgttactcatgcaccaatggagcagaatttaaatttacatgtacaactaactttggtaccgcattggcaaatgtaaaatgccatagtcagaattttcaaataccctgtgacacaaaagggaaccaacagcaaattcagctttcctttaatcaaccgagtgtaaaagaaaaatgtgaagttatatgtccagatggaaaaagtgaaataacaatggaagccactctgaattatgtgagccaacaagacaaaataattaacccatctaataacaaaaaggaaacacccgtacttggaacttccctcgaacaaatttccgatatatttaatttcatatatacattaatcaaaacaaatctttttaattttttaactatactttttactttgattgtgatgataacatttataatttgtatatgtccaatgatttacccacttctttttaaacactttcctttccgtcgcgggaatgtcgcgactacgcgaaataggatttttaatttaaaaaataaaaacattaaaaacaaaaaacatttaaattaattttaaattaaacagctaaacattaattaattaaatgtgaacgaaatgaatgaattgaaagaaagaaaaatcattagtcatttttagtcacaatttttccattagaaaaattgtcaaatgttaaactttaattatgaataatttgaacgttaaaagaaataacagattttaaacaaatgttaaaatgggacaaattgtgaatgatattaaagaaatagtaaaatgttagaaaattagaaaaggctaaagtggcacaaactggaaaatgagaaaggttagtaaaattggcaaatgctgccaagttggcaaacaagcattcaagcaggaattgccggtataaaaggagggccctaacctcccactaatcagtaaccaaagggtgtctgagacgcattgcctcgtctcctccctccctccccttccctccctccttttctcagctcgccgtgccgacaacagccgacaactgcgctgcttgcccttgccatgccgatccgtgcgccgccgttcagtgccatgcctgtccgtgccgccgacttgtgcccgatccgtgcgccgcccgttgtgccatgcccgacccgtgcgccgcccgttcgttgcattccgtgccgccgccccgcaccaccaattccgtgccgtgtcgccgacgtgtcggtgccggatgcccatccttccccgattcctgccgccccaattgtgccgttccccaatttgtgccgtccccacattttgacccatttcgtgccgtcccccattctgtgccgtccccacattttgacccatttctgtgctgttcccccattttgtgccgtcccaacattttgaccatttccgtgccgtcccaatttgtgccgtccccccatttgtgccgtccccatttttgtgcccattttttgtgccgtccccccatttccccttcggtttaattacccaagtttgaggactctaataaagtgcattttcatcgctttcccgcctcacttgacccccagcaatttcgtcacctccaattgaccgccaagcccccagtcgtccctactctcgccaaatccgggcccttgccagccaacaaacccccaacagataccggccgctcaattcccgaccaacaccccgattcgccctcttcatcccgtcccccccatttgtccatcaccgatcgcggaaaggacaaagtggtgcacgacgacccgggacgccctgcgcacaacaacgatccggcctccgacaacaaatcgtcaaacttctgaaacagcgaaaacttttcgtgccgcagcccatcttcaaaagtgagaaat

SEQ ID NO: 3584 - DNA, 1298 bp, Heterodera glycines
aagtaaaaagatttttttcaaaaattttcccattaaataatttttttcccattttcatgtgccgcacgttggtgttttggtggcagcgaccgatggcggcggcgagacaacggcaaatggacaagtaagaaaaaaatgttttttttttcaaaattttcccattaaataatttttttttcccattttcatgtgccggacgttgatgttttggcggcagcgaccgatggaaggagcaatgaaattggaggcggcgaaacagcggcaaatggacaagtaagaaaaaaaatgttttttgtttcaaaatttttctcattaaataattcttttttttccccattttcatgtgccggacgttgatgttttggcggcggcggcgaccgatggaggcggcgacacagcgcccaatgcggaaaatgggcaagtaagaaaatttaaaaaattttttcttttcattaaatttaaatttttcatgtgttggtggcagagacagagagcgatgaaattgtggcgctcagtgcaccggcagtgacgacgaaatcgaccggtggaggcaaaacggtctgttatgaggaggggagggaaatttatgaaaattttcaaagccggtggcaaagcagcgcgtcaccggaccagtgcaaaaaatgtggggggggggggtttgatttgtatattttttttttacaaattttccccaattctaaaaggcggcggcggcgacgaacaccgaagacaaacgacgtgcgccgatcagtgacgaacaaagtcgtaacgaggtctgttgaatttttgaatttttttcaaaattcattttttcatttgttccaggaggcaccgacaactgaggtggtgctggatttatccgactgcggtgaaaaaaatggagagccgagacgaaagcgggtgagtgtttgttatgcttaagatttttttgtttttgttttgggctcacccattggatgggccctggattttagggctcacgcatttgctgtgggcccggtgtgctgggctcacgcatttggtgtgggccctggatttaggggctcaccctttgggtgggccctggatttaagggctcacgcatttggtgtgggccctggatttaggggctcaccctttgggtgggccctggttttgggggctcacccatagggtgggccctggatttaggggctcaccctttgggtgggccctggatttaggggctcaccctttgggtgggccctggttttgggggctcacccatagggtgggccctggatttagggggctcacctatagggagggccccggtttta

SEQ ID NO: 3585 - DNA, 4002 bp, Heterodera glycines
tgcttaaatttttttgtttttgttttgggctcacccattggatgggccctggattttagggctcacgcatttgctgtgggcccggtgtgctgggctcacgcatttgctgtgggcccggtgtgctgggctcacgcatttggtgtgggccctggatttaggggctcacccatagggtgggccctggttttgggggctcacccatagggtgggccctggatttagggggctcacctatagggtgggccccggttttaggggctcaccctttgggtgggccccggttttaggggctcaccctttgggtgggccctggatttaggggctcaccctttgggtgggccctggttttgggggctcacccatagggtgggccctggatttagggggctcacctatagggtgggccccggttttaggggctcaccctttgggtgggccctggattttagggctcacaggtttaggttttaggggataaatttggcttaaacttggttaatttccattttttttttcattatcgttgtggagcggcgaaacgtcgtgccggatatcgtcactggagagcaaatggaggaggaggaggaagtagcgcgcagcagccattcacattcccgggtccaatgacagcgcagccattcaactacaacaacaattttccgcaaatggcacctttcccgtgtatgatgatgatgatgatgcccgtgatgccgatgggcatgccattttgcccgtaccctccaccgccacccaaaaattgattctcatttgtttatttcttttggcacatttactcgatcaaattaaatttcgcttatttttttcatcaataaataaatgacaataattgcgcgcaaatattagtacactggaatggaaactttttgtgggtgatactgtagggtgagcagcagccattcgcattcccacgtccaatgccaccaccgttcaactacaattttccgcagatgatgatgccgatggtcccgttcatgactttttgcccgtaccctctaccaccacccaaaaactgattctcatttgtttatttgtttttgcacatttattcgatcaaatttaattttgattatttttttcatcaataaataaatgacaataattgcgcgcaaatatatattagtacaatggaatggaaattttattgtgggaggggggatactgtagagtgagcagcaccacacgtacacagcaaatgaaaattgcttttagtgcagcatgtaaaatgtggtgctcactctacagtagggacatttttcagggttgggtgaaatttttaaatgcataagtaaacattgtcgacatagtcctacgtgtccacaggccccaaagaattgcgccacccctacaatacacaaacacatcccccctatattcgggtacaacaaagtgtcggggaaatggacaggtgccaacgggtccccccaacgaaacacggccttcgtttcgctgccggcttgaagtgcggcttccattgggttgcgcgctgccgttgcattgagctgctgttctctgctcattggcccaaattcaagcatcatgcgcccatgacacagccccatccttgctcgttcttggttccgctttcgcaatttggcacatggcatgcaccggtccccgtgacactcatggcatccttgaaaccccattttttaaaaaatgatttaaattattgttggccacttgcggtgccgaacagtgacgggttttgtcccttgcgttggtttggtgccatttttgttggaaattcaatgggatcgatggggaataaaggaaatgccatcccctcccccctcccccccccctgcgctcggttcgcatgcctattgaccattaattaacactgtgacagattcaaatgcggccactgccgaaaaaattcattattattgcataatcccaaatatgaacaattcaaatgaattagggacaaaaatgcaaatcaaaaggaaattcaaaagtcatttttgggtctttttttcatcggagccagcaggtccgttgcgcggcaattggccaatgcgcactcctcacacagatcaaagctgaagcaaacacgatcgccctccacacgtttcaccttctgctgattgttgaacagtcgattccaatcatctcaaaattaattaattaaaaatgtaataattttttattgtttattacccggacacaaataggtcgtcagcaaaaatttgccctttgccaacttccacaactctcggtcctccactttgcgtttcttggttaccgactcatccttcggctcgacatttttgagggtctcttcctgtggtttgggctcgggatgttgctcagcagtagcatcagtaagagtagcagcgcgtctcttcattttggaaaaattggtagaatgattttgagttttgaccgggtgaaatattttggttgggagtgggcgtgtcagggtaaaaaaatttggtgtgggcgtggcaccacttttccggatataaaagtgaaatccatgcacatctgactttcattttctcctgcaatggttctcgtaagcgtattttgcgctcagctgctcgattgccctgtcaaattgttgcgagaccggctcaaccaccccgaggaccgcgcactcgtgctgaaacacctaattgggcgcaaagtgcgcaccacctacaacgaccgtaacgggctcaccaaaacattcttcattgctgggatttcggcacggggcgcagcatttcttcccgcttatggccacttgcgcaacccgttcaacatcaatgtggctgctcatttttacgcccgccaccgcataaagctgcactttccttatgtgccgtgcattgttgaacgcttttcggggggaggggaggacaggcactacccaatggagctgcttgagctgattgatgacaacatggacattgacaacaattggttgggcaatcttttcaccgaaattgacgacaatgacaaatcaagcacatcatcgcaccacacatcactgcacctaatactggaggacgatgacatgtacattgggcgtaatgagtgcagtcaagatgctgcaccatcatcctgctggtgaaactgtgtggttattatttatatctaaaaaattcaataatacatatttttattaagtaattttaaattattgattcagcaaaaaatttcccaccgagaaacacaaatgatttggaatgtaacattgagggttctagcatcaccatgaaggagttatctgatcaattcgctatatttttggatcttttatatgatgactttttaatcagttaccttttaagtgtactgtatgctttgcacactgtaaatcactaacatttgaataatggtaatatttttccccgaaagattgatgctttaatttgcaatggcattgtttttgttttatcacaataaatgattgggatttctatgcatttgcttttgagtcaacggttatccgcccaaacggcaaaatttatcaaatttttgtggatttaataatgcgtgaattgtgaatgaaataattgttaattattttcttctaaaaaaataaacacaaaaatttttcggaagtcggaattccgaccccaaaaatgtcggaactcggaaattttcaaaaattataaaatataatataattttttaaatatttaataggcgaaattttaaaattcttaaccatgtaaaagctgatagcaaactgtttttagtatatttctatttttatttaatttttttaatgattttcaaaatatttgtttttttgggacagttacacctttttttgcgtcgcgctttaaagaaaatagaagttttttgaaaaaatatttgaatttttggaaaattcaggctcaacttccacccgaccgatttacataagtagttaccctacacctatcgtcgtcaggcgtgaaaacgattaatgaccgtttagccattgatgtgttgccgccgcgcgggggtttaccgcataagccaatgcctatggggggatgtgaagag

SEQ ID NO: 3586 - DNA, 3570 bp, Heterodera glycines
  unsure (1)..(3570): unsure at all n locations
aaaaagggcaaattgcaattttattttcatttccttttttcggcagctcattttcttagggcttttggttccttttgggcaaattcaaaagctgagattagaaggtcgtcattttctttgatttttaaaatttaaataatttaggaatttttgttttaaaatttggggtttaaacattaccattttaaatgcaattggcgcggttcaaatgggtaaggggcgaaaaaggcgaaaactgcgcttgtcaaatgacaaaaaggcattaatttaaatgtcttcaataaagctcataacaaatatatatatatttttaatgaatttacattgtatgaagtattggaaaaagaatacattaataattaattttttttcagcatttggggggggtgacaaaacttaaatggccaatggaggggggttaaatttttaaatgggggagggggtaaaacgtttaaagtttggccaatggaaatttttgtgaaatgggggacgaaagtttttgctaatggggggggggttaaacttttaggcggtgatgaaaaactttttggcaaaaaaaaacttttggtcagcgatgcggtgattaatgatcatttggtggcggcggcgcggggcgcaggcagtggtgtggggcagagaaaagaaaagagtgagagatggaggagagggggaagagggtgggaagggcgcaagggatgaagagagatagaggaaggagagattgtgacgtaagagagaaagagacagattgtggggcaagggaggaagagagatattgcggggggcaagggagaaagagcgggtagagagagagcaaattgtgaagtggcagacagacagagaaaattgggggtgccgataagggggaaagtgatgatgcggggcaagggaggaataggagaaagaaagaagagagattgtgggcaaggggaggaagagcggatagagaggcagtacagcaaattttcaagtcaaacagacagagaaaatttgggtgccgataagcgaatgtgggggggggccttaagaaaagaaaaagggaggaatgttgcatatattaatcaaaacatttttgagcgttgggaaaggggggggggcaagcaaattatacgaaaaatggggggggggatcccaaaaaattgtcaaaaataatgttgttgatccaacaacattatgatcttgttgttgatgggtaatacagcaaattatgcataaaaaagttaaaaatagagtaaaattggtagngggggggattgggatcactttcatttattttgccatgcagtggttcccctttatttgcactgagtgcgaacccgggcttacgtgttatcatccagataactatcgtaagcccattctatgtatacacagcagtattgaaaacctcaccgactttttgaggcagggcaaaactgaaacaacatgcccaaccgaaacaacatcaacggccagcagcaccatcatctgtcctccgcctccaccaacgacaactcacagcattttactgctgttcatcactgttttgattttgttcgtgtttttcgcgcaggtccccccccccctcccgtctaatcattaattcttttttttaatcctttccaaagttacaggctttcaaaatggcaattgttgcacggcgtctgctcaaaaaccgagccattcaaaaacagttggagcgccgccaaaaaagtcagttgaattttgggcaaaaataaataaataaatttttttttttgaagacatgaaaacgcttcgtcgtcagcaggcggcagcagctggtcagtcgtccattgttgtgcgctcggtgagcaccggtttgccaaggaaccaaccgattcatcaggtaaaaagttttttgcacattaccgaaaaacgccaaaatttcagcgccagcaagtctgcaccgtgccctcccatgaggtcatctacgacgtcccatgcaccggagaggaccagcaagaaggatcggaggacagcttttgagaaacactgaggatccgacaatctgagctttaaattcacacacacacacacacacacacacatatatcattttgcattttcatataatcatttttaattgcattttcatataatcatttttaaattgcattttcatacatcattttcaaattgaaatttccatatacgcattgaaataaaaatttgaactcaatataatgacaaataattagctaagattatggtatgattaattaattttgtccaatggtagaccagaaagggtccatatttaatcattaaaagtgaattttgaattttgggctttgtgtaaatgattcataaataagcagtttgcacacgatgggatgttttgcatagtaaaatgggtcacctttagggatcatacacccaaaatttgaattctgagctgcacatttgaataattaatcgcgcaaataacgaaaatgttgatgggcatcggggagaatttgggtcatcaatcggcacgcgagaacatattgtcggcatataaaggcggaaatcccctgtgttatcctcatttttaaatgaacattcgtccacaatattgtccataattttaatttattttttgcacaattaaatttaataaaaataaatatcttattttcaatttttttttaatttattaaactaatttgaatcattaattaaaagagaaaattttacttcataatttgcaggtcgtttccctgaatctcaatttatcccaacattatcaaaaatgtccaactcttcttcaaaaaatggtaaaatagctcaatctctcccttcacaattaacaatctgtcaccttcagtaccggacgaaatcgactgcgaaatgcccgatgaacgtgttctacacctcgagtgttttgaaagcggcgattatgatgttagtaactgtgatgaattctatatttaaatattttttcctcaattttaatccatttcagattatggaactgtacgggccggaccgtgctaaagagatgctggtcgacctgcgcgactatgccgaggcgcacggaatgccatgtcaacatgtgaagatgctgctctacaaactggacaaggggctgatcaaatggaaggggacaaagccctgagaatgaatgaatgatgtgtgatgatcattgtgttggggagcgggaaaaattggtgatggtgtttattttaaaaatggaaataaacaggtttgggaaaattttggcaaatatttgggtccctgatcagtcacacgggggctcatttatgagcgcccactcccacccattcctcaaaccatgttgtccaatgcttggtcatccctccgtcttttggtcagtcacacggggctcatttatgagcgcccatcccgccataattatctatataagatgtggcgtggcacctgggccgacttttttgcgtataaatacgggctcatcgggtggcacactcttcatttggtatccccatttcactcattcgcatggcaatcaacatctccgacaaaaaatagttgtgcagcaaatcctcggccaactgacctcaccgtgacctcagtggcataacatcagcggtccccgcctctcgacac

SEQ ID NO: 3587 - DNA, 6806 bp, Heterodera glycines
cccccctccaaaacacatcgggcttttgcacgctaatttgtttttggcatactttgttaatgtcggttttattccatgatgagaagattgtttcgcccagagcatatatcaataccaatggcccgaagaactggaatttatttctttttcgatgtttatactccccctatttattttccactctaccaataataacatttaaataaaattataattttttatttcttatttgattaatttcgatcaatattttttgataattaaacaaattgtatttttcaaaaaagacctttctcgcagtagcaactcatcggcttttttttactcccttcataaaatgtctcgcttttgccccctcgcccaaatcaaggaatcgggtcggcttaacacaccaaagggaaaatttagtgagttccaaacctatcaaattaaaaaagaattttgatattcgttttaggtcttttttatgctttggaaattgctcgaagctaccagctcatagggaaaagtataacggaaaacaaattccgttatctgatgaagacggagaagaaacaaagggaaatggccatggaattgatggaaaatgcagggataagaaactttggtacccaacaccttgaggctgtacaaaaatactgggacagggaattcccggatatgtttcgcattgtggcttttgaaatggtaacaaaattcgcttgaaaaatataaagttacatatttttagaagaccgggcttaggccaattttcaagggagagggtgttcgtaaaaatgaagtgggtgtgataagagaaggagaccattgggatgggatcaaatcggcttcttggttttttggtgttcgatacttctgtgtcagctgtgaagtgacgtacgatcgacctgaaagacacagaatggagtgtaaggaacgctgcaagaaatgttgccggatgggattcgggttcccatgtgcggatgacagcccggaaattaactgtgacgagtgccatcgagacttctataacatccaatgctttgaagaacacaagaaattggcttgcaaagagtataaaaaatgtgaaaactgtggggagacacacaacactcggaacaaacacacgtgtggggaaaaattttgcaaactctgcaaagtttgccacccagggcggcaatgtttcatcaaaaaaattcaagtgcgaccgcagaaaacctacagaattgtggcatacgatctggagacgacagtagatgggggagaacaccggcctaatcttgttagtgctgcacgtacttgtaacatttgtgcgggagaagagcgtgaatgtgagatttgcgaaggccccagtaaaatcacatggtcagtagcggatggttttgagccaatgagcgagtttatcgtttggataatgggttttcaacgatttgaaacgattgctttcgcgcattatgctgggaggttcgattcacactttgtcttgtccgagctaacgaagaaggaaattgcgacggagttgatgatggctgatttgaaaatttatcaaataaaggcgggaagagtgtactttcgggatttttggatgcttagtcagaataaattggcggaccttccaaaaaccttggggttaaaaactgcagctaaattgtattttccacacaaatacaataagaatgagaattttgggaagagattacccaacctgccttctttgggagactactgcccggacaatatgaaggaggaagaagccgtaaaattggaagcatggcacaatgagaattttcaaacggaatttgaactaggtagggaaaatagcatttttttctttgaaaataaaatttaaggggaacaactcaagacgtattgcgaaaacgatgttgaaattttgatggaatcaattttgaagtttcggcagttatttttggggataacaggagatttggatgtgatgaaggacagcgtgacaatcgctggtgttgtgatgaagatattcagggcaaaatttttgaaggacaggcatattccgatcatgcctgagggggggtacgagaaagctgagaatcagagcaaaatcgcagtgaaatatttcgaatggttggcccaaaaaaagggagtaaaagtgcggcatgcgtgtaacggaggagaagtggaatttggggggctgaaggtggactgtgtgattggggcagagaaaaaaataattgagtttcaggtaaaagaaaaaatattttctttttaagcaatacttaaggggtgtgcatttcacgggtgtccaagatgttttttgccttggacgatagcgccaaatggaaggacgatggaagagaatcaaagtagaaccgaaatacgcatggaaattttgagggaaaagtgcaaaaatttttcaatcggagaagtttgggtagaataaaacatttagaaatatttattaattgttagttttaggagtgtgatgtcagagaggaattgaagaaaaataaggagatgaaaaagttctttgaaagtgtgccagacaagggaccaatcaatccgagggatgcttatgccggggggagaacgatgcccttttgtttgtacgcaaaggctacggaagaagttgagatatcaatgtttgacatcattagtttgtatccctttgtcaattatggtaaaaatctacttacttttttataattttttccgcgcttaaggcactccataccccgttggggtcccaaaaattgtagtgagcagggattttaatgtgaattggacaacacccgacgacgtaccctatgatggacttttgaaagtgaaggtcgtccccccgaaaaatctgttatatcccctcctccccgtgcacatcgatgaaatgctcctcttccctaattgttggtcttgtgcgagaagggccaagaatgaatttgtgatgacaaaagatgtgaaaaaatgtaaccatcgtcccccgcagagagcatttttggggacattcacatcaattgagttgcggaaggctttagagctaggatatagaattgtgggattctatcgagcgtatcattttgaacagtttgacagtcaactgttcaaaggatatgtgcggatgtttttgaagataaaggtggaagcgtcggggtggccggcggaggtgaaaagtgaagatgaaaaaagagcattcatcgaaatgtataaggcaaaatatgacatcaatttggcgtacgataaaattggactcaatcccggactaagaatgattgcaaaattggtgagaaattataaaaaatctctaaaaattgttcgaatttaagggattaaacagtttatggggcaaattttcgatgcgcaataccctttcaaatacggaaattgtgggcagcatggaacgttggatggaattggggagagacaatacaattgagtttgggcgcccagtaaaaataagcgaagagatatcaagagtcgtgtaccggaaaaaggaggagttcatcagggagcataaagtgtcgaatattgttttgtcattgtggaccacgagtgctgcgaggctaaagctgtacgagtacatggagcaggtctacaagaaggaggggtgtaaactgctctattgtgacacaggtgaaaaggaataaaaagaaaataaacacaaaaaatttagattctctagcttttgctcatcggaaggggcgctgtccgttggtggaggggaaatttttggggtaaaacataatttttgaaacgcatttaaattgtggttttaagggagatgactcgagagtatgcggacagcgaaattttggagtttgtgtccgcgggtccgaagcagtacgccttgaaacttagaagaaagaaggatggtgtgatttggcacaaaaccaaaatcagagggatgacactggatagacgaaacgaatttaaatatgaattgttcaaagaaatggtgctggattacaagaaaggggtcaaaaaagtttttcactacccggagaagatcgggccgacaaacgacttccgggttctctcaaaagacgtacaaaaagaatatacaccggtgcagaaaaaaggaattattgacgatcactttaatgttttgccctttggatattattaataatttttgttttgataattttgtctcatgtttataacatttaatattttaaattaatcaaatttgtttcatttttttagaatgtcaaagaaaaatttccaagaaacttcaaaagaaatccgccgctcgaaaaatacaaaaaattatttcaaaaacagtcctaatttggaaaaatgtttcgaagaagtggagagtcacataaaggaaaataaaaaatttgggataaaagagcacgtgacaactttctattttaaatgccccgaaaatgaagatcccgaaaaaatgtttaaaaaaatcctgaaaaaattaatgggggatgcaatgagccgagaagctgagccgagctggaaaattgagaaaatttcagtggacctttattgcagtgccctgtcagacccagtgatcatccctgcccgccccttccaacaatcgaatccagacattgttttcaacgagttcatgcacaggcagcaatcatttggggaagtgaatttgttagaccagagaatttcaataattattgccacttattctttccctgttaaataaaatttttttcatttttccatttcattattttttgtttattacaataattatttattcgagtttttttctttattaatttttcagttaaaatgtactcgtttcaaaaatattttgaggaggctctcgaaaaagaagattttttctggcagaaaaacagagcagaagtggaggcattgttaattgaggcttcaaattataaaattataatacacagggactacgaaagccgctattctgattatattgccacctatcaccgcaccccactcttctgtttctgcatgattgagagaaatttaagatttttttacgacacaggaaccgggacgcctataggaagggttacaactgtgctacatgttaccgttgaggcgagctatacaggagagggattcatttcgcctatgttttccttttggttttattgggagggcaggagtcaaacaacaaacgaatctttcacgagccgtctttatttgtacactgtttcgatgctaagagcaatgggcaaagcctgggcagagaactacttttgaaccctgttgaagttttaattgatatgttctaccaacgtatagataggttggaacatagaaaaaacaatttaaaaatatattttagagatttggtcggatcgtggtcattgttctatagactcccaccctcactttttgacacttcccgccgggtggttgcggagaataaactggaagaatttttaaaattaccatcattttttcgcatgcttttttataataaatattaaatgttcatgttgtttttaaagtgaaggttttgacccaaatatttaatcaattttaatttattatttttggtagaattccagaaaatgcaaacaatcgctgaaattaaaaatttcgagattgttgatggtggaagaatttttgttgtgagagcgagaattgagaatgtgatggaggcggagtacagggtttgtaataaaaatgaaaaaaatatatcagtttgtttaggcatgcactttatgccgtaaaggggcttgttcttgcggggctgagaaaaagatgacatcttatttgaaggtgtctgtggcagatgatacagggcttttggaaaatgtgggatttttcggtgtgcgtgggaaacagaatgggatggtaacgcaacgcttttttaaaaatccatatacatttaaatttaggatgaggtcaaaagtttggcgggcgccgtgtgcaccatgaaaatcggcgcgagggtgaaagaattcggagggaagagggggatctattactctttgattgatattgtcagcctttaaatctataaataaacttgttaattttttcaaataaaaatgttttacttaaaattatttctagtttggttcttgttggtcggaacggaaagttgttgcctttcaaaagaagaaaaagagcaatttaccagtgcccgaagaactgtagaaggcgtatttagagacataattaggttagataacgaagcaaaagaattttctttttctgcacataataccatggttgaagcccaaaatataaaaaataaaaaccctgataaacctggtgtaaatttttggcatagcaaattattagatggagttttaaaaattcatgccctatttgacaaaataaaaaaagaagaaaaaaatatgaaaaatattaaaaaaggtatggaaaaatgtctagacagaaaagatttaactatgtgtcaagaattagcagaagaggccaaacaatcaatcgaaatagccaaaaattatcggcaagaaattgggcatatttatcggaccgcttactcgcagcccgatttaggcattggagacttggccaataaattaaaagaaacaatgcgcgaaaaccaaatacggtttgaaaggcaaagacctcaggaagaatttagggatgaatttattgcttataaaatttaagaaaaaaaataaaaattcgagaaaatgaaactgcatgagactcaaaggttgtgggacataaaccaaaaacaggtgaaaagggaaacaggtgaaaataggtgaaaaggaaacaggtgaaaacaggtgaaaataggtgaaatttcacctaaatacatataggggcgtgcattaatggggcatattagagaatgtctcaactagtatcaataaaaagtgccaaaggaaaattttgtgatggttatcgctattacaaacataaaa

SEQ ID NO: 3588 - DNA, 2143 bp, Heterodera glycines
  unsure (1)..(2143): unsure at all n locations
gccctgccttgttcacagcgactatccgatactcgtagccgtgaccaggctgtacgcgttcgtcagtgtacgcgcagtcgtacaccggatgtgtgttcacctagaaaacgcccaaattttgaaaaaaaatgaaaaatgaaattaatatgaataatattaaattattaattttaatttttttataaaaagaaaataatttcctttctagtaaaaaagcctaattgtttttttaattaattaaaaaatcaatcaaaccgaaaaaaaaaattaaaaatcgtctgttttttagtcatacctttttttcggtgttatgtcgtactaaaaaccctaaacattctcccagcaaatttcaaaaatcgaattaattaaaaaaaattatgacaaaatattttgaaaaaccaggttttcttgaataataaatgaaattttaaaggctaattaacaaaaacactttggaataaatgcggagaacaattcctcttttgggctgatgaaaccatcaaaaaatttttgttgaattgtttttcaatatcggtttaatctttttttttttaaattcgcaatctttccgatcaccttgatccaacggcccgtttttgcgtccttccgttgcacatcataatgggtgattggcgatccgccagtgtccgtcggcggtgtccatttgatgctgatgtgattgttgtcgtggtccgtgatctcgggacgtcccggcttgccaggccggccgtacgggtccttggccagcacggccgaatcggtgttcaacgggtcggaacggccaaacgcattttcggcacagacgcggaactcatactcgtggccctcctgcagcttcggcacggtgctgcttgtgccgaccacaaagttgttgaccggcacccaaacttggctgcccacatcacggcgttcaaccacatagttggtgacctcggagccaccgtcgtcctccggcggttgccatgacaatgtgcacgagtcgcgcgtcacgttgtccaccacaagtggtcctttcggcggcgccggacggtcttgcaccagcacttcaaagtggccttccgtctcgcccacttcgttcttcagccgtagctcatagatgccggtctcagagcgctttgcggccgggaagaagattgacgtgttgcccggacggcgtacgtccatgatcagctcgggcggcagcgtgccggcaccgcctgccttcacccagcccacagacgggtcaggcgtgccaacaaattcgatgtccagcgtcagtgtgttgccggcgcgtactttccacttgcgttgcgcggtgatgatctgcggcttcaggaagcgcgccttgcaaatttgggacgctgacggggccgacggtgcggacgggcccgcttcgttgacggccagcacacggaactcgtactcttggcccttgcgcagcccggtgcaggagaaggatgtggcgggcgtgtgcccaacttcaatccagctggacgagcccttctcgcgccgctccacaatgtactccttgatgggcgcgccgccgtcatttgtcggcggcttccatgctacgtcaatccgattctcatcaaagtcgatgatcgcgggcgcgtccggtgcatccggcacatcaaacggattcttggccactatttccttgtccccctccaacggcttgctctcgccgtacacgttgaccgctttgacacggaacatgtacgccttgccgggcaccagccggttgaccttggcctcgcagtcagggaattggccaacttcttgccaagtgccgcgcgaggtgtccattttctccactacatagcccacaattggcgcaccgccatcatcttctggcggtttccagctcaacgtgcagccctgtttgtgcacgttgcgagcctgaaaaaatgatggattggacatagccaaaagcattaaaacacaaaaatgaaaatatgcaaaaattcatatatttaaaaattaaattttttcaattattttcccaatgtaaaaatttcaaattttggaagtcttggaaaaacgtaacaaaaatttattgttaaggcatttaggcattcgtgatcactaattttatgaacgattttgaaatccaaaaaataccgtattccctataatacnaaccccgccatgaattagagctccc

SEQ ID NO: 3589 - DNA, 2205 bp, Heterodera glycines
  unsure (1)..(2205): unsure at all n locations
ggctcgccctcaaaactccgcgtgnatgtgatcggttgcccagcccggacacggatgtccatcagcgagttcaggttcagcttgggcgccagtgctcgtggcttcgccgttttgggctctgtcgggtcggacggttcgccctcgcccgccttgtttatcgctttgacacggaactgaaattgaaatttaattacaaattcaaaatttccattttgaatccacgtttggcaattttaggcaaatttattttttaaatcaaaaattgtcgatgctataattaaaaaacaatcaaaataaagaatttgagtataacattactctaaatattcaaattaataattcttgatatcattcgatagccgtgaaaagtgagtttgttcactttagcctataaatttaaattaattgaacaaatttaaaaaagcatggacaaaaaaacgcaaatccatgttatttttttttgcttttctacctgatattcttcacccggcaccagcccagacgccgttcccttgcactgattgcccgtcacgtgggcacaaggcgtccataagccagtttttgtcttcttctcaatcacatagccgtcaatgggtgcaccaccattgctgatcggaggcttccattccaactgaaaattttgcttttttaaataaaaattccgaaaaatatattttaaaaaatttgttaaatttttaatttaaaattttttttaaatgaaaatttccaaaaaaaaaattattttcatttaaaaaaaaaaaattaaaaattcaattgtttaacttttgaacaattttttttatttttaatcttcaaaattcaaaattaataactctcacaaaaaattctatttttttgaaaaaccttgggaattttaaaaaatttctcaaaacatttccaataaatcatataaatggtttttattgaaattttcgaagacgttttcaacaaaaatacagtagttgccggaataccgtatgccaaaaactcacatccatgtggtccttgtcccagtcgaccaccttcacatcctgcggcttgcccggcgcttcccacgggttctttgccaccacaccgcggtccatggccaacggcttggactcgccctgtcggttgactgccttcacacggaacttgtactccttgccctccacgagacggttgacgcgcagctgcgtgtccggcgtctcgccgcacggcacccaacggccaccgtcgccctcctggcgttccacggcataatgcgtgatgggcgagccgccgtcatcgtctggcatgtaccatttgacggtggcactgtccttggtcacgtcacgtgcctccaacggtccgtttggcggagagggcacgtccagcacgaccaccaacacttcagcttcgtcttgtccatgctcgttggtggcgatcagtttgtatgttccgctgtccatccgttcggcgcccaatgtgcgcaacttggtgttgttctcgtgcgagttgtcaattttggtactgaaaatttcgatgaaaataaatttgggtgcaagcataatcattagggttgtaaattatatggactaaaaaacgcgaaatatggacataaatatggactaaaaaagcatgaaatatggactaaaaagctcaaaaatgaccaaatatggaccaaaatatggactaaaaactgccaaaatatatgttttaaatatatatattcaatatttgcttaagtaaacttagaaatacaacaaacaaccaaaaaatggatttaaaacttaaaaattcaaaatttttattgtcgaccattgtataaaaaacacctccaagtttgccaatttcaaaaaaattatcatttaaaaaaagaaaaattcgcaaaaaaatagtgaacatattgattaaaaatgccaaaatgacaacgaaaactcaaatttttcgtattttttggggtgtaatttgtaaaaatttccaaaaagtcaatctttaggggtgtatttttcgctttttaagatttttcttgtgaaaatttgccaaaaatggcctaaatatggactaaaaaggcaaaatatggatttattcccgaaaaccccaaaatatggatttatatggactaaaaaccttcaccaaatcaaaaaattttaatgcagaaatgctatatttgagcctctttcttcatagcatatgcgcagaaaaaatatgtttaatccatacaatttataaccctaataatca

SEQ ID NO: 3590 - DNA, 1849 bp, Heterodera glycines
ttttaaaaaaagttcaaaaattgtttttataaaaaaccataaatttttttcgtgaaaaattctgttataaaaatttacaaaaaaaaaaatttgcggggtggaacgaactgctccgaatagtaccaaccgatcagatgtgccgagctgagtgccgttgatcagccattggcactttggatcaggttcaccgtccacgggcacattgaactcaatggtgccgccctttttgatccgaatctccggcattgctgatcggtcaatttttggcgccagccgtcgcgctttggccaacaatgtacggcttggatttgacggtgctgactcgcccgctttgttgacacccttgacacggaattggtactgtttgccttcaacgagcccatcaacgcgtgcgtccgttttgctggccggcacttccgtggcgtattcccattcgccgttgccaagccgcttctccaccacgtacttctctagcggagcaccgccgtcctgaaaactcagagcagtttttgctaataatgccaggctgtttcattacaaaaatagcacagaattgaccaaaatgggctcaaaaaaaaactaaatcgccgtgccgctttgaaatggtcagaaaattttgaaaatagcatagaaaatcattaaaaaatctctccatttataagaaatgccttaaatggtcagaaattttgaaaatagcatagaaaaatcattaaaatctctctctttataaaatctaaaaagacaaattacttcaaaactccgagaatttcctagcaaatttatagtataaaaagcttaaaaataaaacatccgaaaatttcctcataaaattatgctaacaaactaattaaaaaagctggcgccataaataataacccacatccgttggcggtgtccacttcaggtcggcccagtttttgtcccagtcaacaatgtccggtgttcctggtcggtcggccttttcgaatgggtccttggccaccatagattttggagcctccaatgggtccgactcgccgtaacgattaacctggagcaaaaaaattaaaaatttataaaaaaaaatgaaatttttaccgctttgacacggaatttgtactcgtggcccggctgcaggtcgtccagcgcaatgcgcggctctgtgctttcgccagccggcacccatcgtccggtggccaagtcctgcttctccaccacgtaatgggacaccggtgcaccaccgtcgtcctctggcggtttccaatcctattttttgaaattagcaattaaatgacaaaatgaaggaaggcattgatgttgaccaatgtgcatccgttcttgttcacatcggagatgttcagcggtccgcgcggttcaccaggcctaaaaatgtaaaaaaaaagttgagacggaaattttaaaaaaatcgggatttgagaactgcctcaggaccagatttcgggattaaaacccgggttttcgagatcctgacccttgtgaatcatttttaatatactcgaattccggaccgggatcccgaaaaatatggaccggattatgtccccgtccagtctcgaatatagagtgtggtaagaaagtaaaaagtatacggtaattttttaaacaaaatatactgtaatggaaacaaaaacggtataacagtattgacacatataatgataaattttctgtggatttaataattctatttacaattagacacatttttttcttgctggttgtactatacagtacgacacttgcctatccaacacggtgaccagcacttgtgccgtgtcagtgccgctgtcgttgcgtgccgtgatgaagtgcgtgccggtgtcggtgcgcaatgcccgtttcacaacaa

SEQ ID NO: 3591 - DNA, 3887 bp, Heterodera glycines
  unsure (1)..(3887): unsure at all n locations
cgctttgtccgcttcaagaggttccgactcgccttccgcgttcacctgtaaaaagcgggtttcaaagaaattaaaatgtatntaaatttgaaaaattaatttatccaagaaatttcgaccccattaaaatgaaatttaataaattaatttttaccgcaaaaaatgagataatttaaaaaataataattcttccaaaaaaaatctatcacattgaaatggaatttaagaaattaattttttcaataatctaccgccgacacgcggaatttgtactcgtggcccggctgtaggccatcgacagtgaattgggtggcgtcgggccccgtggtgcgccccgctttcacccaacggccgctggccgtgtccaacttctccaccaaatagccgtcgatgggcgcaccgccgtcatccaatggtggcttccagtccaatgtctgtcaaaattgtaaaataaaaataaaataaaaatgaataaatatttttaatttattttaaaaatgtaaaaataaaatgaaaaaaatagatttaatttaagtgttgtaaaaacaaaaaactgaaacatttaaatttaatttaaaaaatgtaaaaatataatataataaatatttttaatttaaaatatttaaaaataaaaaaatttaggttttattttaaaagtgaataaaaacaaaaatgaaaagatttaaatttaatttaaaaagtgcaaaaatatgaaataaatattaatttaaattattatttacacagcgatctgcatgaacgtcggacacattgagtggaccttccggtgcgccaggtttgtctacaaaattatttgtttgtttgtgcccaaattatttaattaaatttaaggacaattaattaatttaatatgaaaattatttttatatttttaattcaaataaaattaatttcagcatttttatgtggcaaaaacttaccaattatgtcgacttgaacacgcttttctgcttcaccattttcgtttgtggcacgaatcacttaatttaattttatataaaatttaatccttaattttgtgtaaattttctgattatgaaaataattaatcaaattctctatcaatttatttttaattgaattaatataaaattttacaatgaattgcaattagttaattaatgtttaatataccattaattaagtaattaataatcaatttatctaaatcgaaaacaacattaaattttatggcattaaaaaatgaaattcagataacattaattgtattaacataaaatttcattcatttattatccctaattaatcgcattattaaacattttaagccaccaaaactgaccatattcgccgctgtgcgaccgctccgtgcttttgatctgcagcttgcaacggccctgctcctcgtcatgctcaagccgtactttgccgcccgctctgatctcctgcccgtccgggtacagccacacaacgcgcggcgtcggctcgccttccaccggcacatcaaagttgatcatttggcccgcgtgcaaccgcaacggttgcaagtcgccaatttggggtggcacattgcgaggcttggccacaacggatttgctcggatcgctgggctcggatgggccgcccttgttcacggcggtcacacggaattcgtactcctcacctgtgtgacaaacaaaatgccaatttttcaaaattgtaaattttcaagcataattcagtttcctattaaaactgtgaaaaaaaatttatttggcgcggcacccaaaatctaattttcaaaattcagtgttaaattacctgtaaagttaggtgttttttttagaatagttacgggtgaattcaaaatttggaaaaacgtggcaaaataaattaatggagaattcaaatatttttaagggtaaattaagggtttcataatacattagtcctatgttgtttttctgtgaaatttttttgaacttctgctgtcatttttgaagagttatggggactaaagatttgtaaaaataatccgaaaaacgaattaattaatttaaaaccgaaaaattcgaaatgattttcgctgcgctaatttttgtcttaataggtagggaggggttgccaaaaaataattaaagcaacaaaaaagtggaaaactcaaaaaaatattaaaaaattgcaaatacgatgcccattcttttttcaaagacggaatccattttttataacccttggaaaacgtacccttcgtcaatccgtcaacagtgcccgcggttgtgttcccgtccgtggtcaatgccggctcccatcgtccgtatttgctccgtttttcgatgacaaattgttcaacgggtgcaccgccgtcatttgccggcgggtcccatttcaggtcaacatggtccgcgtcccagtccaccaactcgggcgcgttcggcttgtccggtcgttcgtatgggttcttggccaatgtcgatttgtccgtttccaatgggtcggatttgccttcggcattcactgcctgtgaaaccaaaaatttttttgtaggggaatcatcaaaattgggggatgattttgaaaatagaatagctgatgaaattacagtaaccgatggaacgacccccaattttgggcaataccgtaatgaacattaatccgacaatttaacaataaatgccaagtaacgtagaaataaagtcagaataatgaccatcgaaaaaatgtttcttccagactgggaataccgtaacccaaagaaagcacagtatttcaagcgaccgaaactaccgtaatgccaagcattggcgttttgccaaaagacaaattcaaaaaaattatgctcacgcacctttacgcggaatttgtagttggcccccttggccagtccgtccaccaccatgtgcgggtcggaacatgtgccgaccggcacccaaatgccgtcccgttcgtcctgacgctccacctcgtagtactgaatcggctcaccaccgtcgtcctccggcggcttccagtccaaagtcatctgattttcgaaaacgtccgacacttccagcggacctttgggcgctgtcggacgacttttcactgcgatctgtgaaaaacggtaaattataatttttgaaaatgatttaaattaaggagaaatggcaaaattgaagtattaattttgaccaaatttcaatgaattaaaaaaaatttcattgcactttttaattttttggtgttacaaaaattttgcatgtatgcgaaaatgaatatttagaaaaggaaactaaaaattttttttatcatgaaaccgaaaaaatttaaatccaaaaagaaaacgaaactcaaaagtgccgaaaaaaggggacgacacgtaatttcgcataaccctgatgccgatcacagtttatgataattttttattttcatggcgattcataacttttaaagccaaggtaacccggtttttggttcccaaaattgtttagccgagaaattccaattaccaataccaactcgagaaacattaaaacagtgcaacaaaaaataaactgaccgttacagtaaccgagtccgagccgttcggatttgttgcggttacggtgtatttgccggattgtgcccgtgtcggtttgaccatggcaaatttgctcaagtagtcctggtcctgcacattggcacagcttggcaatgcttggccgtcctcatatgtccatgtcacggtcggcggtggttcaccatcgatgtgcacattgaacttgacgtcctcgcccggtcgaacgacaaggtcggacagatcttcacgatggatacgaggcggcacttaattattaaaattaattaatataatttaaatatattttagaaattttaatttatttttttaattaaaatatatggagagaatttattacaattgcgtggctttgcaacccactggg

SEQ ID NO: 3592 - DNA, 1045 bp, Heterodera glycines
agtgacagtaatgcccggctctgtacagcgtccacacggtacccatcgaccgctcgccatgtccagcttctccacttcgtaatggtccacgggcatgccaccgtcatcagcaggcgctttccagtccagcgtcatgcggtcctcaagattggaatacggtaataccgtatattcaatggacaataaatttctcggaaaataaattatcatgcaaaagaagactaaaatgccaaagtaggagtgtaaaagtaacgaattagaatttcccggtttttttaatttttcggaaaataggcgttaaaggagcaatttcccgttgaattaattcgcgttatttaaatttttagttttttatataaaatttgatcacccataattcttctaaaagtgatcataattccatattaaattttaaaatttgctgtaataataataattattgggtcaattttaaattaattatttaacgttattattatcacagactatatttcattttcataatcctcctcctccctacctccaacacatctttgacctccaacggcccctccggcgcactcggacggcccagcacattgaccagtacgccgtgtgtgtcggtgccgctttcattggtcgcggtcagcgtgtaagtgccggcatgcgcacgtgtcgcgttgcgaattgaaaaattggttttgtagtcctcatttgcgatgcgcaatttgtcgttttcagcaattggcgcatcattaaaggtccacactttttcgggcggcggctcgccggtcaccggcactttgaagtccaccgattggccaaccttaagcgtcagttcagaaatgagaattgtttttttttattaaaatgaatcatttttaattacccaacgatattttttcgagaaaccatggacacttttgagtctcgagtaatttggagtcccccaaacaaaaattaagggttttttaataaaattattcgattatttacgaaaaaatgtaagcaaattgaatttcaaaggtattttaaaaccgcgctactttttggttttttattaaaa

SEQ ID NO: 3593 - DNA, 1001 bp, Heterodera glycines
ttttcttcttcctgcgtaacatttttcttcattttcttctgatcactctctgtctccgactttctctcttccgtctctccgtttttgctactatttcgtctcgcttcctcactctgtttgcttctgtcactctccgacttgcttctctccctcgccccattatctctctgccatccctctccgtcttttcctccctcttctccaacactcactatttctctttctctgcttccgtttctctttcttttgataagatttcccaatgcttttctgtagaaattcgcttgtctcctgaattgttgaaataaacaaattcgccttatttttgtccatttgccttgatgaaattgcggtctgccggaattggcggaccaaagcgtcgcttcctccgagttgggcaatgatccgttcgctttctgattttgccaaatgttcccctctttcccccccccctttttttaccctttcttcgctgttcaaattgtccaattacgctgcgcaaatgcatattctcttcaaccaatttgttgatgattgccgtgtattgttccttctctctcataaactgaatttgaatgatttctgttttattttttattttctttgcctccgattccggcacagattgtgccaaatgggaacgaagtcgttggcactcgctttcgagtcggttcatcattttgcgcgtttccgtcgcttgggttacgtctttgtcggacatcaattttctgaagggattatttatgatacatatataattattaattaaaaatatatttattttttaaaagaataaatgacttttactctctctcctctctctctctcgctctctctctcgctctctctcccctcccctccaggtttttattattctctcactcactcattctcggcactcttttcctgcagcatccgctcgtaaagcatcactttgcggcgtaatgatgctatttccagccgtgcccttgcgcttttcccttcggcggtgccgtctttcg

SEQ ID NO: 3594 - DNA, 3642 bp, Heterodera glycines
agaaaaacaaaacggagatcgttctttctgcaggagggtttcgagtgaaatggactgcgactcatcgatggcattttgccagtggcatttcgatgaccacccaatggcccgggggaagtctctcttcgcggataggtggcacattgtgccgagcttttgtgtgccatttcgttttgttttatttgcttttttttagtatttatcctcaatgtttcaaaaatttaagctgatgcaaattcgtcgttcccgagtttgtttttgtcatttgttctaatgccaaccgaaggagaaggaaaaagtcagaaaaaagcggccaaaaatttgtcaaacgaagtgagtttttcagagaaattgaagcggaggatgaataaataattttttgtttaagtaaaaagtgaattttgtccaatttggcaatatttaatataacattactgtaagagggaatttatatatttttttttcgaaacgaaacctttcataaaaataattttttatttgattttcggtctcaatttgtactttttatttgattctctctcccttttttgttttataagttttatatcaaattttcatttgaagctcataaattttcgtttttagcgtcaaaaagttaaacttttcctcaacccgcgacaaaaaatgccaccgacgacaagagaacacattaaggtatttttttccaaactagtatttccaatctttttctgccaggaatcccaatatggctttgtttacggcgtttcgggaccgggttggttttatttcgcctcattttttgataattttttacttttaagtggtaactgctgagaaaatgtccggtgctgcaatgtacgaactcgtcagagtcggccattctgaattggtgggcgaaatcatccgattggaaggcgactacgccacgattcaagtctacgaggagacttgtaagctcgtcaagttcgataagttcactcgtcctccgttaagcgtccgtcacaatcggtgaccccgtgctgcggacggggcagcctttgtctgttgagcttggcccgggcattatgggctccatttttgacggaatacaacggccattgcacgacatttcagaaatgaccaaatccatttacattccgaagggtaaaatttgtgattttattcccttcgaattttaatttgacattttaggggtcaatgtgaaggcattaaaccgtgcaaaacgatgggaatttatgccgaggaaagatttgcgagttggggaccacgtgacgggcggagatatcatcggaatggtgcacgaaagtgcgttggtcaagcacaaaattatggtggagccgaaggcgtgcggaacggtcaaattcatcgccccgcaaggccaatacaccgtcgaagttggcatttggacgaaatgccaaacttattgactctttccccccccccccccccctccacaaaggacaccattttggaagtcgaattcgctggacacacccaaaagcttacgatgatgcacatttggccagtcagaaacccccgcccgtccgccgaaaaattagcggccaatttccctctcctctgtgggcagcgcgtgttggacgcgctcttcccgtgtgtccagggcggcacaacggcaattcctggtaaacagttatttttgctctcattggcacttcggcgtttttctattttatattttttaaattttcaatctattttgttggtctaataaaactttgtgaaacgtgctaatagagaccgaaattttgaaatgaccagtacttggaaaagggaccgggacgggatccccccgatcccaatttttggagcggagcccgacgagacttttcaaaaacgatgaaaaaatgtaataactatttttttaacttttctccgacgatgattagggagagtaattccatatttgcagtgtaattggtcgcttttcaaatttttgctccgttagctctgtttttacccaatttccttataatttttcttccccagtcttttaatctgttgtcatttgtccgtcctttttcaggtgcctttggctgtggtaaaactgtcatttcgcagtcgttgtccaaatattccaactccgatgccattatttacgtgggctgtggcgagcgtggcaacgaaatgtcggaagtgttgcgcgactttcccgaactgacgatggaagtggatggagtgaccacgtccatcatggagaggacggcgctggtggccaacacttcgaatatgcccgtggcggcgcgtgaagcgtccatttacacgggtgggcactttgccaagactgtatttttatttttcgttaaatctcccctcccccttccgcaggaattactctggccgaatacttccgcgacatgggtctgaacgtggccatgatggccgactcgacctcccgatgggccgaggcgctccgtgagatttcgggccgtctcggggaaatgccggctgactcgggttaccccgcctatttggccgcacggctcgcttccttctacgaaagggcgggaaaagtgaaatgttttgggtcgcctgaacgcgaagggtccgtcactattgtcggcgcgtaagtgcatgtcgaccgatggcactttcccttcccttccctttgctcagagtgtcgccgcccggcggagacttcgccgaccccgtcacatcggcaaccctcggcattgtccaagtgttttggggactcgacaaaaaattggcccaacgaaagcacttcccttcaatcaattggctcatttcttacaggtgggccaaattgggaaaaagtgaagaaaaaggaaagggtggactttgtttattacaaaaaaaagtcaaaaacaatggttgtgcgatatcatcggccaacactttacggacattagctaatctttcgtcaataattgcgtcctttttcgtccgttctgtccctccctttgtctttttctgtctcaaaaattgctgaactgttccaccggttgttcctcgctgtgcgcgagttgcgcgtgtcgcgttgcctccggcaatgcgtaattttcccccggcgcgtgctgctgtctgcacctctgtctttctctgttttgtgctgctgcccttccctttatgcagccgaccattgacgacagacaaacgcactaaacagcaccttctttctctgctttgtctttgtattttagggtccattgcttttattggacctttgaccctccgcttttattctcagttaattctcattacggctgtttgattcgactcactgatttgtcccctccgctcatataatcgatgtattggtaccaaatcaccatgaaaccaatcgccagaacattgaacagaaaacagaggacaaagcctccctcaattgcgcttattgtcaccaaaactttccagtggaattcggtctgaaaattgcatttcatcgccgtcataaattcacaaaatgatttcacctgatagaaaattaaaagagcgccggcactcgaattgacgacgagtaaaatggtgacgacggccaacagaaaagtgttcacatagaccaaatcgagcacttcgagtttcagtgagatgagcaaactaatcagagagacaaaagccaagcaagagacaccgccgtacaaagacacagcgaacggagcattgacagcatgtcgaactctg

SEQ ID NO: 3595 - DNA, 4344 bp, Heterodera glycines
tcgttcgcttattttgactctcttggcacctgatttctcctttgttgccgctgctaaaatatcttccgcaactttttgtgtgtcgtgccccaattccgctgcgctttctgtcccattccattgcgtttgtctctgcccattttttgttttgttgtcatcgttcgtcctccaattttcttcgtccgttccgttgccaatttgtgccgttaatagccgtattagttgttgattggtttttgggtgtgtcgttgtattattttcgttggtcgaatcgaatgaaagaacggcgttttggccactgtttttggtgaaaaattgatatccgccgacgtgtacaaaaagaagtccgatgagaaggcagctcagcacggcggtgcccgtttgaattgcgaagctgaccatcccacttagtcgtgccggcactccgcaaatgccatccactccgcggtgggagtagtaatagtcgtgctgctgctccctgccgttcgtcgtctccattctgttcgggaagttgctaaccatctgcgattgacgctgttggaagtgtgcttcccactcactgccgtagtgatcgctcactgttgttgaaccgttcgtttgtatgtcaaacggagctgcgttggcggtggcaaatccaattgaatttgtccgtccaatttggcgatttgtttccgccacttcgttttcggcgtttttcccttctgctactgatgctgcttcttctgctgttgtgtataaggggggtggagacgtgggaatgtttgggttcggattttcgaatacttcccacttcctcttcagctctccgattatcccatcaatttcctcttgtccgagtgttgaagtagatgaatatttggtatgccgactctttggtgccggggacggagaaagtgcagccgaattgtcggaattgttctcttccttctcaacttcggctgattcttcttcctttttgttgttttcacttttttctccaaaaatttcttgtttgcttgacgtaattttgacacgtttcgattaacgactttttaaaaagcactttgcatttttggtctaatatattttaaagacgtttaaacgttaaagggaatgtgaatggcatgtgtaaatggtaagcaattcattcacccttaacaatgctttgttccgcgcaattaatcggccatttgcattttccgcccatttcgcactcccttacaatgtcagttgatgaagtgtccgggcggacgggtaactgccattaataaatgctttaaagcggcgggaattagccattgactgcttgtgggaatgggtgctttcctttcccctcccttcctctctttctctctccgttttgcttctctgcaaactttgccggtttccatggacaaccgagccgagtaacaacgggacaaaaatgagcagccaccgattgttgctattgtggtgcctgttgttcctctttgcgtccatgactaattcctcctcaatttccttttttgtcctcccgcagctttccacgttaatcatgtttaatttttcaaatcatattttatattatttttaccgccataattcaatgacaacatttttattttctttcatgtgaaataattgagttttctaaaatggttgtgaataacttaatttggcttttgcattgaaagtacaattggtatttagcaaatatatgcgtgcgttggacgattattacgagaagaattttgccgaatttgttccactgagaacgaaatgcaaagaaattttgcaggtgattggcattataaaataattgagaattctcctgtttgaggaagaggaagatttgtcagaaattgtccaattggtcggcaaagcatcgcttgccgaggccgacaaaatcactttggaggtggccaaactgatcaaggacgatttccttcagcaaaatggctattccagctatgatcgcttctgtcccttctacaaaactgttgggatgctcaaaaatatgtatggctaaagaaaagcaaatgatcaaattgtgttgttcgaataaacatcctaaggattggcttttacgactttgcccggcactcggtggaaacgactgcacaatcggacaacaaaatcacgtggaatcagatcagagatcacctcggggacatcattcacgaactttcttcgatgaaatttgaggtggacatggaaagggatgacaacaaccaaatcccaatttgctaaccaattaggacccatccgaaaaaacggaagatcagatcaaaaaggattacgaagaactgtatgaacggatgcagaacaaattccgagcgttagaggatgaatgaacaaactgtgatcaatgataacaatttctcaaaattttccctcatttctcttagtgtagtgatggaaaaaacgtctcagtgagttgtagttgtggtaggagccgcacagtttccatcggcacgagtgggcactgcgtcgttttgctgaaagcgttagaatgtattcaagttatggtcatttgattaccgtaaaccgatgggaatgaccgtcgcatagggccaccattttggtgggacgacggcggaattttaagcaacggtatgaacgatggactcaggaagggcggagagggaaataaatttggcacgacgggactgaactggtcgagcggctgaaaagtgccaatggttaaagctagagttgtacgggaccgggactggtactaaaaaacgtttcaactgactacctaagtcccagttttggccgggactattcccggttttttcccagccaaaaagtcccgtttttcaacccgaaaagtcacggtttttctcaaaattcccggtccagtacagctctagttaaagcatatagggaaaagcagaaaccattacagaacttaaggaacaacgaagggaccgcacagattcataatgagcatctgactcattttatttcttcgagttattaattaaggaagaatagatgaccagtataacttattacacacaaatgaatttgccatttaaattcggcatttgctaattggcaaataattaaactcacagcagccgaaacggaagacgacgacagaaccaaacagagcaaaagcatggccaaaaacaccgggaaaaccatcggagaaggagcgaatttgaaactcaccggtgaaaggacgagttgagcgggaagaggacgaatgaatggagtttgattggattggccaaattaaagggcaacgaatgggtaaagggtgccgcgtggggagtgccgaagtgggggagggcatgcaaaaggccccggtggataaatatttgctctctctcacttcggcgttcattcattaaattttaggaaagttaatcacttttggtcaatttagtaattcagggaaatcaaaggctcagcaatctttgcatttaattttaaattaaatttcaaacagaaaaaaggacagaacaatgaatgacgaaagtgtcggtgaacaaattaagttggaaagaccaaccgactctacgaggaaactttgtgctcctccctaattgaatgagcacttcctcattaaatttgttggcctttcattcttcgacaatctccgcgcggatttctccgccttttgcctttgggcccggccgcgggtgcgtcgacggcgattggaacaaatggtaaatgctttccaactgatcggccacccaatacggcctcagttggtttggcgctgcccttcgaccattttgtgctatcaatgcgtcgctgggaattgccaattttggacaggtgccaatgccttggacagcaattggacgctcttccgccgattcctccgctttttgtcgttgtcttcccattttgggaaacgaatgatctgagggaaatgaaaataaaaaaataaataacaaaaagaaaatgacgaatttaaaaaaatggaaaaggaaatgttgtcagcacattgaatctccttttactttgtatcaattgaccaaatgttagaaaaataaacttttgttggtttttttcgttgtccaattgcgtgttccaacaaatgctcccctttcccctacccttccccccctcccttttccccttttcccttccttccgtttggttttgtcattttaattggtgggcaaggaagggcttcctcctccgccgcattcattgcctttcctcccatttcatccaattcacaattgcccgtccaaatgccccgagggtcgcttcttcagtgcctttcccctcgggccaattgccaaattcccaaatttggcctttcaaatttgtctgttttcgtttgctctttcattactttttaatattgtaaggattgagccggcggcggacagttaaaatgcttcaaatcgaggcgtaaag

SEQ ID NO: 3596 - DNA, 3946 bp, Heterodera glycines
ccatttctaagcgcattgttcagttttatacaaagtcataaataattccaggtattttacggtgtgttaaaattagtaaataagtagccaacgaggaaaggaggccggtctacaatgtgaaaagtcaaaaatcgacatgagagttgtgggggtgtagaatgattcacaattcaaaaaataacagggtgcaagctgttgatgatcttcttgccagaggagtaacgactcagtgcttcaatgttggtttggacacagtgcgcaatgtgacgcagccaattcgggtcgccgggacgacggctttggtacacctttttggaaaggaaaaaccaattggacttttgtcttacaatcagtgaccgtttatgaggttataatcttttcttaattgactaatcttatattcttaaatcaaacgaaaacgaatttaaatcttataaactccagcttcaaatgacactaagaatagtggcattgaggaagtaagaaaaaagatggtccaggggggaggggaacgtaatgcacccaaataaaatttaagtaagaacacgtaaaacatacgtcacgggcgatggggatcatcctctgaacgacgtaattgccgtactgaaagggacacgtaatgagatgcccatgcagaaggtcatggaataagtcaggttcacctgattgaacagcatttcatacagagcagtccgctgctttccatcactgaaaataaattggtaaaaatggaaattcggaaaaaaacaattacgttgaaggtttgtacccctccaacacctcccggaataacatggccaaacagttgcagcggtcctccgcgtgcttaaaagcctgctcgaccacgtgcgaagagtatttaagcagcgagagatggtaaacgttgcgactgaaatttgtgtttttgagcgatgaaagattaggctttattttacatgatgtgagttttgatgatgtaacagcgttggcggcggagatagggcgatttgataataaattggacgaggtaattggcgaattcgttttgggccaacgaatacgcatttttgagaatgggttcaatgagaacatgcaatatttggatggaaatttcccttaagctttacgaatgataacgggccaaaaaaagaacaattcacttttccaagctgttgttggcattcgcagtgccatggacgagttggacgacattttcaaggacgaattggatcacacgacagccgtacttattctgcaaaaagacacgcaatcagttaactaaacagtcaacgaaggaatattctggtgaatgattctatcgacgtgacggcatttagcttcactcccaattctttgaattgtctatacatctcatccactaccctcccctcaatcgaacttcgaaaacggcgctcagtcgggtgggacagttggccaaggcgaggataaaaggtccgtacacgtcgggcgcaaaatggtcaactacgcattgcacaaaatggttcccgttttggtcggtgaccaaagtgttctcgtgtcctttgaactgttggcagaacaattggcggacttgggacccggacaaattaacgacgagctaaacaaaatgggcataagtatgaatcaaggacgtgtctcaataggtaataatgtctttttttcggtggaccccaaaactcagccgccgaaactcagccgagacataattcaaattttcaagaaattttcagcgattttttttttaaattttttgaattcttagtaaattttgaaaaaaccaactgaaaatttctttttaaaaaaatttattcacggctgaattatgtctcggctgagttttggtcggctgagtttcggcggctgagttttgtcctgctccgtctttttttaccttctggacaatgcgacaagcaaaacgattgagcaccattttaaaggcgagcggacggaccaaattgagcaacatttgattggtttcttttgaaccgttctcaactaacttctgaaactattgttaacgaatctgtttcagtcccaaatgtgatgcacctgaatgacgaaacatccgttgcaatcgatgcacaattgcagaaagcgttcttttccaccgttgacaattgcacacaaaacctggaaaattcacaacatcaacaaaagacgttctctgccaaatgaatccaaaagtcagttttgatggatttgatcgtacttgctgtcggaattgttggtcctggtccatccgttgctgcaattcgcggttgcccaccccggcggggtcttttgccaacttcactaaaacgtcgaaatccgaaggagatctgaagtcatgacagtggagtccgttggtgatgcctttgggtggagaaatagaagaacggaagttttcgatatgacgtgaatattccttgttgtccaacattgagccgaacagtggtgagtgcattgttagcgaatcaaaacaaaagtgagcgatgagtagggttagtttttttaggagctaaaaactgccaaaaggtaggatttagggcacttttccagtttatacaccccgaagcttccagtttatacgctcccaaattttttttttttaattattcgccttccaaagtttatgccaccgcatttctgagccacagacacaagttcgctttgcatgaaggagatgcagagaagttaaccattcttgaaattgagcgtcagaaagttgtattttttgatataattttgcaggagtaaaatttttggcgctatttaaaaagagggcctttttgaattttttttttttgcacttttttttgctcgaattttttttttaaatttattttaataataatgaatagggagtccaaaaatatgtacataaaatcgcaaaatatgcgcataaaatatgcaccaaaaatcgcgaaatatgcacataaaaagaaaaatatgcacataaatttttccaaattgagggcaaattttcaaatttcttcaagtttgttaaatgtaagcataaaaatcccgaaaatagctaaaaatagtatgaatgattattttggaaccaaaaaagtaatatttatttattttgaagaaaattgcgcaaaaaatggagaattttctatttttctgactatttttggcataaagttccaattttttaaaaagttacttttttaccagaaaatatacccaaaaatgtgattttttttgaaaaattttcggtcattagagcccaaatggccgctttaatagagggggccgtttaatagaggatttattgaaaaaatgcccaaatatgcacataaaatatgcatgaaatgccgaaatatgcacaaatatgcacataaatcgcgaaatatgcacaaatatgcatatggaaagttatcctagaagcttcaaaacaagctaaaaacatgtttttcgtgcgtttcaggcctcccacagtccaggaaaaaaatatgcatgtgaatataattggactccctaatgataatctaagtgatttttttgaatgaaataaagaaaaatttgaatatatcaacaagaatgaggcatgaaaattgcgaatgagttcggagaaagtcagaaaaattggtcatatcgaaggtcgcgcggttccgcgagacccactcgggacgaaaaatggcgtatttttacataacgatttgtttaaaaattgaattttataaataatattataaatttatctggagaaaaatgaatcataatttaacttcaaacttaggtaatcaagttttaactggagtaatagagaaatctttggtctatctaattaaagaaaattaaatttggtagttttttaattatatgtttcttattttaatgatcatgtaaaaattgaggaatattctatcgctcaataccaatggattattatttgattaagttttgagcaaaattctgcaaataaattaaaataatattaaagtttaattttaaaatcatttacactttttgtgttcga

SEQ ID NO: 3597 - DNA, 3572 bp, Heterodera glycines
  unsure (1)..(3572): unsure at all n locations
caatttggcgcagtcacaaacaaaggacctgctctacatcttcgggtgagaaaaagtcatcaaattttttttcaggactaaaagccgagacggtaaaacaaattaaccgaaaagccgggattggctgtgatttgttttgaagccgagtcggcacattctaaaagcagtcaaagaaactcctagacatcaaaagccgggttgactctccgaattcgtcaaaagccgggtcggctcagcaaaaattcgacaaaagccgggttggctcgtcaattccgtaaaaaagcagacaaaagactgcttattcttctaaagccgggtcggctcgacaaatttcaacaaaagccgggtcggctcgacaaattcttcaaaagccggattgctaaacaattgacgatggacccaacgcagcttaaactaattttggaggttgtcttgaaggcatcagcggaacaaagcaacagttctgctgcattggcaacagcaatcgatgctcgcctttcaacatttgattatgaccctgagttagggcatacattcgacgtttatgacgcagggacattttgacgggcagcgccgctcctcaacattaatatttttctttattttttatccaattaaaaaaagagctgtttttgaaaagtttttgccaatctacaatacctaatttggatgatcatggtgtcatttaaaaaaattcacttacttttgttaactgagtcatttttttaacattttcaaaaacatggaccggctcagtctattcactatcttcataaatacatatacaattcagcttagatggttgtaataggtcaaattgatgctttgaacgacgtatttgcctttgttaccgatgttaatggcaaggaatttcgtgtcccgcgggaattgtaagttattgcgtaaataatacaacaaaattccaccaaaaaaggattcgtgagccaatgttcggaaattactatcagtttgatggcacttttctggaaagtgatgttcttgagccaacttctgtcacggctttggctaatgacagcaaagcgttgttggacgcccgggccaaactttgggatgaaaaattcggaaatgacaaatgcacattgcagaaaatcaaggaaatgggcatcgattcgttagtgaaaaagtagggaaaacagattgaacatgacaagaaaagtaatttagaatttttgattcgtctgtgagcgaagaagcgatggaagagaatgaaacggagcaaaaggcaaatggaaatgttaaggtgggtcgagttcgccatgacgtctgacattgtaattcgctttggtttttcagttgcacgtcgaagtaaagcgaagcggcagaaaaaacaaaaacggggcggagatttattgctcggacaattttccattggttatcgacagcagtggcctcttgaacagattcttggaggatgagccaatcataagacacgcgccggaccgaaaattcggtgtttggtgcgcgccgcgaaaatattcgatcgacggaattcaatggaaaattgtgcggattgatccggagagcaaaccaaagaaatcggtcccgaacggagttagcaaaatgaatgggcgcagcaaagaatgtgtcagcaatggagggcagactgacgaatgcatttcgagttctccatcgaccgttccttcgcttccatcgacgactgttcgaaactccccgaaattggaggaggaggaggagaaagtggatgagaatgaactctttgagggactcatctgctcgcaaaatgaaacccatttcctcgtcttttcccctgggcgtcgttggttgggccgtttggacaaggcaaagtgtggcaaggacagtgcgtctattctcgggatgtggatccaattcaaaatgtaataaaatattttcattccataagaaaagtctctcttttcagcaagaataaagccggtatgaaattcgtggacacgcgcttcatttttattcgccaaaaaatcatcgcaactccaaccggtgattatgtgttggttgtacattttaatttgtgaattagttctatgtcatcaccccatttaatttgttattntaatgcccagattcgctgtcgtctcaatattcctccattccttgaagtgagcgaaactccgtggtgtgaggaattgcgtacaaatgtcattgataaggctgagatactcaaacaagagcactatggaaaaactgtcctggtatggacaagggggggggggggtcggaaatacgcgtttatgaaataccctaaaaaatacaggcggtgattggctgtccgacgcaagtggtggacgaggactcctacgttctgaagtggcaattgctgagtgtggtggattagaatgataagtatactcagccaaaactaccgatctcactttattgtattgccttaattatgtacggttgacgattttattccagaatgtttttaatttattacattgttcaagttgattacatgacaataaaagtttgatatgtttaggcaagagaaaagtggggaacaataaaaaatatatttccgcatgataattggttaatacaaggttaataccatctctaatgttagtctatcattttgtaaggagacaatatcagccgagggtcaaacagtcgtttaataccagaactaaacattcgccgtttttggtcgattagtttgtgatggtattctcgcttcaacagtcctatcccatgctctgctgaaatgctcccgcctgttgaggccactgtttcataaatgaaggggtaaagcctataaaaaagaacttgtgctttacaccgacaattaatccacctttggtaaacgtcctcgtcaaatgttggcacggtgacgttgagatgggcattaccatcgcctgttttgagttccaagtaaatggcacccatctttcactcacccaaatggccaaatgtgcaaattcgtcggacgttcgtctcacgcaagcgctccctaatttgctctgtcacctcgtaaaagtgttctaatggcaacgaaatgtcgtgcttgaacacgtaaccgtcctggcgaagacccaatgagcaattctcgcgaattttccacatgtgttcagcctcggacatattcttcgctagcactccgtcagcagccaatgcgtcgccaatgcatcggtcgaggaatcggtccatcttcgctaagtcatgttccgagtcggtgccttgaataaagaagtggtcagaacacgtaaataaatgacggaacattcagttatgcaataattacccacccgaagtttcaatgagcaaattaaacgaatatgcaccaaaaatcgcgaaatatgcacataaaaagaaaaatatgcacataaatttttccaaattgagggcaaattttcaaatttcttcaagtttgttaaatttaagcataaaaatcccgaaaatagctaaaaatagtatgaatgattattttggaaccaaaaaagtaatatttattttgaagaaaattgcgcaaaaaatggagaattttctatttttctgactatttttggcataaagttccaattttttaaaaagttacttttttaccagaaaatagg

SEQ ID NO: 3598 - DNA, 1673 bp, Heterodera glycines
atttgtagcaaataaataaaaatagtaccggaattagggtcaaacgaaaaggtgtccgctatttttttggttgacaaaacaatttcatcgtgaacctgtaacgtttttgcacgcttttgtcatgtcaaggaaattaccggaactgaccctccgaccaatccggtattgcccgcctgaggcaccacggccaaccgacgatggaagcaatgtttaagcacagcggacacttgctgaacggactgaggaaggagaacacactgagaacgacctgcaaaaaatgggatttatgaaccaaaaaacggaaatgaaattactaaaaaaagtattcagtgagaaatagaaaaatcaaacaaatgcagagttcccaagtttctattttcaaaataagacaaaatggctgaaaaactaagattcggaccccaaaaataagatttttccaaaactaatagtagcgcgaagaaaacgcaataaaaacatgaaaaatcgacttaataaatattttattagcgtaaaaaccagagctgtgaactgaaaattttcaaaattagcattggccgacaaaaatcatcgtttggggtcaaaaaccagttttttgaacagttttattcaaaatgattaaaaatcaacaaaaatataatactagagctcaaattttgcattttttttaactttcaaacccaaaaataagcacaaatcttggaaataagcacacttgggaactccgaacaaatgaaatcccacctgtgtaccaacgcataaagtcagtgttgtatcttaaaattgaaagtgaacaggaacgaagagaaaagcattcactcgtcaatctcttctgtcttaacacaacggtcgccgacaattccacgaaaattccgcagatcatcttcagtaagttcggcaaattctcctctccgttcgatgactgttgaaaacaaatgtcgaccattgaatgtatgaagcaacccccggatgatagcgcattttaataatgccattgctacgaaattaatttgtgaaaaaaagttcaaatatttcaagcaaaaataatttgttgaaaaaaaaaacaaatgagaaatgaaagaaaagggaatttccattagatttataaaactattacgacaataaacagcaataccatctatttttcatacgtcaacaattgtctttatttttcgctgatggctctgagcgcggcttcggccacttcaatggaaattcccgcctcggccttctgcacatcagttgcattgaggtcagaagctttcttttggctgacatcaatcaaatttttgatggcctaaatttgtggggcaattagccaggaaaatgagtcaaatttgtgcctgttcgttgagttcgctaagagaacaaagttcctcagcgagcacttgacacgagccgtcaatattcattgaaagggtaccagaagaagcgaaaaacttggagacgtttcctaaaacattgaaaatcaatcacaagatacaaattcgaataatgttgaacgattccacaatatttggaacaaccatcaagttcgtggactttgacaactccgggctttaagactgcaattgtaggcacatgggtaggaagaattccaacactgctggacatccctgtaacatcaatttgtttcactgccacatttgcataaaatgcctaaaattataaattaa

SEQ ID NO: 3599 - DNA, 7348 bp, Heterodera glycines
tggattttctcactcggacatcacaaggtcggttacgttgggcttctggaaatccttcgttattgatgttccgaaggggaaaaaaattctgggctttctgtatttcttttgttgttttgtttgttaaaccctctcactttctcagattgacattgtcgcgcgatgccaaggcggtaacaatgcgggccataccgttctggcaaatggccgcgagtatcatttccaccttttgccttccggattggcctcagaaaaggtgacccaaaaaacaaaacaaaaactaatgttgctgttgcaggtgttgaacattgtcgggaacggagtcgtcgtcaatttggacgcccttttcgaggaattggagagcaacaaaattgaggattcggcagaccgactgttcgtcagtgacagtgcccatttggtgttgcctgtgcacatcgcaacggatatcatgcgggaaaatgcgttgggacaaaactcgtaacaaacggaacattaaacatcgatcaaattatttacatttttgcagaaaactcggcaccaccaaacgtggcattggtcccgcctattcgagcaaatgcttccgcaatggcatacgactgggcgaactgctccaccaaccagagaaatttgaacaaaagttagtcgattaataaaattagttgaccttttgtcgtgtttagctatcgttcgctggtcgcccacttcaaaactcttttccctgacattgaattggacacggaaagtgacgtcaaacagttgaaggtagtttcttttttaaatttcattttgcatttgtcctttttttgttaggcccatgccgcacgtcttctccaaatgggcattgtctgcaacacaaccgttttcctgcacaaaaagcgtttggagggcaaatcgattttggtggaaggagccaacggcactctgttggacatcgactttggtcctatccaataatgttccaatttcttttaccttttcttctcaggtacctatccgttcgtcacttcgtccaattccaccgtcggcggttgcatcaccggccttggcattccgccgacagccgtccgtcgcgtcatcggcgtggtcaaagcctaccaaacgcgtgtcggctccggtccattcccgactgaactgcttgacgccgatgtatgtacttgccccaaaaattatgttaatttgatcgcattgtttgtctttccatagggacagcccagcgaagagggcaaacgtttgcaagaagttggtgctgagattggcgtgaccactcgcagaaaacggcgctgtggttggcttgacttggtgctgttgcgttattctgcaatgatcaacggattcacttcgtacgtttcacccatttattattttatatgttcatatttatagtttttttcataattttagtttggctgtaacaaaggtggacatcctggaccaatttcatgaaattaaaattgccattggttacgaattgaatggacggcaaattgagtaccctccaggtgagctgaacaaaattaacgactgtttttatgccattccaagtgtttatcttttttcagcgaccgtcgatgattgggcaaatttgtgcgtccattacaaaacctttgagggttggcagtcgccaacgaccagtgcccgtcagtgggaacagttgccggacaaatgccgtgcctatttggagttcatacaaaatcaactgggcgtacccgtcgaatacatcggagttgggaagggacgggagcagctgattgtgtgcacgaataacggagggtgatagagaaagagagaagtcataattattgtttgtaaatttattttcgaagcatccaatctgccattctaataaaagtgtggctcattcagttatataaatgatatatcatttgacgtctctcggtctgtaaatgccgaattcgaaagaattttttagacaaaagatgggtaaactccaaatgagaggaaccgttttagattttgttgaacattatgcgttttacccactcgacggttcagtctcgaaggcatttagcctacccatttttgttccttgaaaaggatccctcgtttggttttcgaaccccactttgatttttgtcgacccttctctaaatagtgcttttttgcaggcccgtaaccagaaaaaaatttcggggagggcacccgaagagctttttttttgctcttcgggacaaaatgaataaggaggaaaagcggggaaagggggggggacggcacataccaaggggcagcaaaagaaggggaacggcacgtggcaagggggaaatggggcaggggcaggacatggcaaagaaagggggggataaagaaggggaaaggggtgggggaacggcacatatcaagcaaggggcaaaagagggggaaatttacgaataaaaatataaaaaaggacggatgcataagttgtccaataaatatgtattatcgttcaatgaaacaattaattgtttgatggtattcactcattcatttcttttctttttggccatctccgccggtggaataccaaacggactttttgtcgactgatttttctgccgcgttttgacgaggaaacagagacttcagaaaagtggcaatgtccggaaggacatttttgtgctgaaagagcattcattttcaatgccatccgcaaaattcggcacggcccatcccccggggcatcgtttgtacagtctctgtctaagattctccccccgggggttgcccgtccctttttctgcgattccttcgtctcttttcctttgtgccaccttttcctgctcctcctccccctccccgtcgtccgtcttcggtttccgttctgtgcctgcgccgtacccttcgccattttcgtccgactccgtcgccccgccgcattccatgccaccgccgcagcatccgccgccgcagtcgcccctttcgcgcggcattatgaaagagcgaaattgggcggaggagacaatttgatgctgaacaaacggaggacaaatatgtaattgtgaatgaaaagcatgtttaacttggggaaactcgcgacagccaaacgcgcagagattggcacggacgaaggaaaaagtggcacaaaaagtgagcaaaaagtgggggaaagagttccgaagagatgccatggaaaaggggcggaaactgtgcaatttgtcacttaaatttgtgggccgaatgctcgacaattcggcgtcaatttccgcataaattgatcgtttttcccgctttttgatgtgtcagtccgtactttgagcagcagatcaacggaagaaaagaaaggacggacagaagaaaagactgcgccggggggcgacggatggccaaagcgaagggaagggaaagggccaatccgttggccaaatcaaacaattagcagcacaatgacactgcgagcaaaggtccgttattgtccgattccatgccaatttcaatgcttttcgttttgtctcggtttgttactctgtgccctttcgttgccaaaatttctgttttgctgattgctagggtaccggttaaaattctgattcactggaaaatttcgtcctccaaaattgtttccgtaagaatgactcggtggcccggttcttccaaaatattttggctgaggctggtaagaattttggaaatttctttgaccaaaataacgactttgttcgttttggtatgagatttggttcgcgtttggcaagtggaatggattttgtgaatttcggatttgaaccgaacgttcctcagttttctcttcaaccaaactaagacgattagcgaccattaaaagttcgtcgtatgtttgggacggttttgactgacactccaaaaattttgccatgttcgtgtcattgatattaagaacgaaaaattttttggaaatttcgtctctttgtgcctcacttaaaccaatatgggcacaatttaccagcctttgaattctttcaccaaatttcataacactttcgccctcctttcgtttccccgtctgtgtaagttcctgaaaagcacttgcttccttgtaatccgtctccctcaatgtcgacattatttccgtttttatcgtctcgaatggcgcggtatttccaaatttactcagtgccatgttaagtgccctcagagcttttcccttcaatttcgttttcaacatttccagctttttttcatgtcgccactctccaacacacatttcaacagtcaggaagaaatcattgattttgtcacttccttccgttccgttcaagattgggatttctctcattgtgtttgcatattggttggagagtgtgactttgtgtaattccataataatgtccgggatgggaatggtttgggctgggaacgcttggttttggtaaacagggggatttatctgtgcataaaccatttcgggattttgttggaaatttcttggattcggaaactggccatgattgtgtcggttttcattttcggagaattgcaggttcaatggaggcacaaaattcgaatttgcctcttgtcgggacaaatgttggtacatccgagcatctcgagccgagtattgctcgttttggtgattggcgaattgtgaatgcattcggtgatttgagtcccgaaccggaaactcgtttcgatttggccgttcattgtttcggttaagctgtgaattcacaaacacgcgagggttataaaaattttgtgcgggattttggcggttatgattatatcggttctgaacaagatctcgattttgcatttcccggggaaaattcacaaaatagttgcccccttcttgaaaagaaatgtgcggtgaaattggagttgacgccgcacgggggtttccaatgttttgctcgttcccgccgaaaaaatttatgacagggttcagagggactgcgagctgctgctgtccatggttagagttttgagggtttgattgattttgagcgggggccgggaaaggctgattttcgagggggtgattggaaaaatttccctgcgcattgtttggttgcacaatcgcatgagtgttttcgtttagttgctgtccagaatttcttaaattccccaaattttgagaccattgtgatgaacctgactcctgctccatataattcactggtacacggcggcgaaagttgtaatgtcgttgattattatgaccactgtccattcattttactgcaaaatggaacaaaaacctgaaaaatttgagtcaagactttccaaaattaacacccagtcaaatgcttttgtccgcgtcagcgccttaaaaacgctgtccaaaaggatgggtttacgtcgtaacccaggagcgccaagtcttacctctccgggattgcggaaataggaaatggggtaggactgactgtattttggacggttggggaaggaaatggggtggtcaggtaattaaaactcagaaacacaattacggggacaagattgaatgcttagtcaagatttaacggagttgaagagaagcggagagaagacgaagagaattgttgccttacaaattggccgcacctcgtagtcaaaaagtcgtctgatgacaaacactttgttgatcagaacaaattaaggcgatttgaagaacaatttatttttaaaacacggagaaaaaacaaaaacggagaatatccaaaagcaactcccaacgaacaaaaaacctcaaaacgaatatgaaatttaaacacaaaataaacgcgaaaagtcatcgttttaaaataattaaattgtcattcccagtacgaaaaaaatttactaaccctcccattaaaaatccgaatattttctcaaaattctcaccttcctcgtcaatttttgaccaatttgtcgcctcatcagtgttggacaattgaggaagaaaaagtgtgatttatgcagagaaaagatattggaaaatagtgaattttatgtgcggtcaaaggaaatgaatggacagagcgaagacaaaagtgcggcacgggggaaaatcgaataaaaaattgccgaattgcaaaattttaaaacattaatttctaaaaagaaagcgcgctatatgcaaagttaccgttttcgtttttgaatttatcaaaaagtaaaaacaaaaggggggaccatttggttcgcaaaatttcttaatatatagtcatgaaaatttatcccctgggttttttgggtccatggatcaatcgaatttgaccggataattctggcgccttttcacgtcttccagggcattggaaatgccttgatcaaagagctcgaagggtcaacggaaagcgcggaaattgcgaacgaatttttcagaagcatccgggtcaggagggaagcgttcagaaaaaaggacatgacggggaactccatcagaaaagttctgattcatgcggaccaattggagagacgttactccgctgaatggccacaaatcatttgccaaaccctgggacaattggcaaagatacaaacttttacaaaagtccttttttatttggtttttttaaatttaatttttaatttaattttatcgagcaaaccaaaggcacatagtgctcttatatggtgccaaaaacaaacaaataaaaatcaaataaaaaatacaaaatgaataccgtaataaaaatgaataaaaataaatcaaatgttaaaaattcacaggtgattaaaatatagtgtatatgtgacacagaaaatttcctactcagaactcattgcttttagtaaacccctgaattcctttgccttattaatttgcaccgctaccactggaaggttattccagtttcttactatcctatgaaaaaaattattttgtgttttggccgtgtggcgctttactcgtaaaagtaaaggcctcctgggcctttctgagaaaaagaaattttgctcagcctctaggctggcgaacccttttataattttaaaagctgttgtcaaatcattaatttttcttctttcttctaatttatgtaaacccgcgattttaagtctttccacatattttttgtacacaaatccacattttcgaaaaacttttcttgtgaaaaatttttgtacccgctcaattttgtctatatctttttttaaattagggttccaaacttcggtagcgtattgtaattgaggtcgtacaaaagttttataagctgctgttagagtctttatttccctgcttttcaacactctcaaaatctgaaagcttctaagatatgcgtttcgtacaattttgcttatgtgttctgaaaaattaagtttcgagtcaattataatgcccaagtcacgaacattatccgactcagaaatcttttttgagttaataaaatattcttttttcatattatttttccctaaaatatgaaacaaaacatttttcagttgaaatttctaaccc

SEQ ID NO: 3600 - DNA, 2095 bp, Heterodera glycines
aaaaaaaaattgcgaaaagccaaaaataatgcccagtccaaaaatggaatgaatgtatttgaagagttgcaccaattttcttaacagatttcgttaacggcaccgccagacgttaccaaaattttttgaaaaactcagcgatttatttgattaactacagatttaaaaaaaaattattttattacgacctattcagcattcatcttctaaaatattataatactcacaatcaatgttaaattaaaaatgcatttggttgaatttgagcgaagaaacctgttaaaaggctatttttcaactgcgattaaaatttaaaagttgcgttttattaccccaaaaaattatagtgccggcgaactgtgcagcagtggcaaaacagcatatgctgcaaaatgagctctctacttatgtatattcagctaaaaaatgcaatttcaccttgtaataaatcgcagctaaaaactttttcatcctttcttattttattccatagaatttaaatatttttttaatttatcgggacaataatttaaattgagccgtgtttcataaaacatttctcgtttcaataatgctcaaacaacaatttaatgtaattatcatgcataaatgttcttcttcgttcttatttagttgagtatggtttttccatgacggattctgacgcaaaatttggagctttgatgtgggacacgccacaatcctaggacagaaagggtggataaaaaatataaaaaatgaaaaaaatattgaaaagggtggttgaattaatttaaatggaaatgaatcgctcaccgacggacaatagctggctggctctcctaaatttgacattaattacataaattttaaatgcaattatcggtgttgtacctggctctccgggtggtccgaacccgcccggctctccgctaatgcctgcctggcctggctgtccggtgggcccttgtagtccgattttcccaggtattcccacgtccctaatttttttcggtttaattacacaaataaagaaatgtgcgtggctttcttatttgtaaatgcattcagaacctgcttgctttccccggggcgccatgtggaccttaaaaaggtcaatttaaaaatgggtaaaattgaagcatacgcacgactccggctttattgatgaatcatattatgttgtgtatcaagagttgttcggaggctataatgtggaattccggccaaaaatcccggaattgctgtacagcaatttaatcctaccccctgatttgtaatatttcaaccgctttttctcgacagaaaaacccggatttatagcccatattgaccaattaggctttaactgttcaaatgcatagtttggcaatgtatatattcttcatttttttcccaaaaaatattgctccctacccttggggcctgatgctccgacaggccccggaggtcctttgatgccgatgccttaaaattgcaatgttcgttcatttttttgctgccggacggactgtcacttgcctgccaccacttggtcaccctgcagcccgggcctgcccggcaccccttttattcccatggcaccaacgtaaccacgtgctccatttgggcccataattccttctttgcctgaaaacataaaattttttctcccgctgtgtccgtatggaatctaacagtaaattttgcatttaccctctgagccgtattcgcctgatgggcccgcctctccgatacgtccgcgctccccctgagagcctctggaattgcatacaaaataacattccatttggatattttatagaaatcggcgggaatgggattcccgccggaaaacccgggaatcccgaagccctgtgaacctgttaaccgcctttttgccggaacggaatttttacgggaaagggaaaaaggcttcgggaaattccgtcctgcttttttcgtttctcgttgcaaataaatttttatcgtactatattattttatatattctgctggtgagatgttaccgttggcccggcgggcccgccggacagataacgcatggcatgtcggcctccggttggagttgtacgtccaacccgtcttctccgggctgaccttgtcttccccatct

SEQ ID NO: 3601 - DNA, 7538 bp, Heterodera glycines
gagttgtacgtccaacccccgtctttctcccggctgaccttgtcttcccatctttgcaaagaaatggtcaaacattttaaaattgagatgattttcaagggcgagattagctgagtgattttgataagaaattcatgctctccagaagtttacgttttgtcaaatcattttgcaaaaatattttttaaaattttattttaaaattttggtattttttcttcccaaaaacctttgtttacatgcatgatttaacttcccgcttaaaaattcactattatgatcgggaactttggctataaaaacatgtaaaaaggcattattctacctctccgggcgaaccgtcaggccccggaggacctgaaaaccaaggaaattgaaataattaatatttaatttgttgaaataattaatatttattctgctgtaagcatttgccgttcggtcctggcgtgccacttgcgcatgccaatgaatgacagccttggcagaagtgtttgttccacgatgcacgtgccggtcgacttgcaacaattgttgtatgcatcgttgggttatcattaattggctccatttggatcatttggtgccacgccctgtccgagttttgcttgaatcgaacggacatttcctaaacaagcagatgaggggataatggtgatgaatcactaatgatcaaaccatgtgtttcgcatcaataatctattgatcaatcaatgaacgaaatttttcgaaataaattctttgatcaatgatttgacccatttacaattgatccaatacagatatagtgaaaataaaaataaatagcaaaaatttttttgccattaaatagaaaatgatttttcggtcctgtgatttttggtctagacttaatacaggtaaaactttttctttttttaacagtaactttgagcccatttacagtctccaaatgctaacatagacaattggcattttgtcatttatcacctcaagttctgcacgcaaaatgtttgccttatgcacaattatcggcacgaggaacagcagaacgagcagggcacaagtgctgcagagaatgcccatcgaggcgaacaaatgggaggacttgggccaaggaggagaagcagaagatgaagatgatgatgaacaatattgcatctctgaatatgttgttcttcccattccttttcttttaaaaacaacaaagaattacacgagattaatcccgagccaaagcctggatcattagtaaaacgagatttaaaataagacgggatttaatactggcagatttcttaaatctgccatttagaacgtttgttcaacaaaaaatgttttaacttttttttttctaagcacattttatatttggtattgcctagtgatgaaattttgtgagcttttgagaacaaaactgtttttagagaacaacattcatagctaccaaatttgtattgaaaaaaattatgacaatttgtcaaaaaatgatcgcgtggcggaatttaagaaatatgccagcttattatcatccattcggcccattttccaattccttcataagctttacgatttgacggagggcactcactaatacaaaatgcatgaatgatgaagaaaaaagcgaaattgaagggaaaatgcttccattaacttcctcttttataaattcccattttttcgatacggcggcgcccaaccaaaatttatcactttcatccgttttcaaaaggcgagagaacaaagcgattagctgctgctgactgctgtgcttcctattcgacgcgcccccggcgtgcttttcctcatgatttgtcgccgcttttccccccaggggacattgagcgggtgagctgttagtgacccatttattagccattcattcaccggaatttaatgattaatgaattgggggagcaaagggcgaattttgtctgtgatctgattgagtgaaatggtttgtcaccaatttgtgggactgttgattggtcgaaatacgaaaagttcaagtgtggaatttacaaatttttaattgtcggtaatttatttttgaaagtattttgttttttctaaaaattcatcttaaatataacaataattaaacaattaaaggtcaattgccttccttttgagtttttccgagttcaaagttgatgataacatttttttctccaaggtcttcatcgcggtcattctattatgatatttttatatataatatacaatatacacacaaaaatacatttgtaaaaaaataaatttctttttttttatttggcgggatttcgactcattttggctgtggcgggatttcgacgcggcgggatttcgacgcggcgggattttgacgcggcgggattttgacgcggcgggattttgacgggcagcgaattttttttaatgctttttaaaatttatttttagcaatggttaaagtttcaagatattccattattgattccaacaatctgccgctcctcggctttccaacattggacgatataaatttgagatggcttttttcccaaaattctgaagagattctacaatttttggcacacaacggacttatccaaaacaaaggctaaaggattgtctgtttttaaggcttttattgatttattaaattgtaattataatttttgtgattattaatgctaattgtaagaaaaaataataataaaattgcatgaaaaaaaactgaaaaaatttcaaaactggtcacttttaatatagcgccgacaacgcattaaatctaaacggagggacagattatgaaaacacagacaaaaaggggttcttttgtaaaaatagacaaaatatataatttatgagttgaaaaaagagggagaaaaggaagattcgaacaatactttctacccattcttttgtttcttttccgggttgtttttatacatgcactattttcctgtttttttttctttgcactgccatacaaaagtgtcggcgtattttctttttctgcattataaaaagaaacaaaatgttcagtataaaactgttcaaacgctcttttctagccattattggcttagaaattcgtaatttaatgaaggttctgaaaatgacagcaaaaatgaggacccataaatccgtaactctttcaccactgatttgtgaagtgcgcacgttacatacgctgtttttgctattttactgcaatttgatcaaaaatagaatgaatgtcaattcataatttcgacaatggcaatgcagtctttttttgaacagccattttgtcgttaaaaagtcaaatttgttaaatggcgaatctgattttaaacacacaaatggcacggggttaattagtgtttattatacacacaattatgtacagtacaagttacaagtaatatatacgctatatacgcatcaatttggattaatccagtataatacacaaatatgggtatgtccaatatgaatttccatggcaattcatctcccatcatccgtctgcttcttcttctgctgctgttgtgctcatcaatcactaggctcccaagtcgcgcttcaggtccttcagaagtttgaggctgctgctgtggtattcgatctgtgccgccacgaactgcaccaattgttcagcctgacgatcctggaaaataattgaaattttgtcaaacaattttttttctgggtgtaaaattctcaccacggccgtttgaagagcctccaacgcagtgctgatggtctccagttgggtgtcaaattcgtcttgggctttgcgcaactctgcctcaacctgaaaaacagtggaattagtcaatggttgaaaaatggagtcggcgacgaaaataacacgacgtacagagggttttttgtcgtccgaggcgcgcttccaacggctttttgtcgcgtccaaatccaaccgtttcttgttcaacacgctgcgttccttctgtaaaggaaaagggagggatttggattaaaaattgtcgaaaattgagtgaaaaattgcaaatccacgcctggacggtgcgcagttcgttctccaggaggtgtcggaggcttgccaatgtttgcgtggtgaccgattggatgagttggcgttcccctgctgccattttggactccgtctgtgacaccttcagcagaatggctgaaaagaacagaaaatgcaattagtggggttaattaaattgagcatttccgattcaaattctctcacctccgaaggtcgactcggcgcccaccgctttcgatgctgcttccttaaattttggtgggcattaaaatgtgttgtgaatgccaaaaaccacaccttcatcgcctccccaagaccgtccagcgtgttctgtcggccggatttgtcctttcgcgggtccagcgctcggactgctgaaaattgggggaaaaaattagtgttttcctcaaaaaagcgcaaattccaagtgtccaccagggttcggctgcaggtacacctcgatggcatgcaccagcttcttcatgtgctcctccgtcttgtcggtcttggtcagcaattgttcaagctcggcgcctgaattttggggaattttttttttttgatttttggaaatccaaaaatgccctccttaccgatttcggtcttctccgcgctcagaatgatctccgccgacttctgaaatgtgcagggatggcattttttaaaaatagactccccagaatctgttcatttttacctgccgtgcacggctcgcaagtcttttgagggcgtccattttgaagtgcgcgcgggtggcaaccgatgaaggattgatgaacaataaatgcagacgtttgacgagacttggagacgaacaaataattgttgtgaatagggaattgttgaagtgaagaaaacgagtaaaaatttccatttttatacaaaaaatttccctgaaattttttaattgacagttttttttgcacaaaaagcgattcgtgccgattaccattttttgtctttacgcctttataaatagagacggaatgaactctcattttcattctatctgtaatcattcaacaattgtatttctctgcaattattattataatgtgtttcggccggaagaagaaagggaagcgacagagttcgcctgagtacaccaaagtggtgagttgtttttttggttttctattccagtttacatgaccataaaataatttgacaattttaatgcattaaaactttttctaaaagcatccaaattaaatattcttggcatcatttgatagccccaagagtccttcctctattagtctacgaaggtttaaaaaaattcacccaaaattcaaaaacttatgccaaaaaatgttcaggaaagcaattttttaaattttctgatcataacttttttgaaacataacgaaattctttgaaattttgcaggctaatatagaactctttaactatcgaatgatacaaagaatatttattttgatgcttctagaaaaagttatgatccattaaagttgtcaaattattttatggtcgtgtaaactgcaatagcgtcgttttttgtcatttaatcattttgtttattttctttaactcctcttcccacctttaagatgcccatttctccaacaacgcccccttattcgccgcccaagaagcctgatgatgctacattatcgcccctcgagcagaagccagttgataaatcgccgcttacgaagaaatcgaaggcaaaatctccgttcaagaagaagcttggcacgaaaccttcaaagaagaaggctggcgccaaaacaccgttcaagaagaagaagcttggcacgaaaccttcgctgaagaagaaggctggcgctaaaacaccactcaaaaaggagccggaggataaatcgccgcttaagaaggagccggaggacaaatcgccgcttaagaagaaactggaagataaatggccgcccaagaagcccgacttttcttcaccgtccaagaagcccgttcctctgccacgtgctgcaccgggtgccaaagtgagttttccgcaatggcaattttctgtggcatcttgtctaattacaaacacaattaagactgctgccgctgcttctcgtcaaccgatcaaaaaaggcgccgctgcatcacctctcaaaaagcatgctcttccattgcgtcccctttcgccggcgggcaaacgaccggctcctcatcctcctcaacgtccactaacagcagcgaaagtgaaaactgatccatctcatttttgctgtactttttttaatcgcaacaatgttttagcctgttgcccttcctctgcgtcctccgtcgccagcagctcatgggcaagcagttcatcaacctgtccagcatggtctccatcaacctgttcatccttatgcaccgcctcatcagcagcagccaattcatcctcgttattcaccgccacaaccgctgccattccaaatgccggctatgccaacaattgcgactggtggtggaccgctgatccaagtcaacgtgcaacgaaaagagaagccgacgccgcaacctgttgcaccgttacgtgctggtgtgaagcccattccgctacgaaagccagtgaaagctgatgatgaggaggagcagaacgcggaggatgacatgtacagcccaaaacagcaacaaccattggaccatgggacaccgaagaacgcacttgacgaagatgacatgtacaacgtgccggacgcactgaaaagcgaccatggcagaggtgacgtgcaacagaatcatggtacgacgacaccgaacaatgctcttgacgaagatgacatgtacaacgtgccggacgcactgaaaagcgaccatggcggaggcgacgcgaaacagatgggtgcaccgaagaatgatgtcgacgaggatgacctgtacaacgtgccgaacacaacgaaggacagtacagacgacgatgacttgtacagagtgccgaaatcatattaatgttgtaacgtgtgtctatgtatgtatataaaagtgccaccccctgcgtattgtgcctattgtatatatattttatgttaatgtgcttgtttggttgtgattgtaccattacgtttgcacataaaaaatttgatttgtgtttcatataccaaattaaatcacaaaaggaacaaattgaataggtagtattttaaatcgttttcctaccaaattttgtaaaatccaaaaaatttacgtggccattttttcacaaatctgtttacaaaactgatgcttgtcattggccgtaaatatcttacatcagatcactccaagtgatcggcagggcattttttccagctagaactttcgagtttttgccggcaatcatggagtttactggtcccgtttttttttctttaaaaatcatggaaaaattttttttagggctattttactgtgctgagcacgaatccgaccttatttttgaccgattctgaaccccgaacccggattcgaacatttttcaaaaaaatatttttaaagtttttttctttcatctatgtttgtcttgagcataaacagcatgcgcataatgggaaatttggtcataccatgataacacttgttttaatttagggccgtaggctcactaacaatttaa

SEQ ID NO: 3602 - DNA, 1179 bp, Heterodera glycines
ctgctgacgattatttttccagtcttcgagcagataattccaactgttttgtaaatctgaactgccattgctggaattcccaactgttggttcatgcgaattcattgaccaacgtgaggtgaaaacatcaaaaactgatgagacattggatgactcatccttcttgaaaattgttagtcgttttgataaaggattggttaagcattaaataccgttttctccatatttgaaagcatttgtttggtcatagaagcagatgattgaggtcgtgcgtaacctggcgccttccgttgatgttcttctcttgataaaatggccaattcttccgcgttgagtgacttcacttgtgtcccagtagccacatgaaccgctggagcatattcagactttcgaaggtcaatgccggggcagttggcattgtttgttggtgccgcaatcggtgaaacaatgccatgcagagaatgtccatccaatacggctatgaaggagatgtaccattcactagaacactaattattcgaaccttttttctcccgaatcgcctcagcccttttctgccacacattcgcaggaggggaattgccaatgtttgaattgttcgcagactgcgtttgcaccacaactaatggcgagaccggcacagatgcggcaccggtaatgcgagaattagttagatgagatggttgttttttcgatgattcttcatttgaaaccatcggtgaagacggaacagacaaaggaggggtgccaacacgttgatgttgaaaatgcagtggatggcacgaggtttcggatgaagatgaaagagatggggattttcgctgggtaaccaccacgcggtcaacgatctcattgatcaacaggttgtggtctttgagaagcaaatcaatcatacgtatggcattcctgcaattttaattgttcaaatgtgcgttcaaaagatggtcgatcccaaagggggagtgagtgacgttcccacccaccaagaatgtggttttcgaactttcgtccgtctttgtccccacgggataaaaccccaaaaaatggcttaaaacatttcccatcggctaactggaaaatcccaatccaggaaccgcactcactcttaccgaactgagtctgcagagtctttaagcgttattttgcgagtggtctgctccttgcgcgtacttagctttt

SEQ ID NO: 3603 - DNA, 2171 bp, Heterodera glycines
  unsure (1)..(2171): unsure at all n locations
agtttgcttttgtgtgcatttcattttcgtgatgggttttggcaaaatctgctcttgttgnntcgagggttccaataccgggattgctttgccttcaggtgcaacgtttgactttttttcggcatttaactcttccttttcttcatcaacggtctcaggttccgtcgtctccgactgttgttcattttctttctttgcctgtttttttgcccttttcttttctttttgacgttctttgctccgtttttttgattcctcaattgcctcctaaatgaaggtcaatgaaggctgaccaaatacgtttattttaatttgattttttacattgttggaaaagtacaagtttagaaatgtgtaataaaagtcaaacttcatgagccaacagtgccagaagtgattgtgcggctttgttcgcctgttctgcctgcttttctttggcttccgaaatgaattgaacagattgaccacacttttcgataagttcctgtaaaaaaacgagccaaattagaataatattaaaatgagacttggtccgttaaggtgcaaatgaaacgctggcaatctgagtcgctggggaattgagttacatgttgaacgaggaaatgaacaagctgtaaaatgaatgctgactaatttaaacatataaaaaatgccttcgaatgtcctttgcgaaaggcagccatcaaaggggtgagttttcgattgtcttgcgcttcgatgtccgctttgtaatcaactaatacatgaacagtgtccaaatgaccattattggacgcctaaaaaatgaaatacaataactgattcgtattgttgtaagtctcctctttaaattaaattgacaattttcttacaagccaaattgcggtgcacccttttttattgcgtgcattgatttgtgcattatatctcaacaaaagtccaacaaaagcagcctgtcctttgtcagcggcaatggtcaacgccgtgtcacgacttgtaggcaccggcgttgtgtttacgtcggcatttgcctggattaatacagtgccaacgtccacgtatccgccattggccgcttccattaaaggagttagcccggtctaaaaacaaaaactgaaagggaagttgaaagaaagttagagggacctttgctcggtgttccacattggccccatactgtatcaacagacgggtgacctccgtccgcccctggaaacacgccaatgtcagggctgtatttttattggtttcaatttgcgcattgatatccgatccattctcaagcagaagacgtgttgcctcttcatgtccattcatagcagccagcatcaacggagaaatgcccaacttggaattggtacgagaattaatttctgcgccattgcacaacaaaagctgaatgatgtccacgtaaccaccggaagcggccagtgaaaggggcgtatagtcactcaaattgcgatgttctttgtttgcgccacttttaagcaataattctgctacctaaaatttttaaattgttaatacaacatatgcgtccaagggtttggccaaggaagggggggggtgtaaagtaaatgttagtcgcttcaaattttattaaaattttaattttcaatcgacccatcggcactattggtcttccccattgccaattatcttaaaaaagcacaggaaaatttaaaaaaatctatttactatacactagttttacaggttcccatgtcagtgtcagtgaaaaaatagactcgttgtattcaattttatcctttaatatactctagaccaatcgtacgtcgtaattggcaatagttaggattccagtcctttattgataacataatacgtaaatctttccgtcccccagagcaggcgagagaaagcgctgtgtctttggtacggtcggcttgtgcgtctaattgtgctccagcctcaattagaagtttacagacttccgcgtggcctccggtagcagcgagaatcagcggggtgaagccttttttgtcgcggtgctcaatatgtgctccacgctttatcagcaagtcaactaatccggcatgaccaccaacgcaagcgagcgtgagagcagtgtcttaaaaaacaagcactttcaacaaatgatttaaagttttaataatacctttggcacgcgcggaaacccaacccaatttacacgttcatttgcataaaaa

SEQ ID NO: 3604 - DNA, 5263 bp, Heterodera glycines
tttggagctttttggctttggcatgccaaattcaacgtctttggccacacttggagaggcgattttgttaacctcaaaaaaacctttgattttaattataaatttgaatcatttatacatctgctccgtttttaatcagcagctcaacaactttagtacaattttgacgggcagcttccatcaatggcgtacgattgtccttcgagaagcagtccttaaaattgttaaatcaaaaaatgaaattccataacaaaaaattaggaaatataatttttaaaaaattacaatttgagcgccattttcaataagcaacttgcaaatcgaatcactatcaatgccagcagtgcacaaaagggattcgttgaggtctttctggacaacctgaaataattgatgaaataagaaattacacattaaaagagacttggagggggtaagctttgcgcaattgttggacgatgtactgagcaactttctcgtgcccctcttggcacgcttcataaagcggagtacgctctccgacggtcaaatctccacctcgcgaaacaagcagttcaacaacatctcttaacagtcaataataattaaaaagttcagttagttgtgagactaacttaaatcctccagaagcagcaagtgttagcggtgtctccaatccgtcttcatttttcgcgttcacatttgcaccttggtccaacagcatttccaccacatcgaaatggccttcgcgactcgcctccatcagtggggtgtatccctcatcgttcggttcttccaattcggcacctgcactcagcaataatttcaccttaatgtaaaattcgattggattgtatgttttacaatttgttaccatttcggtgtgtcctccgccagccgccagagtgagtggattttcaaaagattcgttggccaaattgacttttgcacccgcactcaaaagtaatttggccacttccacatgaccgtccattgatgcttctatcaacgcagtgtaaacttcctcctcttcaagcgcatctttggtgtccggcatcagtgagagaaggtatttggccgcatcgaaatgtcctttgaaggcggcgagagtaagtgccgattcctgggagaagaaaacgtaatttcgaatagtaagcacgagatgtagtacaccttgtactcaacactttcaaccacatttgtgacctttgcgccatgcttgactagcagcttcattatctccacattgccaatgcttgccgcttccatcagagcacagtgacccgattcattgcgaatatccaagtcacaacgcccagtcgctagcaactctttcacgcactgaacgaagcaaaggctactaagtaaagaactttgttgcaagtaataacttcgatatatccggatgcacaagcgtagattaaggcagtattatgtgtggaactcaacgcattaatgtcagtaccagcttggaggagcattcgaactacgtcagagtgcccgccacaacatgcctagcaaaatggaaatacaatggaacattccatggaagtgtgaataagtaagtacctccatcagcggagtgctgtcagcctgctggacaaattcaggagaattgcgcatgtacccgggttttaattggtcgcaaactaccctaatgaaaatattaaaaattgttgagaacatataagcggcactgagatcggggcacatatatagagtgtgggtcgacaaaaaatcagaataggggtcgaaaaactaaagttttttgttaaaaaaccaagagggaaccttttgatgtgcaaaaaggaaaatgtttttgagaaaacaaaaataaaaccaaaaaggggaaccttttaacttacaaaaaattttttttaagataacgaaaattctataggtatatttttaagtagagtccggtaaaaaaaaatttccgggagcgggagaggggatcgggagttcaaaattttccgggacgggagtcccgaacgggattcccgtaaaaatcccgctcccgttaaaatcccgtccatttttaacgggagtcccgggcgggagcgggagtaattcgaaaatttaattaaaaactcacaaaaatatttttaatgcacaaatttaaaggacaatcaatttattaaattaaaaatatttagaaaaatttataaaggagaaatttgaaataaaaaaatcttatttttgagtcaaaaatcagaaaaattttttcaaattgcttaaataaattattttttataattaattcgaacaaaacatttattaactttatatttttgactccctttattaattttacaaaattttttgcggtgtatttcttgaaaaaactttttggtgaccaaggaggaggagggaggccggcggtgccggtaggcgccgccgggaaaaaaattgaaaattttaatacaatacattgttagattctgttcaaaaatgaccaatttttgcaaattgagcaagttttttaataaaattaaggattttaaggatccggcggtgccgataggcgccgccgggaaattttttgaaattttggctatatatttaacagattttcaatgaaaaatcattatttttaccaaaaaaatcaattcttaccagtgcatttttactcccgtttttgggtaaaaatttccgggagcgggatcgggagttcaaaatcttccgggacgggagtcccgaacgggaatcccgtaaaaatcccgttcaccgaaaaaagcgggagtcgggagcgggactcccgtaaaatcccgccggactctttttttaaggttgctgttcattttggaaatattggatttaattatttttgcgcaatgttatgaagaaagaggctcaaaaatagcatttttatgtaaaatcttttgatttattgaaggtttttggtccatatacacagcgtccgggaaatgagctcctgtgccagaaaagatttgcatgtgtggctcagtggtttttgtaagatagtaaagggacaaagggtggtggttcgagtccgttgtgcaacatgaatattttcatttatttttgtcaaaatattaaaaaatcacgatatttgggaattatttttgaaggtttttgccaaccaaattggataagcttggtatctttcgaaagctcttgataatgagaagctttttctaagcaaatgctaagcgatttggtgtaccagagaaaagttatgaggctttaaaattttgtttttcttataacttttgaaatagagcattaacaaaaataaattcagcattaatcgatgcagaatttttttctctaacgatatgcaaaatttcctgtggatctaacatatagaaaagaagctaaacatagcgaagtaaatgttgtttttcctaataataaaaatattagatagtacgccaaaaggagacaaaaaattagagaaaaaaagataatgtttttctctggcactctctatttatggtacacatctcgttttttcggacggtgtgtggacaaataattcataatgccaaaattactcattggcctccctccccatttaattttcattcacttaacaattacctaattcttaattatctactaaagtagcagtggaagttaacaatcatttttaagatttttgttgaaaaaaaaatgcaattttattataaaaattttattacatttttttttattaaattgtaaaaaagttacttacaatttctggtcattttttggacaattctaaagtaaatcttcaaaaaattttcccggcggcgcctagcagctgcgctcgacctgcttgtatccaaagttttttgatatgtgaaagcaaaaaaaaaaaggtcgtcgcccggggttagggtaccccctcaccccgccgttaagccgaaatcgaagtttataaaattggtccaaggtgatgaaaaataaaaaaatatgaagattgtggtgcaattaaaaatttttgattgttactccatttcgatgactttcagcaattctccggtggcaattcatcgcatttccctcaagtcaatatttggcaacgaaattacgcattaataaacaaacggacggggcaatactcaatacgatgacgcccaacatcaattaatccccgtgggagacccttttccaacaaacgaaaagaagcaacgaattgttttacttaacatcccaatatcctcaaataatatttgttttgtccactccacaaaatgcatgcagaaactgtaacgacagcatttggcatttctaacggaggcaagttggtgaatgcttgtgattcgaatggtcaagctgctcttatcgaatcacgtggaatccttttcaattttccagtaaataattgtatatacctttaaaaggcaaaagccatagtgaacatattaaatcagcatcatttccagggttgccagattaaaattttaaaaagcctcattttgggtcaaaaagcctcatttttacaaaatgtattctaaacacgtttaaaatgttcaaatgttatatttttgattgtccatgatcaatttgagcatttttcgcaaggggagacggcggtgccgataccgccgggggaaaaattaagaattttgatcatattttttagcatattttcattaaaaaaattctttaaattgccaaacattatgccaatttatcaaaataaaatttctcaaaaagccacaaaaatcctcaattcctcattttccaaaaaaatcctcattgacctatcaaaaagccacaaaatgaggataaatcctcagatctggcaaccctgatcatttctaaagtgacgagagtggagttgagaggctcttaagaaaagtggactgactgtgcctcggtagccctttgtcacaggtcattgtagttggagacgtgggtccaacccctcccccaggcacacagtatttgccatttcctactttacgtatgttttgttgccgttttgtcaaggaattgacggtgattccgccaccaccctcaacaacaacacaacgacaacttccaattgttccgcgttgtctctcctctctcacttatgcaacacagattcgccaacaaccgctgctagattctcaatcaagaaaaagttgtccgagacgcttctgtttacgtcacggtcaccacgccacactctctcctcaagtgcgatcgatttggccgttccatcattactcagcaaatttacaaccaaaaggaacaacgaaaaatgctcaagtcaggaatctttgcggtgagttttcagattcctcaatagcgcgcgatttgaataaaaaatgcattgcaagtaaaa

SEQ ID NO: 3605 - DNA, 2697 bp, Heterodera glycines
  unsure (1)..(2697): unsure at all n locations
tgagaaattttgaaaattttgattttcggcttttgtttctattcgggtccggggttcgaaattaatcgaaatggatgtcatatttgtgatcaatgacccacgcaaaaaccccattaaaacatgttttcacgactttttagaaaaaaatatttcagggggggggtcactagctttactaaaagggtgatcgggcatcatctatttgtatatacatacatacatacataggtattacccaattcgttataaattttttgacttttttatgcaggataatgaaatgaataaggatcattcgataagacaacgccgtgggctaaaacaagcggattcatcagaatccaaattaccaccaaagcaaagttcaaaagctttgacaaagattattttggctgttatattctgcattgttggtgtgttcgcctttatctcttttcgctggaacaatactttcattcgtcgaaatgattctttacaaaaatcgaatcttccacttgcgtcaaatgatgatctttacaatcaggtagcaagacaaagtgacaacaaagtctgcccactaatttttaaatttcgactggaattttagctgattatttttgtttatgtatatttatttatagaccaactggagcacacacagaccgcaactttattttgggttaaagacgaaacatcctgaatccccattatttggttttatttggtatcagcagtcgaatgatacgtttattaaacaattttcaccaaggcattggtgcgaacatggtgaatatttttaataactatttaattcatctgacttttaggggataatgttaaattttcttggctcgcgcacgatggtcggacttttggccgccaagtgattgaagacaatgacttggcaatgcaagtggattggatggcaaatggcagaaagtcatggaaagtgcatctttcagcgaatagcacaaataattatgcactgctcttctatttggctttacaagacaaagcttcacattttgttttacaagaccagcagtaccgcaaatcgtcaaacaactttggctatggctttctcgacggatattctcatattcttggtcaattcgctatgaatatgaatatccaaggcgttttttcctccgaagctgtttcaaaaattgcttacaaaatgacaccgattttggatgtacgacacgtcgatgaattgattaaagtttcaattggacagactgaagggaagctcggactgcagttaacgcaaaacccagagatacctgacgaggaagcaaatttcgcagcgattcaatttgatttttcaagttggtggttttaaatattttgtaattagaataatttagagaatatccatattgaattagaaatgcttgctgaaggcgatgctaaaattgcgaatttcgatcatatttttactcgaaaattggaaacgtttagcaacaaatttgatgaaatattcccgattgatcaccaggtcgggtttcttttttcttttttacttctttttgacattattttaggaaggctctgattcatttaatcgcttgggaaaaattgcattgtccaatttactcggaggaattggagtttggcacggatattccttggtcaaaatcgacgaatccgaccatatcaactcatatggtcccctttctctcatttccgcagtgccttcaagaccatttttccctcgtggttttttatgggatgaaggtaaaacgcactcgtaacattcccaaaccaatttgttgttcttaggttttcataatttaatcattcgacattttgacccgcaacttacgcttcaggtttacttctatcgttttgcccttcccataaaaatgcgtctttttcagattttggcttcttggcttgattcgatgaattttgatggatggatgccaagggaaatggttctcgtccattattatctttcttgaaaaccaatgccattaactttgagattttgggttctgaggcacaagccaaagtgccttcggagtttcttgtccaaagtccgtcagtcgccaatccgccggtgtttttcttagtgctcgagaagtttctccgtgacagtgcggtgctttctttctcccgccgcctttcactttccttcactctttccgcaggtgttcaaccgctattccactcggattgctctgctttatccacgtatcaaacaattttacctttggctgcgagaaacacagaaagggcctaaacttggcacaatgcaatggcagggacggaatagaacaacgcaaatggaattgaacccgaaagttttacccagcggattggacgactttccccgtgcgacacatccatcggccgaggttagtcatgccaattattgcagaagtgagtggtttcaaagaactgttaggacgtcttcatctcctcattgttctttctgttattggcataggaatatcacttggatttgcgttgctggatggcattaagcagcaaggttcttcgtcagcttgctgaaacatttggcgactcggcttgggtgcccgtaatcgaagaggatgttcggttgtacaacaacataaattttttggacgagttacactggtcaaagtcggctcaacaatactccgactttggacttcatagtgaaaatgtgcagctttcccaggtattgtacgtcttgatttttaccaanttaaaaataacaaaagcaggaag

SEQ ID NO: 3606 - DNA, 7334 bp, Heterodera glycines
  unsure (1)..(7334): unsure at all n locations
tgagaaataatttttaaaaaantgttgccataatgtcacatacattttaaaatttcaattattctgccccaaatggtatgcaattgctcttagatgacgaaggtggtcttgtgctgctcgctgctcaaattcagcaaaaatctgacgcaaattgttgtcctgatcaacatagagggatttcgcctaatacctttccctctaatgccatttgctggcgcactggccaattcgcactcttatttgtgcatattttccatcgcatgtaacaaagaattaaaatatatattttaaataattatgaaataataatttaaatgcagaatttattttcaacataattctttaataatcatttccgaaataaaaaatattatttaatgaaaataatttacataatgacattttgccaacattttttaaaaattatttctcagtgacgaaatgatcggccaccgccaaaagacatagaggaggcgtaccaagcatacatatacaaggggtgtctcaggccaagggtcatatgacgaacgattgagacgggggaggggcgggtgtctcgggaccaaaatttcatagtccaaatttttctccatccagctcgactttttttcgcaccgcttttctttcttttttttgtggcgcctttttcaaaaaagttttggggaacggttggggcgaagggaggggggggggggaatttttaaagaattagtgtgtatgacacaaggggtttttgtgttcatttccatttacctgatttgttttgcttattgagcacagtaagacagtcgtcgtcagtgatttcgagctcattgtggcaaaatttgacatcccaacaattttgttggcgatttaactccgttaattgagtgacagaaacttaaaattagagcaagtttcagatgaaaagaaagctcgaatattatttttttgtagaattgagcgggaccgggaattttgacaaaaaccgggacctgaaaaacccgggaattttcccgacccgacccgctcaactctattattttgcattcgagaccatcagcagaaatgaccttctgctggagaacagagaccgagaagttaaaaatgaaatttaaaaaatgactaaaaaatgaatgatctaaaattagagattagtgggagagggaatcccgcgggacttcttagtgtaaatctttgccattaaataccgatgttgtctcccaagttccgcccttttctctcattctcctccttttgttgtttctgtcgcttctccaattcaatgatccgctccaagagttctttggattgattggcattagcttaattatgctttttaaactacaaaaattgttacaatttattttctttttcaccgtctttttccatttgctccttttccttctccattctgtaaattttgactttcaactcaatgttttcttcaatcagtctttgctgttttaattctgcttgaagtgccttctgtgaaaaattaaaatttacgaaatttatttttcaaagttttgtaattttattttattttttaaatatttatggtatttgatttttagctttttctggaatccctgcctcttcaagttccattttgatgaacgcgcacatttgtttggccaccctcaattccatttccagtttctctgacttcttccagaataaattaatttcgattatttccattttaaatatttttgtttttatttattttttaccaaaatcccatcatcatcatcatcgtcctgctgtttgctttggcctccttcctcaacttctcatctccaacgtgttcagcactttcctctttttgtccacagtcatccaaactgaacgcttcgccaatcactacgaaaatatttctcattaacttatacatttttgctcaattaattaattaatttttatttataaacaattttcatgaaattctcttcatttgcttgaacataattttcaaaattcaactaaatttcataaaaaatacatttttctaaaccctgctgctgatcagctgctgctggtgtaaagacgtcatttgtcgaaccattcgaaattgacatttgaattttattaatgatttttttataaaaataatatttcaatttgattgaaaatttgaagcaaattatttgataatgcaatttgtgtgcattataggtcattaaacgaaactaattatatcagaaatgaggaggaggctaaatgatgacctgcccccaataaaaggaaaagaacagacggaccaaaaaaaacgctgagatttatatattttagcttctgctcctttaaactttgtgctttcgaatgataccaaaaagataggatttgtattgtataaaaagcaggtattgtcaattgattggactcataaaatacctttggattcataaactcgataaaagtgccgaaaaacctttcatttaaaaatttctcacatttttttccttaaacgtcggttcattttgcggcaattaacagcacaattattgtcgtaagttgtgattgcgatgcgaaaaatgatgttaactaaactaaaaaaactttatttatgttgtgaaaaaataagcaaaaaggatcaaatatttattatctttccatttgatcgctacaaaatataatttttaataatgctcgcgagtttcggtctcaatctcgactcgataaaagtctcctatcagcgtgccggacctcaaaaatctttttttaacactcttaaagacaattatgatttcaaaaaattagagtgatgcgggacccgggacctggttgcggacaactgagtaccaaggtcccggttttgaccggggccgggactagtcccggttttttcccggtttttcaaaacagactttcaccaaaaaagggcaaacttgcgatttttaaccatttcatgaatttcgttgacaagtattcataaaaaatatctataattttgaaaaatttacaaaaccaagttcgtaaaaaatttaagaaatagaaaaacgaaattcatttcttgaaaaaatttactaattggaaaaaaatgaaatagaatttcgtaaaagttcaactaatgcaattcaataacgtaaggattttgagttttttgcaaaaaaattttgcttttttccaattttttcgatttttgccaaaaatttttattggcgaattgactgcacaaaatttaaaaatataatccatttcactttaaaaaagccaaaaaaaaatccctaatccgtatcaagaattgtacggatcaggatcgggattacggactaggcacccatacggattacggattaaaaatccgtagtccgtaaaaaatccgtattggccgaaaaaaatacggattacggactacggatccgtaaaaatccgtatacggatcccgtccgtatccgatctctaattaaaaccattttgaagaaaaaaacatgatacaactaaaatttatcatttttagcgaaaaatcaacccaaaaagcgaaattttgccttttttgcttatttttgacaagctaaaaacatatttttcgtgcatttcatgcctccctggagaatgtccatccacacatcgctacaaatccagctgaaattcgtaaaaaacagcatgggtaaatgaaaatgaaattcctcaccgtctgtgcatccaaaaagtctctttgacccctttatatattcagtagttcttaattgttgtgcataagaaagcattttggtaacctttcaaaaagacgaagaagaagcggatcaaagcaacaaaaatgtcgtctgctgattaagtgtacggaaatgaataattaaattgattaattgtatttgagaaatgaattttcgattgaaacgattatctagagaatttggaaatccattaagtagttaagggttcactcatccccccgcttagaaaaaaataattaaaaattcactagggtaataagaaaggttgcgatttttagtgacgaaaaatctcgagagtttttctaaattttctcgcatgagagtcaatttcaagtacgtacttgccattcaagtacatacgaatccgagctaacaaataagcaagcaacattcaaatcaaaggcaagctttcgtgcatttgaacgtgcatcgatcggtgagaattaccaaatccggaaaaacccgatcagagagtccgcctcagtttcctagcaattaacaatttttcaatcatcgatattagcagggaacggatttttaggttttcacctacttttttggggggataacatatgctgagataagcgcaaaaacacattttcttcgatcacttttcgatttagagcgacttttaaacaattattatgacttgtgaaatttttaaaaaacttttaaatatttctgcttttcaacagaaacattattatgaaaaagcaataaaaaaacaaaacaaaaaattggcgttactttttttcaaaaaatgcacccctcagaatcgatttttcaaaaagcaaagatcctggaccatgatttggcggacgatcaaacattttgacgcttgaatactacatatcttcaaatgtgtttaatttacattgtgcaaccgaagaggataaagatgaggaaattatgggaaattcacacattaaattcggatcagagagtccaactcaatttcatagcactttttgcatgtttttgatttttttctaccacaattttttggggtcggggtcactttggcgcgggacattttggcgccgcaaaataggtctaagtgttctctaatagcctgcaagatgctagaaaaatatattcgttttaacaaaagatatggcgtgctgcgccaaaatggccagaaaaagtcagttttttaggtttttggccaaacttttttgtatctcaactagattttttgaaattttgcaggctattagcgactatcaagcgcttaaaatcacatcaagattttttaatttgaatgataaataaaaatgttatagcgtttggcgccaaagtgggtactctttaagtttgggtccacatttttggtcaaattttttcaaaatttttttttaataagcacgtaaaaaaatgtgatgaatttatgtctgtttcaaaattgtttttgtgttctttttgctctctcatttttcccaactctctctttttaagttacataacaacagagttttgccttgccttttttgacacaccaatcaattggaaaaagggaaaattgagccacaaaaatgaatcgacggtaaggaattttttttaaattacaaaattttcatttacccatacatttttttacgaatctcagttggatttgtggtgacgtgtggatggacattcttccatcttttgaccgtcctcaacttggccttcagaattgaaaagggcgaaggaccaaaagcgaaactgtctgttctgatcgatgacaaatgcgtggcatttccatttcccgaccatccgttgcccaacaaaatccgttttaaggaccttcagatttagtaaatcaaaaaatatacagaaaaccaatcttcattttttcactttatcagctacattgaccattctgtgctcgcatttctccgttccaacaagcaaatttgggacagaagtggcaccaaattggaagtgtttgtgccgttatatatgaccgacgtcaagctcatttgggatgtttttacccgcgaaatttggcctatttttgcgaaaagcattcgccatttttgcattcgtaatgccaatcatctggacaatttgcgtcgtctcatttcaccgacacttctcactgatcttgttcaattgtattcaatcacttcctatggactgtgccccgatggaatttctgacgatgggccaaatgcaactgccggccaagcgttgtccaaatggttgcacacgccgagcaaaaatggaaaagcgaatgaattgtattgctgtgcttatttttgtgaaataacatggatcaacactttcaaggaggtgatcgagctacttaattgttcattaaacgattgactaattattgattgattgcatttgattcgtgaccggaaaatcggtcagtggaaaatgcgtcagtgatacaaatattttaaaataaatttctatggcattagtattgtaatataggactaaacttctataagaaaatcgttctcaatttccaaccccggacccgaactcgaacaaaaaatcgaaaagtcaaaatttcgaaattagattttttcttaaaaatcggtttaatacacggaaacaaactataagccatcaatactgcaataagagatcatttatgctgtttttgaaccaaaaatgctaaattagaaaattttgtactttcgagttttttgttcgagtccgggttcgagattcggaaataggccggaatggataccggattcgtggtcagtgacctcgaaaacgcaaggaacttgtttttaagacaataaaatttcgctgacgcattttctgctgacgctttttccactgacgcattttccgggcgccatttgatttacgctcccttttttgtttagacatttctccgtgccaccacttctgtcgcttacaatgttcggcttgaacttctaatggctagcgaaatgaatacagttgaacaatttgagttggtgaacgaaatgacccaagaaaagttgacactgacgaaggacgaagagatttggctgttgaaacggtgtccaattgttggggagacggcggcggttcaatgggaaaaagacgaaaatttggaccatgtgtgcggactctacttcaatcttcatggaaattgtattgggtgagtggaaaggaggcttatttttggatagagcacggacagaaggatacagtagtgtcctttgtacagttttcccagaatcttggcagggccaggggttcctattaaacaggccttgagtccttgtccctcccgttctcgtccatctcgaaaaccctggtcctcttgtccgaatttttttcaaaattccgggctctacttttagctgttctcatccgattcaaattgcgcttaatttaggccgctgtctccgccagatcaaagcgatgaaaaagtgttctcttttcccggacccagtgatcagcggaagaagaaaaagtgatcatttgagaaatgaccgatcattttcgagttgtgatgtattggattgattgatcatattttgtttggcacatttaatgctgatttgtgatttgagtttggtacaacaacaacaaaaaatttgatcaaattgaagattctctggactccgatttcacatatccattttcatggcataaattaaccattgaacaatccgcgcaacgccattccccattacttaatgtgtacgcataaattaacaaattattgccattattttt

SEQ ID NO: 3607 - DNA, 968 bp, Heterodera glycines
cagacgcatggagaagctgggcgagggaagttacgcggtagggaatggcaaaagggggaaaaaggaggatggcaccatcccaattttggaccgtatggaagagcgaaaaccgactggacgggtccatcgtggcgctgaaggagattcggcttcaagagcaggagggattgccattcaccgccattagagaaggtggaggggggagagggcacaaagccaagaaaaaaattaagggataagctacagatttattaatattgacataagaaattggcatgccaacattagaattaccctcgaagagatttgcactgccaaattcatttgttaattacccccatccttctaattggtttttggacttcactgtggggggggggatggcacttgtcactttttcaattccatttctcatttcaatggcacagtttcgctgctgcgtgcccttcgccatgccaacatcgtccgtctccaccaaatcatcatccaccagccccattcccttgtgctcgtgttcgaattcatggtctgtctcactgcgtttgccaattcctggctttgttcagaacaccgacttggccaagcacatggagcagttcccccacggattggactctttccgcacaaagcttttcctcttccaacttctccgcgggttggccttctgccatgagcaaaaaattttacatcggtaatgataaaatgaaaagtgtccctcttcaattgtttgtcatcgattgcttttcattggagggatttgaagccgcagaatttgctggtgaatacgaacggggaactgaagttggccgactttgggttggcacgggccaagtcggtgccgagtcgcacattctcccacgacgtggtcactctttggtatcgcccttcggatgttctgctcggctccaccgtttactccactccattggatatgtggtagatttgttgggcattccttacacattttt

SEQ ID NO: 3608 - DNA, 2251 bp, Heterodera glycines
cacatctttttcggcttcttccccacaatttccccggtgggtccaaaatttcgatctctaatctcgggaaaattcctctttcatcgtgacccgccgaccaactcccgttttctcaggggagttcggctcgcattttcgctcgaaatcgtgcgtcggttccgcgctcgtttccgggcgcaagcgatgcccttcgaccaactcgtgaacgaatttcacggcaaaactcacagaataccttttgttttttaagggaccggattttctctgtccgtggcactccctcggcaaatcattggccggaggcaaatttcacccaccaattatcaatgcttgtgaaataatttggactatttcaggctcttcttttaccaaagtgggagcagtttcaactggaggattatccagagatggattgggtggacgtggatgccaagctgatgttcaagttggatgagcaggggcgccatttgctcacccaactcctcacggtgagatgaccaaaaaagtggcattggcactgattgacttttggtttcagttggacccgcggaaacgcatctcagctgcaggtgccatgctgcacaaatatttcaacgaaatgccaaaaactttgcacgcactttcgcccacaggtaacagaagaagaaaacatttctcaaaaaaaaatttttctgccatttttagaatcaatttttgccgcatttgatggaattattcagcaacaaaaactttcaattgcatcagagacgacaaatgacagtgacgaaagaagaacgtgttatgtttgagaagaaaggagggggcttgtttattttcggtggaattgtgttaaatgaaagagcgatgttgtataaattacatcattatcatatcaatgcggcgcttatccacacactacaaacaaaaatttgaatggtcatttgggatgaaagacataacttctctaaaatgtttaatcgttctccggttccttcagtgtaatgtcaacttcactgtgcaaaaaaaaaccgtactatctcgtcgtttctcttttaaatattgttttgttatcagtagggctgtatttcgagatttttgtgcatatttgcatattttggctttttctgcacatatttcgtgcatattttgccattttttgtgcatattttccgactttttgcatattttgccatttttcttcaaatattttccgattttttgcatattttgccatttttcttcaaatattttccgactttttgcatattttgccatttttcttcaaatattttccgattttttgcatattttgccatttttcttcaaatattttccgattttttgcatattttgccatttttcttcaaatattttccgactttttgcatattttgccatttttcttcaaatattttccgattttttgcatattttgccatttttcttcaaatattttccgactttttgcatattttgccatttttcgtaaaatattttccgttttgaatatcccttaagtaaatttcggcagacaataggatgagctttagtgctgaaaatcttgagaaatttttgattttcaattgcaaaaaaaaccgataaaatttatgaggaataaaaattttttattgaatttgcacccctaattttcaagtttttttgtgcatatttggtgcatattttgcgatttttgtgcatatttcacgactttatttgcatatttatgcgcatattttggccacttttcgtgcatatttttggcagccctagttatcagtgtattttttgaattaacgccaataagcaaagttggcattatgtttaactagggcaaaattttgtgaacaaaattttcgccttttcagcacacggcgagtcaattttgggctccacgtacaaataagtttattatttatttagtaatcagaacgccaaaactttgcaaaacttgaatttttttggggattttcccttgtaaaaatggaagagccgatctcgagatagaaaagaaactttcagaaaacaaaagagaattcgatagagggggacaaaatatgggcctatacaaaatttcaaaaaaagttacccacaggaaaaaattttttcccatggcaaacatttcaatactttaactcttttttagccaagtgcgctatttaaagccaaatcaaataaaacttacaatattctcccttatttttctctttaaaatgaatataaaattattatatttggcctattatagcccgagtaataaagctggaaaatttca

SEQ ID NO: 3609 - DNA, 654 bp, Heterodera glycines
ttgaatatgattttttttgacacagaaattttataaataaaaaatatttctgccttcttcttaaaaagaagaaattgaaatgaacacacaacataaggaggacttgaacctgagaccccccttttggtgactaactcacagaccactaagacgaaaaaaccaacttaattgtacttggagcccaaaattgactcgccgtgagcaacacggtttcagcaaatattgtataatgagaatggcatatcccggcgcagaaggactgtgcagccctgaaattgaaatttctgaaggcggcacaatgctcgatggcaaagggaaattcaacgatttaaaagcgatgttggacagcaacagggaaaacatcaaaatggatgcaatgcgcaggataataaatgcgagtatttagtaatcggatcacctttacccgaaacaattttaaatctcattttttgttcattttttagatggttgctcgtggaagggatgtttctgaactttttgctgctgttgtgaaaaatgttgctgtaaaaaacttggaggtctaacacttaattagcttggattaatcaattaaaagagcaaatttttagctcaaaaagttggtttacgtatatttggttcgttatgcggaggagcagcaggacttggcacttt

SEQ ID NO: 3610 - DNA, 5742 bp, Heterodera glycines
tttctccggttgttatgttggccattcgcgaagcaattctctacatgagtccgtacgtgcgcaaagttgcggcacatgccatccccaaactgtttgctttggactacgaattacaaccccaactcattgagtgcattgacaaccttctcggtttttcattcaatacattcttatcagtaattaatatttctttttttattttatgtgacaaaaggacgttggtgttgggttcagcagtttatgcattcgaagagacttgtcccgaccggttggatttgctccaccgtcactttcgactcttttgccgagcattggctgaccttgacgaatggtcttttgtcgcgataatataaagcgctcattagctaatggccattcctttaggggtcaggtggtgatgattggattgctcactcgctacgcccgcactcagttcacttcaccgtttaagaactcagaaacaaacaacgaacagaaggaactgtacagcagcggggaagagagcgaagagaaagacggcggaagacaggtaattaaatatgagcaaattaatggtctaatacgttttccattaacgagaaaaggtggggggtgtagaaaaatatacttaaaacgaacctagattttttaaagaaaacaaaggatattgtttaagttccaaaatgagcaaatgcatttggaccccgactacaatttgctaattgcctccgttcgtccgttgcttcaaagtcgcaatccggcagtggtcatggtgaagctgattagttcatttgagtttctttattgcttcctttcccattaggctgttgcccagcttttctttcacattgctccccatgcccaactcgtcgccgttccgcgtgcgttggttcgcctcctccgcggccctaccgaagttcagtacgtcgttctcgtgaacatcgcgacaatttgcgcaacgcgtcaagcggaagagctttttgcgattaataaggtgagttttttaatttaaaatgtattcaaaaatctttttcttttagaaccttttccagccctttttgaagagttttttcgttcgtaattccgacacaattcatgtgaagagaatgaagctgtacgttctgtccagtttagtgaccgaagcgaatgttcagttggtcgttcgggaattgcaggcatttcatttagtgccacaaatgcttggccaactcctcttaattgttaggcctatctccaaatgacagacattgccgagacggccatcgacacaattggacgttgtgctttggcagttccctccgcttctgaaacatgtttgagttgtctgattcggcttatttcaacgagtggcaacgatcaaattgtaatttttatttatttttaaaataccctgtccattattttttataattgttacaacataaggtttgtgcttccgtcgttgtccttaaacggcttcttcacgctgatgccccaatgggactgttgaagaaaatgttccatttgattaataccgtcaaagtaagaatcagctgaatttgcatgccatttttacctaaaaattcatggaaattcatttgatacaatatttaggctccaatggctcgttcatgcattctctggttggtcggcacacacattgacaaagtgccgaaattggcacccgatttattgcgaattgttgcgaaaaccttttgcgaagaagctgattttgtcaaggtgatttaaaatagtattgttagtaactttatttcaacttcgttcccaatttagctccaggcattgaatttggctgtccgaatttgggcgattgattccgaaaaccgcgaaggaaaatgtgctctgctcatcaaatatgtgttccaactcgcccgctacgaccgttcttatgacatccgagacagatgccgttttctgcgcaattttttgtttgacaaagaccaaaattcagtgagtttttaaatttctcatataaatgttaaattaaaatattttatttattttcagttaaaatttcctttggacattttcctgcaagaacgtcctgcgcctgctgtgaataattctttcactgatcgggctgagcatttccaattgggcactctttctcacctgctcaaccaggcgaaaattatgattattagcttacactgatagaatccattcatttatttggtttattaattagttttttttcaacctttagaaatgcaatggttacactgaacttcctgactttccgtcggaacagcccgacccaaccattcgacgttcggcataccctttgccaagcgacggtatcgtacaaggaacggaaattgcaatggacgaagcggaggaggaggaggaggaagactcattggatgaagaggaaagtgaagaggacgaggaagacgaagatgaggaagaagacgaggaggaggaagaagaggaggaggagagcgagggagaaaaagtaccggatggtgggtttttgaattttaaaaataaaaaaagaaatgggcaaagaaaaactttttccgtaacaatcccatgtcactcattcacaaccaatcagtaataatcatttctacgtgaattgttgtaataatattcctgtctgccgtcgtcttcgaccgttggctgtttcattgctgcagggtgcggaaaattgtgcacgtttctgaaacaaagggacaaataattcattttggaattcattgagactgacctggcattgtagaaaacgatgtctccgtcagtttgtaccggatttcggaatgatcgtcggatcaccctaagggcgtagaacaccaccaaagcggagcagcagaggacgattaccaggaaggaaacgaccaaaatccacctgattaattgttgaggcattggacaactttttctatctatcgttgttttaattcttctctctctgaatgcttttacatcatcggaacgagaacagacgtgagcagtcgcgtgtcgaagggcaaacacgcgtaatgcgcattggccgagtcgccacaattgtccacgtaaacgcactgcgaagatgcggagcatgaacgagcacctccaaaagaaacgcaattcaaaaaaacaaaacaaaaatttgacggcttacaatagtcggcactttcgtaacaggacaacttgtcagaatagacaatgtttcccattttgatgactaataaacaaaggaaaatgtccgaaaatgggttaaaatttaagtgatttcattttcgccacgcctcgaacgcccgaaccggttctgtcttcgcacatacagttcaaaaaagggaaaaaattaaacttttgaaaaggtgatagtaaacaattcggcgagaaagaatgcacatatcaaattgattttatgaattcaagtcgaattaacgctttttttaaaaattaaaaaaagccatgaacagtctttttgactttggcggcaagttcaaaataaatttccattcatttttgaaggagggggagggattgggggacagtcgaaaaaactaatatatctcaagaaaaaattacatcaaatatatttgaaacagaaaaattaatgaatgttttgattgatacatcaacagcaacagattggaatgttagaatggttgcacttttggtttgattaattggcttaattcgtcacatgtattcgtaacttcaaacaattgaaaagggaactgacaaatgaggaaatgaaatggaaacatttgtcgcaatatttaccaacatcgaaaacatcaaataaaatttaacaacaaattacattttttaagtcataataagtccattaagatgaagatgcaaagttgaaaagtcgtcagtttgacattgaagcgatttcaacaaattcgacgacgactcgcgaagatgccatttccgaagaacaaaaagccgaatcgcagcccctagtggctaagaacgcttcgaaaaacgatggacagaaagaattacggtccgagcatttgcttctcttggacatcgattttgcacaaacaacggcacaaagtccgaatgaggagggcgaggacaaaatgaaggactaaaagcacaaaagcaaatgcttaccaacaaaaatatagaatttttaacttccagttttccattgctaatgtgatcttacaaattattgcagttaaatcatttgtgttttttctcttctgtaaaaatatttaccatattttttcgattaccatactccgttcgattagaagagaacttgttcaatgcaattttattttaaaaatgacattatatcgggaatatatttttaaactttttggtttcatagctagcgtacagtcaacagaacagcagcagtgtcacactgcataagaccttcgaaaaaacactcattgtcaggtgggtacattttaatgtcactacaaaaaaaggaaggattggaaaaacataagatcggatattaatgcgcaattgtatttttgtgtttggcatcgcaaaaacggcacagtcaaagctggccattgcaattttcctcaaaaatttggcagcaaagcgtaggcacatgtgggacagaagcgagcaatttgcatgcctaaattccatttatggaatccattttcatggcataattgaaaaattggttatcaaaaaagttaattattgcgaatgtttgacaatgtccgtgaagttcgcttttgctacctttccgagttgttgctccatacgttcgtcgtgtttgtcagcccattcgcgtactctgcccaaataattgtccatgtaactcttgcaaatgggcaagtcgggcctcaatgtttcacatttgccttgggaaattgggagaggattgttcactgatttcaatttgcttctcactctttgccactggcaatttgatggtctgtgccttctcccctttttccctttctttgtttgctggcggaacaataattgtttcgttttgctgtccttccattattaatccgtcagttgtcccactttcagttgtatttgctgcaaatgttgttggtgaggtcggaattcgggttgttgcctgaacatgccgtttaattttaaaattatttgacatttccataaaccgttgtctcttcagcaacatttaatgagccgtgttcatttgcaattgttgtgttgctaaagtgttattttgttattaaaattcaataattaacctttattctttactttttctgctgctcatcaattggcacattcaaagatgaattgtgaattggtgtcgtttctgtttctgttgtcgcttccgtcctttctgtgtttgctttttctgctgttgttgtatcgtttccaatggtttttggttgtttttcgtttactgtacttggtgaagatgtcccattggatgtttggtcatccaatgattgttccgttgtctttgatgtcgccgtggtgctagcttcggttacagtaggcgctgttggaatttctacaacgaattttcacatactttttttatttcattccgtttagacaaccttcttcaacttcaattgtcgtttcagttgaattttgtgttgtgtttccacttgcgatgtcttcaatttgtgtggttctatttttctctgtttcattttttattgtaaaatcagttgtattcatttcgctcgatatgctttcaaacgcgtgagttgtgctgttattttgcaaatcggcactttttgtgggtgaaatggcttttgttcttctatttctgactgtccatctgagggtggaattgaaagtggcgaatttgttgtgctgttgttgtcgccagtaatggaaatattgctcattgga

SEQ ID NO: 3611 - DNA, 1457 bp, Heterodera glycines
gagggggatccatgcccattttgttggggattttaaatgtctgtcaaaaataatttattttattaattaatcattattattttactcactctgcatccagtaagcaaccttcgttcattctcccccttcaattgacgtgcaaattcgacaattatttctccattctgtcgttttttcattgtgatttctctcactctatttgctgtgttgtcagaattcagttcaaaaagtccttctgtgcctttggcttttgctctgatcactttcatttctccatctttttgctttgaaattgcaactccaatgaattcggtgtgttcctgcgcagtaatattaatgattaattgggactttaaaccctaatttcacttacttccgcttcaaatgctattcctgttgttagaattccttcactgctcaagtttcttggtggcattgttttcagaacgaacactatgctttgtgtttgaggctcgaatgcccatttaattgagtagtcggcccaatggaacccacatttcgtggacaaataggccgatttgactgttttaagtaaaataacagcaatcaacgtgatgtttagaaatttgcacattttgctgtgcttaaatttttatttgaaaaatagggaaaacccataattttaggaacaattattcaaaagaatttggaccaaccattaccgcctttgacgaaagtaaattaataaatcctaattcttacaaatagcatagccgcagaaaatattttagcaaaaataatgaacatatagaaaaactaaatagtcgagaacaagaagattgttaggttcgtttacccttcattgttttgtttagctattaacatttgattatcccgtcagctgatcaagtctgcttccatcatcgggagcttttttgattaattttagttgacacagaaacacaaaggcgccgtttccatcctataattcgttgttcgtccgatgatgatcactcccttccccccccccctccgtattcattccttttttgagtgtacataactaacagttttattgtgaaagacgagaggagcctttcttttgtaaaaaaagatgtgagcaccaataaaaattgatgcttccaaaagcaaagtcataaagggaagatttttggaaccaattcaaaatattttctgaaagatattactgatggaaaataaatgttgatcattaaaggtttcaatcgtactgtgaatcggataattttattattatgtatggttttatttggagatattaaatttgagtcttcaaaaatcttttatccgttcctcatacaatgaaaaaaacggatgggtcattagagaaaaatctcctaattgttgaagtgctttttttgtctgaagtgaggacgatagaaatttgtgaatgtatatgacagagcttactctcttcccccattcaccgccatttgttttcatgctaattatgttat

SEQ ID NO: 3612 - DNA, 7111 bp, Heterodera glycines
ctaagcctattttggtcatttttatggcatttttgtgcctatttcactttttacaaagaatttttttccaaaaataaccatttaaaaaaaatttatttacatattttagtacataatatatatttgggggtttttgtacatatttcaaacatattttagcattttttatacatattttatttacataattcgtaaattttcttacataaaattagcgtgatgagacatttgcgccgcgaaatttgcgccgctcagcaaagtcgacacttgcgccgcgccatttgcgccgcagacagttgcgccgcggatatttgcgccgctccatttgcgccgcgacatttgcgccgcccagcaaaaatggacttttgcgccgcgctgtcaaaaatattatattcataaaaattccactattatcaataagttttactaaaactataagccatcgacaaaaataactaattgaaaattcgaaaaaattactagtcacaaagattgacattcaattttttaaccattaaaatcttaacattgaataggttcatcaaagatatgaaaaaatgattaagaatacaaactaacaaaaaactgaaaaaaagaattttctgtagaaaccccaattatttttttgcttcgaaaaaagaatgaaattcaattcctttgtaattaattttctcaataagttattttcatcgattttaatttaatttcattgaaaaaacgcactgattttcaaattttcgctcctattttaccatttttcgcattatttcgcaatttttatgcccttatttatttacctatttttttcgcttaaaatccgccgcttaatgatcaggcaatacgaaggcttgttatcgcatatggtcccaatgaaaaccaaaatgatcaagatttgatcaatcattacgtgcacttcaatatggaattgacatgaaaggcttcgaaaaaggaattaataatgaatatctatcaattcttattctataaagcacataaatttattttaatcagagcgcaaatgtcttttttcgctgtacggcgcaaatgtcgtttttgttaggcggcgcaagtgtcgcggcgcaaatggcacggcgcaaatgtccgcggcgcaagagtcggctaaccgtttttatgtgtcaataaaatttttacacgtcccaaaaaaaaattagatattccataaaatttttacgggtccaatgattttacgcatccataaatttttacatttcacataaaatttacgtcccattttttacacgtcacataaatttttacgcgtccacagtagtttttaatgtcctagtttttatgtgtcaataaaatttttacacgtccttaaaaaaattagttattccattcaatttttacgggtccaatgattttacacgtcacataaatttttacgcgtctgaaatatatgaacgagcggggaagcctttgagggaaaaactatggggtgggccggctttgaaccggcgtctctggctttccggaccagtgttctaccagctgaactaccgaccctgccctccagctccccactttgctcgatcatataggatcaattgttgcctcaattgatccattaatcttcctctcggggaagcttcttcttctctatctcacgtccataaatttttacacgtcccctataaaaattttactgccgcaagttttttcgcgtccataaatttttcatgtctcaaaaaaatttagatgttccataaaatttttgtgcatcctataaaatttacgtgtccaaagattttcacaataaatttttactcttcacacgtttttacgcgtccataaaaatcgggctataaaattttcaaggtttttacgtcccgcggtgttacgattccataaaatttttaacgtatcataatttacgcatctcattgtttttacgtgttctacaaattttatacgtccctttaaagtttttactcgccgtttttacgagtctataaatttttcacgtcccaaaaaagtttagatgtaccattttatacgtccggtaaaattttacgcgtcccatttttttttacatattcatacacgtcataaaaaaattttaagcaccctacgctttttacatgtcccataatttttacgcgtccaaccgtttttacgtgtcttaaaatttcacacgtagtataaataccgtgtcccatagtttttatgcgtccaccttacgtgtcccatcgtatttacacgttttaacaaaaaattcttttaaaaatagataaatgaattttgttggttcatttcaatttgtaaattcaattatgaaatattataaattaataataaataaattcccaccaattatgtcatccaatgtcacggacactgacagtttcccattttgcctgcttgccaaacttccggttggacttggcgtatgcgaagttggaaatggagaggacagcagtggcagagaaaatgcgtcattagccgttggcttactgtattattattattattgggaaaattagtgtttttcaggggattaataaatgatttaaaccactgacttggcatcctgtaacggtgactctggaggcaacgtcaaatttggggccgtgttttgttcttgaataaaattaaaacatgagaataaattaattatcttatttgtaagtgctcccaagtgtacgtgactgactgattttttcagatttgtgcggatttttgagggttgggagaattttttttttttttgaaaaactattaacacacatatttttagaacaaataaatcaaattaaaaattttaaaaaaaaaattcatgtggcaactttcggaatcattagattcaaaattcatattattattattttaaatatgattcaagactgcaaaatttagtcatttttgattgtaaaatctgttaattataataaaaaaaaaatcccctcctgccattataggaaaatgattgagttttgagttgaaatgcgtcagtgcatcagaattttttgaaaacgacacaagttgatatggtagttgaaattttaggcttgaattggaaatgggaacaaaaagttacaataaacaaagcacagtaggcctttttcataatcttttataacttttcaattttctatgaaaatttttaaaataatcaaatacagtagacctttttgcattggtttttgtaacttttcaaattttctataaaatttacaagcatttgaaaaaatgaattgaaaaattcggaatgagcttcttatacaattttcaccttttctaccattattaatgctacacaactttatttttgaaatactgtaacgcattttccaatgacacattttgcgggagtttcgcctgctccctccttggtacttccgtgttttgcttccccccccccccgaaaaattttaaaattcatattttggggttttcaaaatcactgatcatgaatatggtgtttgtttggacatttgatgacaccatattcgtgatcagtgactttgaccccaaaaaattatgaatttttaaaatttttcgggagggggggggggggggggtggggtaagccaaaaattcgaaataccccctccttttcgaaaaaattttttagaaaaaaatcgagccacaagtgtaaaaatttaaaaagttcattttttgaactttgggttccatcgacaatggtatcagtcttaaatttcgaatttttagggttcgtgcccggttttcagaggtaaaagagaagaaaactggtgataaacattaaataaattgattttttcctttaaaaatttagtaaaaaatttcttttatcaatttttgagttttggccatggctcttccttcccttggccacaatggacatttgaccacccaccattttcattgttcggcaaggcggctttttcgagcttgtccacatgggcacgcacaaaattattgtctgaaatgttcagctttcggcggtggaacttcccacaatcgtagtcacaccaatcgccacgaatgcaatagatttggagctgcgaaaacatggaatttttaaaaaaattttaatttatcattttcttaaattattatggaattttcgaaaattcttgggttattaaaaatttaaaaattcaaaaatccttgttttaagcattagattacatggttgaattgcagaagttgtcgatacatttttctgaggcaaaaatttaatgtgaatacaaataataattttcccctaaattcaaatacataaaaattcaataggtaaatttattaataaatattattttttaataatttaaactattttaaatataaatatataaataattatgcgtgtgatgccaaaaattccccattttaaatatatgtttttatggaattttaatgggcagacggcactaatgcatcctttcattaagctatatatgtaagattggacttaacgcggttgcgtcacagaagagagattttaagagttgaaaatgaaaagggatttggaaaaattttatagtatttgctgttggtgacatagagagaggggaagggactcaagggactcacaaaagccattagctgtaattaatccatgttactataacattaatttttgaatatttcgtcgccatttttgttatcgtgttgtgtactttaaaatatgtttttgaaataaaaatattatttaatttattatagagatagtttcatgcattttaaatactgcgaaaaaaattatattttcgaatattggaaaataagcaaaaagtataattgaaaataattaatataaaccctaactaaaaatgccaaaaatatatttgagacagtttcatgcattttaatctcgagtttttggaatttttctgcgaaaaaaaaaatttatgtttgagtttttcttggaaaacaataaaaaaaagttccaaaaataaaaaataaataaataaaaccctaaacataaaatgccaaaaaggtaattcaaattattcaacatttttggcatatcattaaaattatttacatataaaaatttaaaaaatgcaacaacataaatgaacttttaaattgtttttcatattaaaattagaacggaatgaaaaaaatgacggaaaattggcgcctaattaacgccgcaccgcgttcacggacaataaaatattcgttctcctcctcagtgcgcatgagaagctgacgacgtatgtacgtcttcccctcccctccccctccataaatccttccctaattatttatagagcatcggcagggatggcattaatgccattcttatgtattattattcattcatgtcagcaacagttgagccattttgaatgtgatgccaaacgacgatggcacaaattgtggtgcgcgagcggacaggacgggcatcacacgaaaattgatgaatggaatggcaaaagatgaatgaaatgagagaagatggtgtgacggcacttttagtcatgtaaatatgctgaaattggaaattgttgtttttaggatgaaactaaattgtaaatatttggaaaacggcacattttgtcgcgtaaatatgccgaaattggaaattgttatttttaggatgaatcaattgtaaatatttggaaaacggcacattttgtcgcgtaaatatgccgaaattggagtttgttgtttttaggataaagttagtttgtaaatatttggcaaaagagacactttactgtattgaaataattattctctagctaattaatttgtaaattttttgaataatttttatgaaaaacaaaattatttatataattattaatttaattaaataataacggatattttaattgaataaattacataatgattcatcataaatatttttctgattctatcgcattgcccatttattctgtcacaccaattcgactaaatgttttctccttttttgtttgaataattatttttgttttttttcgacggatcattccatcggttttatattttatattatggttgaccaaatcgtttagggaagggttgaatagaaaaaaagcagatgtactttatcttcattatcccgatttggttataattatctattttttggaaaaaagattaatacgaaagcggacgaccgacttttattcaggcaccatttcaaagtttttgggctgggacaccagcgccgaccttgtcccccaaattccggcaaaatttgtccaattttggcgatttcccggcctcgaaaatctataaattatgatgatgatatgagtaattagcgtttcattgtttttcagcccaatgcacaactcttttttgtcattttgcgttcttttgtcgctttttcattataattttgctggtgccagtcaatgtccgacaaaaccgtaagtgatgattattacgctcgagatcagatttttcaagttttaattttaaatccaatgacgagaaatgaatttttgtctcgaattctctggtctcgagcatagaaaaaaaatttcaaaaatataagcaacaaatttgagaattttgttgaccggcacaatcaaagtgccaaaaaatgttgtcgattttaattcgtcggcacaatgcttgccatcatgcaaccaaacgggtcaagaagggaacaaaacttttgggcttactttccggcttcccattgatgttggacaatgtgacgaagggtaaaaaaattattaattaaaattaaaataatcatgaaaaatacaataaaaaaatttaattatcctatttttaaataatttgccggatttatgcttttttaaagcctgcttatctgctatccggggacattagaacgtgttagcggtggtggtggcggaggttggcaaaatatggcggctgccataaaaaaacaatacaaaatcagcgactacaaaaatgtatgaaaataatttttaattaatttttaattattcaattaaaataattataattaaattcaatttcagaatacaaatattccaaatgaaaagtgcaggcaaaattgggaaaaagatggcaagaaagatggaccaatttggcatggtgtttatgtgtacacagaacggaacaatgaagttcggcacataatgttggagttatcattttcaagcgaaaagtaggttaacaaaattgtgaaaaattaattttgagt

SEQ ID NO: 3613 - DNA, 1612 bp, Heterodera glycines
  unsure (1)..(1612): unsure at all n locations
cgaaaaattttatttttgccaaactttattttttgatttaaattcttggatgagaataagtgatttgctgatcaaatatgatcagttggactataaaaataaaattttatattatataatcgtataatggacttatttaaaaaataaactttcaaggacgtacttggtaaatcaatttttaatttgaaatgattaggctagactcgaaataaggacagccttttaaataaggacaatgacgcgccatttaaaaaattcaaggtacaactttggcccaaaccgtcgacaaatttcgattccattttttggcaatcaaagtgaactcgttggctacggtaatgttgaagaaaactgtacaaaatttttttggccatttttaaccataattccaattgtcaggaggagatgctttcaaagaatttgacgatgcttctcttggcacaagcttcatccaaaatatacaggaaggtgcatttttgaaggattttgtcggactttggacgcttggccatgacatgatggcaccaccatcggcagcaggcacccagcaaagtgttgtgctgtacttttaccgtagttgcagctgttccatggaggcctgggtgagtgtaaaatttgatagaaattttatggaaaaaatttaaaaataatgttatttttcgacttgggtggggtggggttacaaaaatcagttttttttttaacttggtttaatactttttacacacattttttatatgtctttttgggattttttatttaatctttttttttgataacttgaaataaaacatggtcactccaaaatcacaaattttaaaattttttatgcctaatctgcaaaaagccaggtccatgaaaaatccagcaggcctggatcccagatccagattatctctaattaatcctttttgtttgattaacttcaatccgttaattcatttatgaacgcacaaaattaagtttactcggccaacggacacagaaatgccggccaaccgagaagcaatttctgttgggactgctgattgtgccaaaacagtggacacaatgatcccatttgactataatgaaaagagcgaatttgccttcaccatcaatggcataactgatgaaaatgcggtcaacatcagtgtccaactgttgcaggaggctcgagctggtcattcattagtccttgaatttcaaaattcttattttatgaaaaatatataaatttcaataaaaacaaatcggacttggaatttcaggtaaagatgaaacactcttagccgtcattagcatgggaacatatcaagcaaaaaaaatttcaattgaagtaaattaaggggggccgaaaagacaaaaattatttttataataaataattaaaaatcggcgctaaaaattttttaatgatagagatgtaaaatacgtataagaaaaatcataaaaaaaataagaatataaagtctcaaaatatgtaccaaaattattggaaaaaatcgttttaggggtacatataaaaaaaaaattttaatttttataagaaaatttctaaaaaatctcaaaatcggtaaaagaaaatgaaaaaatggaattatgtagaaaaatatgntatatattttatcat

SEQ ID NO: 3614 - DNA, 7873 bp, Heterodera glycines
ttctgttccatgtgcgctctttcatttgttgtccatcctcttcactgttttggcatatttttaccctggtaagtgaatgttttagtgtaatcattggttactgtattttctacagtatcaatttcgcttttcttccctttagttatctcactttacacttggccttatctgatcgtttcttcctcattttatgtcgcaattgcaattcgtttggcgtggatcaaaggtaaaataaataattaatttttcgaaattcccaatttatccacttttaaagcgcataatcgcagttggaactcagaaggggcttccgcccaatcgtcggacaaagacagcggacgaatcactgcgacatgctttgccattcatatccaagcttgggcttatgtgggggccaattcagcggccaattacaagtggtactccaactttatcaactgtcatccaatcggacaaattgcttttttccccatccaacttttcgtgtgcatttatgtgatatcggacgaggcaatcaaaattaaaatttaatggaattttgaaaaaatattttaaataaacatttcttaagctctttttgctggtgctttgtaaagaaatgcgcgttatttttgtgcgaatgattggcaaaattttgccatttgtccggaagagaaatgctactgaaatggcgccattcacaacccaatacagtagccaaatgccgaagccaaaccaaacacagcacagtaaaaggcagatgcgaatgatcgatgtcaataacacggcaaatcattacgcagagaacaaattgaggagataacaactgatcaatcagtcagcagaaaagaagtttttgaaccccgagaaaaattggccaatggatgcttttcttttaattgttcattgactctttttattattttattagtaatgtatttttaaataaatttttgaaggagtgacagtaaataaactgttttaaaattattttatataaattgctatattaccttttttaaattacaaaaataattaatggaatttatttatttaaattatatttgttttattaaattacatttttaaacgagagaatctcttcacaatttatttgtgaagagattaatgatatggaaaatatgattcatcgaaagtgtcagtggtttccatccaaaaaagagagaaaatgtaaatgacggacatttttacaccacaatatgttatgttgatttgtacacaattatttatttttcttctcaaatgaaaataaatgtatttccaaaattcactttttgtattaaataatttcgtttttcaatttttctttccagttattaattaataataattctttagttcctctaattgcctctacattttccaaattgcggcatgtctctgttcctcaactgggccaccttcactatttttaccattgctttggctgtgccaatgtttcagtctttttccggtgtccaatcgtacgctaatgatgagtgaatgaatgactattaataacccaattaatattctaattttatttcagaaatgcttcttcccttacgggcgaatcaatgaaaaaacattttacgaaggaatataacgcattggaccaatgcaccaaaacggaagttggccaaaggatcggctccttctcattgagcttccaaataatcggagaatgcgtcaaagggtgcaaaaatacataaattagtgaatttaattaattaaaacaattaattagcatgcttttttgttacccgggctctttggagcaaagcggctcacagtataattatgggatgacggtgggcatgcaatacaacgtgaaaaacagccaaatgtaaaagtttatcagataaaaccattttattgcttaaactttgtcagaattccgtcgcgaaggaatgcgaagaaaagcattttttattgtgctcgagtgaaaaaaagaggaaaggcggctttgcatggaaagcccagtttggcacggcatcagaataagcggcccatttgcggcatcggcgctagttgcagccatacagaagtagaagtcctagtctgttcgccggagatcacttcagaattagaatttcggtcgagcaaagccaatttaacattgacatccatggagcccgagttgccttttttgtgccaaaaatgcccacatctactggcaatgttttaggggtgagaaagagaaggggtgaatttaccgatttgagaggtccatgacaaaaaatttaaattgattttcgactttttattttgcctgattaagattgcgagagacttaaaagagaaaccaacggtcaatgtgaacagagcgaagacaaatcgaacagcaggaggggtccgtatcgttttggcgccgacgttttggcgccatgtagggaggtagaaatgatgaaatcgttgtaattttttgacgaagtctatcaaaattttttcaacaatatttcgatttaaacaaatctaagaaactgcaaaagattcaaattcatttcttattaattttaggtaaagataataatttaaaaattattatcacgaaaaatgcgtttccaccattaaactgggtcatctcttattaatttaaaaaaataaaagaaaaaataattaacaaaattcagattgatggcgatttaaaagcagaagagcgtggaactttcgtgacgatcgaaaatgaggcaaaatcattagagagactattgacatcactcatattttaatcggctccttttctgcgcgtatatgcatttaaactacaaatggagattgatgattgcttccaagggcagggttcttaaaatgccaaaattggaaacttattcatatgtaaatccaaaagaaatctagccaaaaaagtagtgctttgttgttgtttggataagagatttagattatttatcaaaataagagacagacccaggaattttgtaaccaaaaatgggcctagccatggcacccaaccattaaattgtcggttgcttacgtagaaatgacacatgtaaattattttttgctttttactgccggatgcataaatatattgccacgagaaaaaaaaaatgtttttatttacatatttattaaggctgaagcaacaattcagcgaatgattttaataatattttaatttttgaaatataagttattattttaataattataaaaatcgtgtgtttcttttcttatttcgttttttcagatatttaagtggtaaattgataatgcaatttttcattcgcttttcattagtctttgtttgtttttatggcaaatttgtgccgaacattggccaattgatttgcaaaaatgaagaaaaacaaaatttgatattagtaaaattatacaacgacgaattagccacaaatgacgacactggcgaattatgggaatttatatgcgaattggagcaacaaaatttagcaatggaaaaagcattcgaaacacaaaagcaaaatgggaaaatgtggcgaaaaagttcggaaacatttgatggagaagcggaattttttaggcacaaatttgaaattatcagacggaaagacaatgaattggccgaattattcacaaaattaaggagcacattttattcaacagttttaaagggtattaaacgactgactcccagacatttcatcaaaaataataaaatgaatggaaagaaatggacaattaggcaatggcattacgaaatagtgtccgtcactctgcaaatgtgtggtagcttgatgagctcgattttcgctgttttaatgtccattgtcattgtccatttttgcccaattcatttcactgacaaaacactgttagaaatgtgcaaaatttcaaaatgctccgccataattatctaataaataatgaatagcctaattcttagatgggtccatggcagaatgccttagaaatcaattaacccaatttgttttgatgctgacacaacgcttcaaaatctcaaaggaagaaataatgccaaaaaaagaggaaccgacaattgcgttgaaactgataaaggaatttgccgaattgtggagagagattaaagtaaaacaaaaatcaaaaagcgattacaaaggcactgaaaatggaaaaaataatgggcaaaatgagcgagaaaagtgttgggattcggatgaaaagcaacgaaaaatgttaaggcttgtttttacggctgttaacggagatggcaacataatggcattgaacggtgccacaaaaggtacatatttcccaaacacgaattaatatttcaaatttaaaatgatcagttaatggcggaggccgccgttcgcaaaagcgccgccgcaaaaagcgcgacttggtcctcctaattctgctaattgccttgctaatttcgctcttctttaccgtatattcgtattgtttacacagttccaacgacgattcgcttgagcaacagaacgcggacatggaaatgcttctcgttgttcgccaagcaaacgaaatttttgtcaaatttcgttacggcgacgatgaaacggataagaaaggcaacccgaaaagtgaccatatttacattgtagtggacggtaaaggtgaataacctgccaaattaattattaataagattatgtattgcccttttcccgaccctcaaaaaatgatgggattcggagtttttgagaaggcattatacagttaaatcttacttaaaattaagacatttttttgtgcaatttgattttcggcttttattctgagtttttggctaacggaccatctcgtataaaaacggttgttaatgtaaaacaaatgtcagaatcatttttacgcaaatttttattttataaatatattaaaatgaatattgataaggttaagattggggggtttcaaatttctgaagtgtatgtatgtacctgccgaaaatttggatttttgactgcatttcttcccttcaatttggcccagaaataaagattaattatgtttttttttaaattttaatttagaattcgatttcgttggcgatggagcacggtcaagatcagcgtaagcatataaaatacaacaaattgtttttcttttttacgcattcattttcaaaggcatttttgcaagaagtgtcccaccggaatgtttcaattcgatccgccactaattgtcccaccggaaaccgtcgaaagtgttgatgccatttttgaggcaatgctcactgggcattggcctcccgacagtcacacttatgccctccactcgtgcattgactttgcctaccaatttgtgtgccggttgaacaacggaatgtgcggcacatttgattatttttattcgtaaacttaaatgttaaattgttagatgtccggagaaggaccgttggccgcggccgttcgtcgaatttgaccagcgatgggtgcacagaatggcccatttgggccgtttgtccgtgtttgactttcgctatcgcatttccccacaaaattatgaactttcgcgcgacattttgcttcccattggcaacataattagcagcaaaaaacaatcgtagcaaagagaaaaggataaaacgaaaccaaagggaagaagagaaaatattttgatagaaatggcagaaaaaaaacattttatatttaattaattgaggaaataaaaacatgctaattcatggcggacttttgtggattttcatacttcgcgttttgtcaattttttccaaatttcgacaattctgcaaaatttttggtatttaattcattgattagaatgtacattttcgattttattaattctgcgacctcaaaacatgttttgattttggtcgtttcatgctctccctgctgctcactccccctctttaaaattgtacaaacatcggcggacggatggtgatgactcatcctccctccgctccagccaattatttacgactttttacatttatttgatccatttcaaaagcaaattcgcttcaaaattttctgtttacacagctcttcccctcccccccccccaccttattcgccctattcatttgatttccttgctattactaataggggcaattaacaattaattgcctggcattgcttaataccgcccgcctccttcgatcttttcggtcgaaaaccactcattcgtcgatgttctccgactgaataacaatttatttattctatccccccataagataatttctccccaaaatagatgatgctgatgatcggatgagtttattgatccatccgcctgctgtcatcccttttttccgtttatcccaattttattccaaataaatttaattcaaaaattttctatttaagccttttttttagcaagaatatacaaaaccgaaaaataaacctccaaattatcctctcacttctatttttttctttttaaaaaatgaataaaataactgaattttagctaaaacccataatcacttgacccttttatatcctatggtcattgggatcctcccttcccgatcaatgatcactttttaagcctgttgtttcccctccacaattgttcatcccacgattcatcattcctgagcattcaattatccagagacgatcaggaagaagttcttccaaagtcgacttttttatatttacatttctcggcgattaatttttacatatttttgcgtttattgcctttttaaatttttttgtccatttaggcctaatcttaaaaacctgctcattggtaaaaaatgaaatccttctttaatttcccatttgtcttttgtattcttttgctcattggctgcgttgacaaatgcgtcggaggagtcgcggcattgccgccaaaatatttgggcattaaaaaccatgacaaatgcttaaccgagtaaattaactctattttaaatgtttagaataaagttgctttttgaacaaatttttaaatttaagcgagccaataggctcttcgcgtcggctttgtttgccagcgcagaaaaaaatcgaatgccaagatgaaacgttgaaagcgcttaatgtacatttaatatttaataaaaattaatattatttaataaataaaatttaggatttggaagaaggccaacatccgccgacttgcgcatgaatccgaagacagaagcgaaagaagcaaatgaagggattgaagaatgacagggaaaagcctggctgaacaaaattttgtctacaaaaatgaaataaaaagttattgaaaataaaaaaatttattgatttgattgaaagaaaaaaggctgtattctattgaaattttcggcgcccaattattctgattcggcataaaaaatttccatttgccatgccatttaacgaatgtgattgaatttcaatcacggatgatccgccggtgattacggatggcaaaaatgccggatttcatggtccactaggtaattcaaaccatgagaccaaatccgtggtgagtcgaagtgacaaaagtgcagatgtggcgaagtgacaaaagtgcgaatgagtgatgatcagaaggggcgggtcatttcagtacggaataaatgaatttaattaattaataatataattattttaatttataattagatttgctgaccgtaattataatttagatttattattttaatatttcccaaacaaattacatttttatgagaaaatatagtcccaaaaaatttttactcaaacctgaaaaactatcttatagttcatttaaaaacttgaaataattcatgcttgcacaacttttggtgctgatcaaaaaagtctcttacaccaacttgatcagatcactccttcctagtgaccgggacacccaaaatacacttaaaatcgggaaattttcgaaattcatagggggttgggaaattttttctagaaaaaatgggcaagcccactggaaagagcacaaaattctctactgatttgacttttgaataatgggg

SEQ ID NO: 3615 - DNA, 1024 bp, Heterodera glycines
attaattaattaaaatcattgttcggtactgaaatgacccgcctcttctgatcatcactcattcgcacttttgtcacttcgcccacattcggcactttgtcactttgacccagcaccgaccaaatcatgtaaaagttaaaaaaatccattcaattggcataattttgatggatacgcacgcattcacagaaaacatttgctatattcgacgtgggaatatgcgcgaaggcatcaataatcagatatttctacatcaaaaatgtggaattttctgaagaagccagcaattaaattgtaaattttaatttattttatttttttgttttatatatgacatttataaaacataaatatttggaagaaataaaattaaatttatagacaaaatggaaattgtttttttcttcatttcactggccaccattctgctaataggtgaattgcggatgctaaccaagctcaatttttgagtttacattcaatcgcttcgatttgcttaaatttcttctaaaacccattaaatcagtttaaaattttaaaattaaattataattttaataggcaaaacagctcgacttcccagcaataaaaagggaaatgatgcaaataaaagtgattttgcgagcacttctaactccgcagatcaaacacaaaataaacacagtaagacaaaagacaaaacaaattgaaaaatattaattgaatttagttaaaacgacggatgacgcatggaactttttgaaaattgtgaaggtgaaaagggttttgtgtaaaaactcataatttttaattttgtttaagcaaagatttacgaataatccgtcggtgttcagtgaatttttgagtgtcatgcgatccttcaaagacgaagtaaatccaaaagaattaatttttgccttgaactaaaattgcaatcacagaaagtggacagtgtcgaattacatcaacgagttgcgcaactcttcactaatgagactgatttgatgcgcgcctttgaatcgtttatgcccggggcatgtttcaa

SEQ ID NO: 3616 - DNA, 2721 bp, Heterodera glycines
  unsure (1)..(2721): unsure at all n locations
ggatcctctacgagtcttcgagttaaattttgaaggatttaaaatgaattgtgtgggcacagtgaaaatttttgcaaataattgatacaattttcaaaaattacctcatatttcaaacaaaaattttttaaggatccctggttacgggtctgggtccgtgggatgccttttatgcatccccccacccctgccctcccgccatcggcccaccgtaaaccaaccacagtattccgctcgggaatagtgtcaattagcaaataatcggccaattctatttgctccctcattttttcgacaccaacagctgtccaatccatttcgacctgtaaaaaattaaattgtttaatcaaaaaagaattttgattaattataaaattatataaattttataactatttttttataaaattaaataaaattttaaaattatttttatggtgtaaaaaactgacttcatccgtattgtaactgtaagttgtatttgttttttattgttttaaaattgaacccacttgaaagactcaaaagttagggaacaagtgacattgtcaaatggaaaactgaaaaatatgaaaatattattttttaaaacctaaaaataaaaacctagaaccttttagattaaaactccaaaaaaaatttattagaaaatataaattcattttgagcctttttaagaaaatttctaggcctttttaaaagaatattatcaagcaaaattttcgccattatttttgccgttataacggcatttttttgccactttttcagttaactattttgggttttttgtcacaaaaatccacgccctagtcatggttccgtaaatttgaaatatgaatttttatccgattttaaaattcatttagaccgtgtcaagtccatttcacagggtccctgaagctttagtctgtagttagtccatactaaaaaaaagtgatatacagtaaccgaaaaaccgtaataaattttgatttacctgatccattggcataaatgagcagaaaaatgtttggaaatggagagcgatgaatgtcagccgtctttgaattgatgaaacactggaataaatattttattttatttaatttaatataaaattttttgacaattttactgaatttggagtccataatttctccaataaaatgctgttcaatgagaggctaaaaaatgtaattttattttcaatttcacaatatatttacttgtatttgcatggctctaaatatgaatagtccaaagcctggtccttaaaaatatttatttatttttattaatttattttgaatattttttacattccacatttcgctgatgtaaatgtccaactaaaattagtaaaaaaaaatcctaagttaaagccagaaaaaataaataaaattgcctggaaatctgaagtaatgtccgaaattgtcgtaatttcttgcacccaaacctacaagaaaatgttttaatgtgaataatagcgaaatgctgtaacaaattctcgaatacagtacctctaccataactttaacacggcctcccggtattttgtgtctgttatacccgtcgagaatgctaaaattaattgggattctttaatgataaaattttaaatttttgcaaaatatttattaatgtttttaaatttattttaaccggtccaaaatatatgaatcgttggcacaatatcgttgttgtccctctgctgttactgctgttgtcggactgtccgatgcggtgacgtcacgtgaaaaacgcttttgttgtgagggcggtatgatggggcggaaggcgccgcgttcgtcaaccttttcaagtgaaaaatacggaaatttgagtcccattggctatgaatggaattctgagaccctaaaattttggaattctgaattccgagttcagtatactgagatcccaaaatgttgtaagttcggaatccgagcgaagccctaaaaaatattcaaaagtcgaaactcggaactcagcaacatctctggcattggcaagcgtttcgtctaaaattagatttccgaaaaaattttgggattcggaattccaaccctggtgcatacaacgcacacccaattcataagaaaaaaaatcgcttcacttttagcggattatgaaacgaattagtaaggattttagctacaaattttgattattttgaataaatagtaaggctattttccgccttctaaacattttttttttacttacctcccaatcgtaaagccgggaaagtctacgaagttggcgagaatttcgacgaaagaaggccttcctgaaatttcatatttgtttttttccagtttgaaaattaacttttggattttactttatttttatttttctatttttatctcaacaatttatcccatcgatggcaattttgcacaaaaagatttggcggaccaccaaattgaataaattctctgccgtccccacataaatttgccaattttcgatgccaatggcaaaaattaaatttgtgtcgagcagcaaaatgaggaaacgatttacttccttccggacgacacaaatttaaatagaagaaattaatttttcaaaatattagattgttatttaaattattttttaaaaagaaagaattaataaaatatattaaacaatatatatttttttacgatttttatttattagtttttttattggatttgaagcaaatattatttttctnaattttaaaaagtattttttaaatattttttc

SEQ ID NO: 3617 - DNA, 3443 bp, Heterodera glycines
  unsure (1)..(3443): unsure at all n locations
gctgacgaatgccaaaatgggcggtagaggaggaggagacaaatttaatgcggggaaattttgtgcccgattttatgggtggggccaacgaaaatttgtacataaggcaaaatggcacgaaatgaaacaggataaaatgatgatagatgcattaaatttatataaaataataaaatattaattgaattttatgttataaaattattcgtaattccagaaagaaacttttcatgggatttttttagaattgaataaaaatttgttttcatcgaaaattgtacataagacaaaatagcaaaacgatgatacacatatttatataaaataataaaaaataaaaatgaattggattggattggattatgctataaaattattcgtaattccaaaaaacttttgaggcggaaattttttcaaggaatccaagaaattttttttttcatttaaaaaatcttttaggccaaatttgaggcattgtttttttctatgccataaagagctcccattcagaaaagtgaaaggagggcaaaaatgtgtcaatttcgcgcctgaatggggtgggcttttgggttcgggcggaaaagggggcgggcggaatgcatgagaagaggcgttaaagaagaaaaacgatttttgatgggatttaagtcgaggcgtcaaaattgcttaatgtacataacatatatatttgagacaaataaaaatgaaaattacttttaaatagtaaaatgaatataggaaaagttagaaattaaaatttatattttaaaaaattgggaattttaaaagtaataaagcgatatatattttaaaaatgagacacataaaaataaaaatatcaatatttttaaatagtaaagtaaaacatagtcaaaaataagaaaaaaaaaattaaaagtaataaagcgaataattcattaattccataagaatttgcattttttaaatttgatatgtggagaaagtgcctgctggagtcaatgctcaaatggcggcacaacaatgcttgtctatgcttagaagcgcatttagttttgctttttgaggcaagccatgccttttccatcgaatgaacatttaaaagtggccaaaagcgttgtggaagttggccaactgacaaacaacgaagctcaaaggaataaaaattttattcgagagtcatgtttcaattcccgaaaattaaaaaatatttatatttatataccaaaattttttacattaatatcaggcttggtcctctcacatcggtctggattttttttaccttaaaccttgtttttcataatcttttcggcacagattttactgttaatacatacatatagcctctattaccatccattatatataattagaaattaaaaaaaatatgaaattttatgagaatttcttcgtttatatccaagttggttgaaattttgtgtgtcttaaaaggcccatattaattcccaaaggaatttgaagccgaaaaatgccactgacaatgagaagccaatggaaggaaatgagtgacgaggaagcaaaagcagcaaattctgctgacgaaatgtgatgcaaacatttatacatacgaacgacaccacaaaattaaaaaaaagaagcattatgaatattaaataaaattaaaaaaaattgatttgaaattctgtaaaattctgctgaagggaaggtttttggaacaacaaataagtgcggtttttcatgaatttcttttgtattttttttcaaaatatgtagcataattattaagtattgtgatcgttagcgtctgcaaaaaaaccttataaggatccccctgccgatagtgatgggattgtgatggtccataagaccggggtcgggattcccagaattaaatcaattttctgcgactccgacccattatatgtttggaatatttgcaatttaaaaaatggggtgtgccttcaaaacaggaaagtaccattttttgccaaaatctctttgcgttccaaacccatcaagcacaggttaaaattgtaaaatatttcttttaaattttagtaattaaagctacctattttagcccaatgattaattaacttttaaacggaaaagtcaaatgacttccaaatcacttggatcagtcagtgatcagtgatcacgagtctcttgctgttcaattattcctttaactcatgtggaagacttttgttcttgtttcaatttttatttcattttttaaaaagtcggtaattttaaaaatgtttaaaattatttttgtaaaataattttatcaaaaaataaattgtaaaagtttaatttcaatctcggcttaacaaaaataaacctatggaaactatataattagctgatttgatacgtaaaaaagttcgcctttctttgttgctcatgtgacagctgttacccattttattttatcactcgggaaaagttgccaaaatgcgaaaatttctgttaactcattaattaagaaaaagctgcttttgatctgatcacatttctttttaaaagaagaaattgcctttccacaagacacaagacaatctcaatcaactttgagagttttaaggttttcattttattattaattaattaattccctattatacagccctcctccccctgaattttgccacctgcagaaataaggcgctcctttgatggggtttagaaataaagccccctgatttgtgagttagagccttcccctgaaataaagccccccccccttttcagcgggcttgaaaaaaagccccgagatagctctatttctgaaaatacggtaataaaattttttttcataaatttaaatattttgccaaacttaaatttaaaaataaattcgtcatcattagggttgtaaattatatggactaaaaaacgcgaaatatggacattaaatatggactaaaaaagcccgaaatatggactaaaaaggccaaaaatggccaaatatggaccaaaatatggataaaaaatgccaaaatatatgttgtaaacccccaaaaatcccaaaaaaggtgtgcatatttaatatttgcttaaataaacctaaaaagtacaataaacaaccaaaaaatggggtttaaaacttaaaaatgcatattttttattgttgttcgttgtatcaaaaacacctccaagtttgccaaatttcgaaaaaattctcattaaaaaaaagaaatgttcgcaaaaaaatgacgaaaatatttattgaaaatgccaaaatgacgacgaaaactcaaatttttcgtgttttgtggggtgtaatttttaaaaatttccaaaaaagttgatctttaggggtgtatttttcgtttttttttcatttttcttgtgaaaatttccaaaaaatggcaaaatatggactaaaaacccaaaaatggcgaaatatggatttattcccgaaaacccccaaaatatggatttatatggactanaaaccttcaccaaatcaaaaa

SEQ ID NO: 3618 - DNA, 3994 bp, Heterodera glycines
cggataaaaaattatcatggttttttatcttaaaaatattacggaaacaaaagggtccccccttttgtttcaaaaagcctcacttttagtatagcgccaacttttgattgtttaatattaaatacccaactccgtagtgctatgcagcaagtcaccagtggcacagatcattctcaatctcaaccagttcattctcctgctgtccattgtctggtcagttaaatagaaaatttggcacttttatagatgccttgccgagaatgaaggaatggggttatattacaaaaaaaaaagtttaggaatttccatgaattttaggtctgtcaatgtcgcttggaattgcaccattcattgtttgggccgactgaggacggcaccgactgtgcttcttccaccaaatcgtatgctttgcgcagtgacggggcttcctgctcgacaacaacagatgcgaagcccgactttgcttcaacgtatgaggttttatgaccgttttttcaaaattttcttcaaattttcaacattttttagcattgcattgacttgacctccactgttggcacgtctcaatctgcaaatttgttggatttagtggccgaatccaccagtccattggaagtgccgatgtgtaaggtggcgataattcaccattttcggaaaccagttagagcccggactggatcccgaccctaaaatatgaaccaagagaccaagacttcgaaaaaattggaatttgaatcccggtaattatatcccagcctaattcccagtcccggcatttttaaaagtctgggttctaaaacaaacatggattttttttgggtatgaaaacccatcaatttttagaaatgtgccaatgcagtgactgcggagctgaacaagcaattgggtcatttggagaaggaatgcatccaatacaaaaagtcgttggaccatttgttgcaacggcgtgcggactgtccatttgacatggaggcatcgcgcatcaaattggacgctttaaaagtgtgtattttcatttacattaaaaattttttttttcaaaaacctagtttttcaaaaagaaacccgtaataagttttaaattttcagtctttttaaaaaaaattggggctggaaacattgcaccccgaacatacgtctattaatttttgacatttaaaaaaaaatcaaaatttagtcagaagagcgcgacctattggaacaactgacgctgttggaagacgaggaacggacactgcttcatgaattggatacaaaacaggaggagcgcaagaaaattggtgaacgagacgagcaactttatcgacagttgcgagacaaccacaggcacttttaccatgaaattcggacttttgattatttattttaattgaatttcagtatactcattgaacaatcggatgaacagcggtcatttaaattgcaaatcaatcaggccaatgaacaaattcgacgtctgtcccgcatgaatgtgcttgatcttgtgttccacatttgggtggatggagagtacgggtgtgttgcaatttgagcttggaacagaggagcgcgagacctgtcagattcacaggctcccgccaataaatcaattcgaaacaaaccggtacaccccaaaacacagccgggaaaaaaaatttttttttttaatttattcccggctgtgttatgtctcggctgtgtttcggccggctgtgttttgggcggctgtgttttgtcttgtttcggaacaaacaccatttttaatcctgaaactcggtctccggagatgcaatttacgaatcctaattttgatccaaaatttttaaaacttggttaaagtttagccaataaatggtaccagaaaatagtgacactctcgaaacgcgtataatattacataaatacaatgaaaagctcgttttttcagcacaataagcggcttccggttgggtcgactgcggcatgaccaagtggaatggagtgagatcaatgccgccttgggacagacggcctttttgttaaaggtttggtgtaacactcgcgcagacacaaataaacaatttctggaaccttttaattttgcttttactaaaaaaaaggtcatcgctgaacggctcggtctcgattttgttggctacgagttggtcccatgtggaagcacatcactcatccgaattctgcccaaaaatggtggcactaccactgcttcatcaacaactgctccagccgcacatgccggtcagctagtttcatgttatttccattcaacattgttatttttggcgatttagtcgaggaattgcccttatatggaagcggcggttggcgaccatttggtcagcccgcattggacaaggcattgactgggttcatggactgttttcatcaggtattgacaaaaaattacattttttggaaaattgatgcatatttttttggacaggttgaacagcggttaaaacagtactttccgcctggtactcagttgctgccttatcgaatgctgaaggacaaaattgtggacaaagactcgcaataccttgtcaaaatgcagttaaattctgaagtatttccatttcttaaaaaaaaaattcgggtggcctagtggattacaccccagtcatgacacctttctgctcttccctccatctctcttacccttttcctcattccatgagccattgtgtcgctccttggcacattgagttcgaaatatgaggacaaattaatgtctttcgggggctctggacgttaccacttggtgcaatattgcagttgagtttatcagtccatggacatatgtgtcattacaaaattgtttttaaaggacgacgaaagaccaaccaaaaaatagccaatttaaaatatacccaaatacaaaattttatactttttaggaacgctggaccaaagcgatgaaatgtgtgttgttgaacatgaaacgtgtcattggcattctgaccacattgccgccgacgctgatggttaacccaacaactgctgctgctgcagcaaccgctggaagcaggacagcgaacacaaccgccataattggcaccgccattcccactcactcgccatcaacatcctcttcttcccgttcatcctgcactggcactgctccagttgtccattcatcgcaaactgttccagcagcaaaagatggttggtgagggcaaaaaaaaatttttttttaattttccatttactttactaataccagctccaagcagttctactggacaaagaaagcagaagtgagcaggcgactacaaccagaaaatgtttgacgagcgccatgacaaattttttttaaactaatttatttgtgtaataaagaattttttaatatactatatatatacacacatttattttttcattcgttttatgtcctatcaatattttttgagacaaactaaaaaaataatatcattttttgcgcacagttcagtgatttttctgatgaacgacgccaagaacaaagaagctgcttgtagcaaccagcggaagcgccgggaaaaatgtgacactggcaatgagtcgaagagagcaacgacgacatcatcttcaagcattacttgtacctgttctcagcgacagcgcactgaatgggcatggtgaaattttattttttggtaaataactgttcgaacttgggggatgaaataatttcaattttaatatcccatagagtataaaatttcatttttgttacagttcattttgttctgccactcaacggcatcctccttctacaggaggacgtcggcctctgttgcttccaccagtccaatggccaatggcaactgcggcaacaaaacggaaatatttacgtcgaccattcacactcaaaaccgccgttgttgatccaagtgaacatttttacaaacatttcatttttatgcttgacatcacacaaaattcatagccacgatcacttcgttcgtcttgttagcactgatttgtctgtcgtcatggctcaacaattttgctggtctcaagccaccgatca

SEQ ID NO: 3619 - DNA, 4180 bp, Heterodera glycines
  unsure (1)..(4180): unsure at all n locations
gcttgctgcctgaggtcctgcatccggtagattttcagtgcaggatgtgtcacaagggggtttntgtaggcccatntatnaaaaatctttatttatccacagataaattatttttaaataaattcatacaaaaattgtatttacagtttattttaattaaatttatttatgtgttacaatggtggacaatgcaacgttgttcagttgctcttggactgttaattcctgaataattgaatttaaaagtcttaaattaaaaaatcgcttgtcgagtatgcttcttccttcccaagccatgaaataggcaaaataattgttcatagactgtcattagtggttaaattataaacaattaattaaattaaaatttacgtcttttatgttttccaatgagtattttgcctatgatttttatcaataaataaaatctgagtgttgtcaattttatttttaatttaaaaatatgtgcacataatgtaaaaattattaaataatacgttatttactactcagataagattaaataataattcgtttttttttttgaattttaattttcttaccctcaaaccatcgtcccatgaatttgctaagctcaaagtcttccggtgttgaaggtagcaatgcgtcagtgacattgtccgccaatgtttgcaagtgatcgggtgggatcacatcggccaatgttgtcccgtttgacacacggcgagtaattgagcctaattaaaacaaaagcttgctcgtgaatttgggacgacattttagggattttagtaattttaaaaattaaaaatcaaatgactcagacgaaattttaattgtaaatttttgaaatttaaaactaccaataagctggacaacgtcaatttggccttgagaattgcgtggaatgcctccgggtaaaattgggataccttaaaaggcaagattaaagaaaaatttcataaattttttaaacaaatttcgttataattaaaaattcgagaaccaaaacaaaaaaaaaattattaagatttccgatcgcaccgaattttaatgaatcataataatgcattattcattaccaggaattctaggtaatccagcatgggctggcccattggcattgccgccgccacccaatgcggaagcgaaaccggcaatggcacgctctgcaggcgattgttggcgacgaattccttgaaataaattaaattgatttaaaaaaaaaattagttttttggatatttaatttaccattcccactggtggatgaagcaccaccaccaccagcagcagatgaactgctgcttgtgccagcggaggatgaaactgactcggcggcattggcaagtgccgaagcgatggatttagtgtcagcagccccatttgggccagtgtttgtgccaagcaaatttggcaatgagttagacaaagcatcagccatgccagcttaattaaatgttttattttcattatgttctaatgatttttgattttaatttaatgagctccatcaattttatggagtgcttaattaggattttagaaccaattaaaaaaaattacatattcagatttatggtcattgaataatttttttctttattaagcatcagccatgccaacttaattaaattttatattttcattatgttcattgatatccaccaattttatggggtaattaatttgaattacggcaatgagtcgttaaataatttatttttactttattttttcttgctctattggacctgaattttcgttattaattaataaaatgattaagttaaaaagtcaaagtgaatatgttaattggacccatcaaactttaatatactcactatctttgacaatttttcgcactgagctgcttaataaaccgatcaacccattctcgcccggtttagcatctggcaagctgaaaaaaaacaattgaattttgtttaattaataataaatgggcggacgctcacggagcactgctgccagatgggttgaatggtgctttggcactttcaatgaacgtgttcaattcgttgccaaatttcggattcgcttggacaagtgcttcattctgaacgacaaaaaacttaaataattaacacaataaaatataaaaataaatacaacaaatcgctttataaaacattttaatgacctgcggggcatgaactgtttgtcctccaatatgctctaacggtattccctgaactggaatgccggctgaacgaagttccttgacagcacccgcaaatccctccggatgatttcccgtaaggccaggaattccttgaaaattgcaaaaaataattaaattaaattagaaaataaaaatccgttcaggaaatcattcccaaccactatcatatgaatttatcatacaatatgaacacttttaccaaatgagtcaaggccaaggaatttgatcagttgattttgcacatcggtcggaatattcacttaattttaaattataaaaatattttaaattaatttttactcggtggcgcgggcggtggcgttgcgtcttcacgcgggttgaatttctgttgtactggattcaatggtaacacaggctgtaatgctgcaattggatttgatgttgacacagcttgttgaccattcttaagaatttggatgcaattaattaattatttaggacttaatgctaatgaaaagccaatcgggaaatgacaacaaatataataattagccaccaaattgttttaaaatataataattttcaacaattatttcatatttcaggacttgtaaaatgctagaaaaaagttaaaatttatctgattttaatttaaatagggccatcaatcagtcaaaacaattaaaaaattaattaatgttcaaaaagtcattttttccattcttaagaatttggatgcaattaattaataaatttaaaagttttaatgggtattttttaaatgatcaattaaaaattttaaaaatttctaaattttaataatcagttttattacagttgcagatgatggcggaactgaagagcgttcagccatcgcagcaacatcgattggtgccgattgcttcgctggtgatggcaaatgtcgtgtggccgcttgcggcacggcacgaggcggatccgcctgccgcataaatgttggctttgccggaagctaaaacaattaagaaattatattaattaatttacaatttttaccggttccaatcgcataacaacagtccgctgtgactgttcattgggctgctgttgatattcatattggtatggccgatgtgcagcttggccaagaattgaagtgaacaagcacaatacaaggatgaatagatgtgttagcataactttccctttttaaaatggaatttaaaggaacaaatttaattgatgtaataattaaaataaaagtttgaaaaaacgaataaaaaatttaccgttgctaaggtagggtttgttaactttttctttttttttattaaaatgatttagataagtgctaatgggattttttttaacttatgaataattctgatcatctattttgcataaagagttaaaaaaattattttatttaagtaataaataaaacattttcagaaattgtgctgccgaatagaaatgataattagaaatttatccgatccgaataaatgaaaatcacacatttccaaatgcatcattacacagcaccttatggaggagaaagggaagggatgacccaaaatgatcacagcaaattagctgcaactgctgctgctgctttcttggtgctttttggatgttgtcagtcggaatagttgtggaatcggggttggattttggggggaaatgcgccaacaaaatcggcggcaaaatttggggcatccggcgaagatttttccgcttttccccccccccccccccccgcgcgtccgccacaaacggcgaagattttgggatggtaaaaggtgcacattttataatgcaattgaacacaataaaattaaataatttttgtttcgcagcaaaagaatggaaagtaaaaagagatttataaaaaaaaatatcaaaagaatggtataatttgaaaataatttttgtttttttatcagttttaagatatgatgtaaatttgctccggaacatgaatattgggaaaatccgaggcgggacttgccggagaattttgaaatgtaaattaaaacaacgataatatttacg

SEQ ID NO: 3620 - DNA, 3982 bp, Heterodera glycines
ttggatttgattttaatgtcctgtaaatgcggaatttttttccattttttgaaatttcttgattcagccgatcctactattttgactatttatcagttcaacaatttcacaaattttgtttgatcgatgaatgaaagcaataagcagaacatttgcttgccatctactggagatttaatgaaagcagcagctgttgaagaaatacgtataaagtcaaaggaacatttattttcagtttcatctgtttattaattattttaattttgaacaatggataaatatacatattatttttatatgtttttccacatatttttgtatgagaatgcacaaaattcatttttgaccgaaatattttgtgtaaaaacaattttaaattaaaaaaaaattgtactccgtggtaaataaatattaattcacaatatttattattattatttatttccctgttttgtattctaatacgggaatcattaatttttgattacagataatattttaaggtatttttactaaaaaaaacaattaattttttgtgtaaaatgcgtctttgggtcgcttcactttgcttttacgtttccattttcatattttgtgaaattttgcgcggatttgcatacagattcgagctgcacatacaaattggtggtgaacatcatcaactgattacatctttgatttatgaggtgggtaagttgaaattaaaactttttttttaaagcctttgttaaattgagaattggaaaagctcaatttttaaccgcttcaaacacttctgatcaacttctttcattctctagatcgatttgtctcattgagagatttgtcctgatcgggcctcaaagaaaaaatctcccttactttacaatagccgccgggatttcgcgcgattccctacccggaccgacattttaccaatttacgttttttctgactgcgctttaacttttaacacgttaaaatattggcattttattgagaaagtcaaatatgtaaaattattgcgtttgataggaaagtgagaagacacattaacagaggataatgataaataattatttttgattaataatattgaaaatttttaaatatttaagtgttatcaccatgtatggccccataaaatggaataaaattataataaaactctcatttttaactctatctttttttgttcgttatttttttttctcctaaaaaggtcagaaaatcaggcaggttagttagtacttcttcttattcatttttctttgctgaaattttctgttgttatgttcttcggatcgtccgcctctttttgcatcacttttttctctggcaaataaccacaacgcattcgtagctgttcaaagaagacaaaaagctgaaaagaattttaaaaaataattaatttttttttaaataaaaatttgcttatgattaaataaaaaatcgtccatatgccaatgaaactccaataagcatccaaccgcattaaaataatgaaatattttaattccgaggaattcggtcttttttttctcttcggcttcgaaaacggtatttcgatatcaattttaaagttttcaatatataggcactgttggtcgaaaaattgtatttagcagttttttcgctaaaaataatcatattttgtgcattgtaaatgcaacgcaaccatttttctggggaaacaaaaaaaaaaaaaattaattttcattgaatatcaccatttaaaatttgggaaattcccaaaattcgtaaaatttaacagtttacaacaaatctagcctcaccagaatggtgtgcggagccaatcgcacccatgcagggaaaaagcccttgaaaaagccggtcgggcccaacttggccgtgtacacacaacagtcccataggcccttgaactgtcccggcggtgcattcatcattcgcgtttttagcacctgtaacaatccgggtcttgattctaataataaaaaatatgttttcacacggaataattgcccattaaattcgatgaatgggacaaaacaatgccaaagttttgtgtctgacataatgaggcaatttgatcaaaaaacaaaaacaaaaaaaccaatttacgaataaaattttgactcaaaaactttttgctgaatacggcaaagcatgcatagtatagctatgtcaattatatgcaaattttgaggcttttagcatattgcgagagcccattttaataatggtcttaatgattcaattattataaatggggactaattgccccctacggcacaaatttgcaaattgggttgaaaaattgaaaaacgcacatccattggttgcgttaaaacggttgcgcctgaagcagccaaaaatgatgaaaacaaatgtgtgtaaatgttgtcttgagccaaatttgcggcaattagcatctgtacgcgtaagtgaaaataatttaaatgtacgaaaaacatttataatttaattttgaaaaatatagcgaagaaaatagtgattattccctgtccgaaattttgagattttcggaaaattccctacagaaaatatgttaacaaccatgccatgacaaaaaataaaaattaatctttatttttttttaattttgcattttatacatggtaaaatacaaaaaaaaatttttttgcaatttttaggaaaaatatttaatttttatttccaatttttttccccacctgtttgatttgatcataaaaggacagttgtccaatggtcatcagcactgctctgcctgttgccatggtgcacccattgaaccattttgagacgccttcctcctgaaaattaaatcaaaaaaattaattcattaattaattattttaatcaattaaatttcggaccctggccatccgaaacaatccatcaattgcatttttgtagttgcgccgctcagccggtggcaatttgatgtcattttgcatccgaacattgaccaaatcggctggggaaccggccacaccgccgcaagcgcctgaattttttaaaaatatttcatcaaaatttttaaaaaatttgtaatttattttttcggggaggggaaaatgaaggttatttgcccactaatagtgcaaaatttattttaattcttaaaaaaacacctgcaaccccggccagcaacattttttggccaaaattcaagtcgcctgacgattgctttttcacctaaaaatgagaaaaaaaaattattttaataactttttaaattttgatgaaaaaattacagtttcgtacaccgcaaatcgtgttgtggtgtaagtgagctgtcgcataattgacgcggaaagtccgttgtaaaaactaaaaaaaaaaacatacataaaataaaatttttcaattttttttgaaaattttctcaccccgaaaatccgtcggttttataaattttcgcagacattccgggcaaagacaatttgccctgttgttgtgtctgaagatgcactttgagtaggtcaagagggtgagtaaaacctttaaaatggaaatttttgggattttttaaaatttttaatttttttttttacaagcagccattgagccggcgatgcccccaaaataccagcgcgaaacacgacgttcatccgcttttaaaaaatccattttttttttgctaaacagaaacggaaaatttaaaaattgatatacatacataaggccaaaagagagaaaaaaaggaagaaaataaaatcggtaatttgggaaggaatatattttattcaaatattttaatttatctccagagaagtgattttcattatctctaatttatctcttttatctacataattatcttgcaggttaaaaaaaagtaaaatgagcgatagaaaatggagaaaagggggaccgtgaaagggcaaaacgaatggaatggaatgcttattgattttgaaaagagttgctccatatattttttgttttttgttttcgtcatttaatgtgtacaatagggttgccaagtgcgctaattttttcaaaatttgtccct

SEQ ID NO: 3621 - DNA, 1573 bp, Heterodera glycines
aaaattttttttaatttttaaaaaaaaccccttccacccccggccaacaacatttttggccaaaaatcagggccccctgcggattgctttttcccctaaaaatgagaaaaaaaaatattttaataatttttaaattttgatgaaaaaattacagttttcgtacaccgcaaatcgtgttgtggtgtaagtgagctgtcgcataattgacgcggaaagtccgttgtaaaaactaaaaaaaaaaacagacataaaataaaatttttcaaatttttttttgaaaattttctcaccccgaaaatccgtcggttttataaattttcgcagacattccgggcaaagacaatttgccctgttgttgtgtctgaagatgcactttgagtaggtcaagagggtgagtaaaacctttaaaatggaaatttttgggattttttaaaatttttaatttttttttttacaagcagccattgagccggcgatgcccccaaaataccagcgcgaaacacgacgttcatccgcttttaaaaaatccatttttttttttgctaaacagaaacggaaaatttaaaaattgatatacatacataaggccaaaagagagaaaaaaaggaagaaaataaaatcggtaatttgggaaggaatatattttgttcaaatagtttaatttatctccagagaagtgattttcattatctctaatttatctcttttatctacataattatcttgcaggttaaaaaaaagtaaaatgagcgatagaaaatggagaaaagggggaccgtgaaagggcaaaacgaatggaatggaatgcttattgattttgaaaagagttgctccatatattttttgttttcgtcatttaatgtgtacattagggttgccaagtgcgctaattttttcaaaatttgtccctgaattttaaagaggcaattaaaaaatttaaatatactgaattttcagatcaatataaaatttgagggctgctggacaaattttccgcaaaaaaaatgtttggaagagcaaacaaaaaaagtcatcaaatacatacatagcaaatacttttaaattaattctctttaatctttttttggcaaaaaaatcaatttagaaaaaaaattgaatataagaatcaaataataatttttttaagctgtttattcagaatttttttttttgaaaaaatgaaatatgtatttacgctgtttttttaacaaatacataaaaaataatagcctaaatataaaattcgtgccaaaattagattggaattaaaaaacggagtagggcgacatatgaaaaacgggcgcggacagaagtcccggattattttcgaaaagacttaactccttttaaaacgcccataggcgggatatttgccggttcataagtaatggcttgcttccaaacgtgaaaaaatgacatcacgctcaaggcattttttccaagttttcgtcagcgccttaatttgatcgatcaaaaaaaaattattaaatcaaattatttaacaatacatttgttttatatctatcaaaaagaccgtgttccaatatgtaaagacatgaaatgaaatttgcaa

SEQ ID NO: 3622 - DNA, 2051 bp, Heterodera glycines
aatttatgagtggtgtgagcgatcaatgaaaaggaattttcttcaaatctaatgattgtacgtacgtacatatatggccttgccagaggctcgaccgctcggaatgcctttgatttttttttcgaattttttaatagttctatatagagccaaaattctttaattgtgaatttaataattgcaattaatatatttacggacataatttgccattacttagaattcttatgacaaaatttgggaaaaagccaatttccaagcctgttctgactgctgggaggtttgaaggtttaaatcccggcacgagcttggcccggctaactaatcaatgaaaatgtcacagatggcagcattacttgaaaaataattattttataaaaataattaaaaataattgttggaatgtctgatacaatgtgaaaaaatgaaaatgaaatgggtgaatgtgttgtttaaataaagaaaaatgaattggtcggagacgggacggaggagagagagataagtgttgggagaaaatggatgagatgcgcattcattgtgtggactttggactttcaccggcagcaaaaatggactttacgacaacgcatatggacgagcaatcgtcataatagtccgtccactcactaattacatagctctaattagttatcgcggagttatatttatagtattatcgttttgtgcttcgcatgcacgtgataaccaaaccaacaaaaatctgatgattgggtgatggatgaccttgattcggatgatctttgaaaaacaggcgacacacaaattacctttaatagataatcctaattcttcatacataatgcacattactgatatgaacatgcaaatgagaagataaaaataagaaaaattaaataattaaaattaaagaaattaaaaataaaagagagcactgtgagaatttaatttcggtttattatggttataattaaaataaagcacttaaggaattaaaatatatgtgatttgtacaaacggaattcgttttatttaaattctatttttaaataattgtcatcaatgttttcattattcgagacttattcgggattaatgttttgccagcgagtcctaattttttcaaaataattttagatttatgaaactttttaatcattaaaatatataacttttatttttgaaaatttctgttttaattacattcattagatttaatttatttattttgggttttctccacatgagtcaattttttgcatttttttaaaataaacattaaattttgtataaatttacagttcatcggaacggtacaattatgtgcgccgatgtttgatgtgaattttgtgatggacaattacgggttaagtggtgtgttccttgaaattgtgctgattgaactcgtcaatgcttttctgtttcaacgagcttttgccgacccatgccaattggcaagtttcaacaaacggcacttcaaattaaaatgacgaatttaattttaaaactattaataattaaatttaaaaataataatagttaatttattaattcagttttacaactatatgaaaggaagtcattcaatgatttattcgtcacttttattagctgttcaattcattgcaggcatttttatttcttatgcaaataaatataataaaaatattatttaaatgagtttaatgattcataaatgaattaagcatatgcttcatggttgctttccagacaattttttgcgcttaatcttcattcacaacacattaatgcctttgaagaagaatgtagtgccgatttgacggtcgatatttaaaattaaaaaatttaaatttaataaattatttattttttacaaaaaggtcgccattctttatgggtccattgtggaagcattggggctttttgccggaaaatttgttgatttttgcatagaaaagagagcactatcgccaacccatgcaaatgtgatcaatgcaatttgttctgggatcattacaattttaggttttttaattaaattctaattaacaaaataaaataaataataataaattaaggaattaata

SEQ ID NO: 3623 - DNA, 3028 bp, Heterodera glycines
atagcccctaatgaattttttcgtacatattttgcaatttttgaggatttttcaaggaatttttattgtgtcccaaaaaagttcataacgtagttattattttttttgaaaattacttttaaaacatcgattttaccaaaaaaaaatacaaaaattaatttttaaatactaaaaggtgattctaagcctatttagctcattttttggcattttgtgcctatttcacccgttacaaagaattaaaaaaaaatttaaattttatttatatattggtggttttatactatatttcatctttttagacataatttatttacatatttagcgatttttcttacgtaaaaaaggaagccctaataattattaaatataattcgaattttaataaatgtaaataatttaaacttgctcagattgcgggcgatgtctacccaagcagtattgaagagccccaagtgaaggaaagggttggaatttgctgaaaaaatttaaaaatgaatttacaaattaggcactttttggaattttttaaaatatattttgattcatttcgaattttttaatttctaaaatttcaaaactcttaaatgattttttcttcttcgacttcaaagggttggaatttgctgaaaaattaaaaatgaatcgacaaattagggactttttgaaattttttaaaatatattttaattcatttcgaattttttaatttctaaaatttcaaaactcttaaatgattttttcttcttcgacttcaaagggttggaatttgctgaaaaattaaaaatgaatcgacaaattagggactttttgaaatttttaaaatatattttaattcatttcgaattttctaaaattcttaaaaatcaaacataattgattttatttcttcgacttcaatttgtttttactttaagcctgaagctgtcaaatcaaaacgccaaagttggtccaaaaaatttgaaaatgcactgaacgccggggacaccgttgtaatcagaggcaaaatggggaggccagaaatgggcgacaaacaactgagtctgtccttctatcttatgcacaattcgcccgaatttaatcgttacggtaggcattttctaccgtttcccaattccttattactgtatgccttttttcctttatttttctctctcattgtcagtgtccaaagttgcctggtttttgttccaaaaggatggcaattttacgatgggccattataattttgcggtatgaaatgttttattattttaaatatatttgattgagccgttattacaagagctagtaaaatcaaaattatggacatcgcaaaagaattcaatttgcaattaaattttagtgtcgcgagcaatcgaaattttgaaaaaactttttttattactcaaaatacataaatattaaaaagataaaatctagaaaaagaatcccagaaaaagagttttattactcattggtacaagggatggcattctgaggccccaaaaaattttcggaaacagattttgttaaagaaatgactaatttaacgaatttgagcaatttttaagaaaattatgaatttagggcaaaattattgatttttagggtccggcagagctgataggcgccgccgggaaaaattgaaattcaggcaatttattaacagaatttgttcaaaaattcaagtttttttgaaaaaaactcaaaaaatttccgaaaatatccgactttttatcaaaaatttcgggaatcggaattccgtgcctcaatttaatttcccaatgcataaaatacagttttactgctggcgagatttgttttaatttgatttctttcaaggaaaaattccaattcggatcacagcccaacatgagtttgtttaatccaaacgaaccgttcgaaatgcgaattgaaacggtacaggaggagggtgaaggtaaggcaaagcaaaggattcgaaaaatcggcataaatccacaattattagccaattttagtccaaattataatcatttatatgttgaaattttggataaaactgataaacaacataaaatgatgaagcaaaatcacattttaatgttctggattttgacaccaaaaatatgctttatccgaattatgtttaattgaaataagtaattttctaaattccttttcattttacccgattgaattaagcgatttttcgaatacaatgcaaatttagtttttcttttttttgagcggatttcatctcacattgaatttattgtctttggcagagtttgggcagctcaacatcactattagcactccaaatggaattcgtcaaacaatctatcgcctcgtgtcaatgacctttcgggacattaactttattaatgtcaattattcctactaattatgactaattaattaaattaattatttttcctttttcagattgtcggttctcttgaactatttgaggccccgtttgttgttgccccagaggtagaaaattcatttgattttgagaatttttcaaaatttaatgtttaggatggaataaagcgcaaacagaacggttggcccgtgttccctttgctcgttgccggcgattcgcttacgcttgagggcaaattgcgtgatgacgctaaatttttgaacattgaactgctccacgactcgcccgtgtcaaacccatactgtacaactaattcattcattaattattaattaatggatctttaaatgtgattaatgcatatgaaatggtctttgaatgtttagttgggaatgtggtgttgcaaatcgttttcaatcttgaacaaggccaaatgtttcttaacacattcaccagcaaggtcctttttaggattaaattaatttggtacttatgtactttaatgaccataaaaaaattatttttcaaatctttataaaaaaaagatttctagggatttcaggatcggtgatcacgaatctgacatccatttagaccaaattcgaacccctaacccgtattcaaattatattcacgctataaaatgtttttgaaaccttgaattttcgaatttga

SEQ ID NO: 3624 - DNA, 4693 bp, Heterodera glycines
tgccattttcaccaccgatttggacggcaacgtcgctattcatttttcttatgtaaatttgaagggtgccggatcgttacttcaaaaaacatcaaaataagaatttttgaccaaaaattattcaaaactttgcccaaaatgaatcaaattttaaaaccttatattattcgagaggccataagtgtttcctattgttctgaaaatttcaaaaaagttatgacctgagaaattcaaaaaagcaaaagttttcttgaacatttttgtcataactttctttaaatttaaccaaacttttgaatagaaaacacttagtgctatcgaatggtatcaaatataaaaaatttggttgcttttgtgcaaatttagatgaaaaattattttattttgatggtttttgagtaaccttatagcaccatttgaagaacaattcatttcaaccttataaattagtcaattaacaaatttttaaagaatgaagaagtcgaagagcatcatttgaaatcggcgctgaccgaaggacaaaatttccatctgaaaatcataatgcgaagacggcccatgttccatttggagggcttcggcaaattcatgttcggcatcgaaacaatgcccatgtgggcaatccaatacattcgggtggatgaaaatttgaaattttcgaaaaaaattgaaaataatttaagatcgaaggcgatttgaaactgcacgaacagccacgcattgaattcttcgaaaagaaaggacatcacaaatgaacagagagagaatggaatgattgggcataatgacggcacttttatatatgcgcaccatttttgattaaattttcattcgattttttgaaattttcaaggaaatttttagaaataattggcaaaactgcaagatatttgtataaaacagggctatgatcgtaccaactcactttccaagtgcataacgggggaaatgtgtgaaatccaagtacatataaaattttatcaacatgcaattaaaaaacaagtccagacatttgcgcctatgtccaaaatcgggttaaaacttaccttttttcaatcttatatgtctttaaacagcgttaaatttaagaaaacttatttggtttattagggtcaaaaattattttgcttaaaagatattattattttttcaaaatttgctaatgatcaaattattgcacacaatcactttcaatcgcttatttaaagctgtttacatctgggattgaaaaaatgtaagtttaaacccgcttttggacatggtgcaaatgttgggtaaccttaacaacggtgattttttttttacacaaatggtttatatttttccgcggaaagaattttttgcaaaaattttttttatttccttcagatagagaaggagaagcttccccgagaggaaggaagattaatggatcaattgaggcgacaattgatcggatatgatcgagcaaattgaaaccgaccaaaatttttacctcaaaagtttccccagctcgtccattttttattttcatatgtaaaaataccggtttccaggtacaatttggaaataagtacagttaacatttcccaaccatgtcgaatccgagataattttctctgctaattatttgaaaaaatgtcaaatattgtgtaaaaataagtgtcaaaattattttaggggctaaaatttaaaaatacggatttttaggttcgaacatctaaaataggaattctagggtcgaataggcgcttgaaaaggaagcattttcgcgctacaaatatgtttttcgtgcttttctcattgacttaaagacgcggaaaaataagtaaaagtctaaaaatgaatccgctcccaaacagatgataataatccaattttcattgtctttcagatcaattttgcgccactgctgatgggttggcccataaagataaagtcatccgttccctggtcattactcattacatttctttttttatggaaaaataattctgtgaatgttttttttgtcccactgctgattgatgataatgaataatcaaaattcattttttattgaacataagcattaccattttcataaaataataaatgaattaaattaaataaataataattctgccttaatcccttatataccgtgccgtaatcattcatttccccctttctcggcgggctgtcctcctcgtcttccgccgtgttgttgttctcctcttcctcctccgtttcgccatgtccttcttcatcctgactgtccgtggaggcgctgtgcgcggagggcgcggggcgttcattttcattggtgctcttgcagtggcagccgtcctgcagggggcaaatgctgaccagcaggctgccgacagcatacaaattaatgtaggtatattcaaaaatctaattctgtttttattgtattttttgcttttttcaaccactttttacttttatttttttgcctttcatactaggggtgggacggcggcgttttttccgcggttcgcgaccgcggcaatttgaatccgcgactgtgggattttttttttttgcgcggcgtgccgcggatattctgtgacaaatttttgtttgaagcgattgtcttttttgaatattcaaaataaaatacatttttttttgaaaatttggattatttttcacaaaaaattcgtttcaaaattccaatttttcccctccagagctgacaaaacctttaatttttctttaaattttttgattttttggcacaaaattttattttttttcacttttgtaaaatttttccatctttacttaccagtttaaaagtgcctttttctttaggttataaagcatattaaagagggagcccggaaatgcatagagcatcaccgaacgacaacaaccaccacaacgccgccgcaagccgagggcgagttttggcactttttagcaactataaatatcatcccaaattattacttttgcaatttttatggcattgattacttttgacatttttttgttgtcatcatttttttcaatgaaaaaacctttttctggaaattaaattaaatcaaaagaataatttaattcaatgaattaattaatattttttcaattaatatgcattgatttgcggatataagatgtttcttgttgttattagtgcatttttttctttcacattgttcgtgctatttattatcttggagacataagtgccacaatttcaattaggattgagctcgggctccaggctctccgccctattgtgcctctccccgatccccgaatctggcctctcaaacgtcctgagatttcttccccgaggggtcggggcttaaccccaattttaagcaaattcatcaaatgggccgttttttgcggtcctttggcacataaattggaatcaagagtaaattactcaattacgaaccttgtttaaagattaactcatttttccttgatttattttgttacattgcttacacatgcaaatgattgattattctatggcatttttccactttccttaggtaccacgacccggaaaatgagccgtgcgggacgaaagcgattggatttgatgcggaagcaatcgaacgattggaggcggaacagctgaaggaggcgctaatggccgaagcggaacaatttgggaacaaagacaacaaacaaaacgccaatcagatggaaatttgaatggaaattgaataaaatattttagcaacagaaatatttggtaaaaaggaagaaataggctttggcttctttgaaaaatcagaagaaatggatattaaaattaactttgataacaaacaacccgaattattaatattagcatttataaataacttttatgggttaaataattcctatttatttttatcctaatttcttctttgagcaattagtgaaattaatctcattaaacaataatatttaaaaaggaatagccgatcagaaaccaagtcaaaatggcaaaagtaaggttagaattgaagacaatgtgaccaaaaatgggacagcgaaaccgccgatggccaacggaattgccgcgggaatctgaaatttttggcataaatttaaagaaattcacagcaataaaaagttcacacttttgataaattggcataatgttcgacaatcatttaataatttgggtttttaatatatcttctaatattttgaaaaagtctgcatctgtattttttttactacataggttcaatgtcagcaaaacgaaaatttagaattaaatgtgccacaaatcacaaaatgcttattgctaaaaaactgctcaaattgatcatggacaatcaaaaatataacatttgaacaatttaagagtgttttgaatgaattttgtaaaaatgcggctttttgacctaaaatgaggcttttgaaaattttaatctgggagccctgattaaaatgcttaacgattgaaaaatcccgggtcatatttcagcattttaatttgttatctcgggagtttggacccgagcggagcaaattgggcttatggcatgagtcctgaaattcaattccaagtgccgaaccaccaggaagtaagtaatcactaaattgtcaatttcaaaagaaaagtgaaaatttaaaatggagttggaatgggacggagtcgctatttaaaaaccatcaatatgaaaattttttcatgaacaatatttattattttggtaaaaccaaccaaatttttaattcttgatgttat

SEQ ID NO: 3625 - DNA, 6658 bp, Heterodera glycines
ctatgtattagcatgtaaaatttaaaaaaatttcgttatgttttaaaaaagttacgacgaaaataaatgttgttgatttggtcatattttgcaattacttcattcactatgttatgtgttacagtatcaatttttcttggtacaataacactttttcgtactatagatatgttagcgcatggtaacgcttttcacctaccataaataagtaatggttaagcaagaacggttaattttcttgcacccaaagatggtgatgtttaggctattagcagggattaaaaaaactcagatcggaccccaattttagacttaggcgcaaatgtccgagactcaaagatccggggcgcaaatgtccgggacttaagagattgcaattccaaccctgtaatacagaaaaaaaaactttttttttgcggaaaatctttaaaatttagcaggaatatgtaaatttgaagcttggctgggcaaaaaaaaaaggtgatggacgacccctcttccccccccccctaaacacagcgatgactcatgccatcattatattataatatttttcatcgctcgccgcgcccattcattcatttgcattgctttctttctttctttctctccgccgtgccctgctgctcttctcgtcgcccttttggcgacaactacaaaacttagtacaaacaacacacacacccatttattattattatagtatacaaattgtactaatattattaatggcactcatcagtcagtcatggcacgcaaagtgccgaaagttaatgactcatttttgggattagataatagaaaaaaaaaggattttttaacccaatttttcaaggtgtccttggatttttaaagttttaaattaaatttcaagatgtcgttgaattttttaaagcttaaataaaattttcaagatgtccttggattttttaaattaaagtctgaagatgtccttgggttttttaaattaaatttccatgatgtccttggatttttaaataattgtttgcctttcgattaatgcttttcaatatgtccttggatgttttaatgtttcaaatcaaaatttcagatatcctttttcaagaagtccttagatttttaaaattttaaatgaagttttcaagatgtacttagatttttaaaattttaaatgaagttttcaagatgtacttagatttttaaaattttaaatgaagttttcaagatgtacttagatttttaaaattttaaatgaagttttcaagatgtacttagattttttaattttaaatgaagttttcaagatgtttttgaatgttttaaattaacttttcaagatgcctttgggtttttgaggtttttgaatgatttttttggctctcggttttaccgcatttcttccaactttattttaattgacaccaatatcaatatcaactgctaattactgttccttttttgcttttaattgcgcaatgagtaattttaaatggcataaaatcccttaatgtgaatatttttatggcacgccattttgtgtgccacggcatgacgcattcatttttgtgtgcgtatgttgagggcgtttttggacacggttccgcccctcccacccccgaggccactttaaatatatgctaattactttcgcttgcttacctattaagaattcccattgtagcggagcaacaggtgctcttaaaaaagaaaagatttcttagaattaaaatttgcatgtgaaaatcattttaattttaaattaggcgccctccctcgggcaaatggcgcaaatgaatgaaacaaaatttaaaaatgaaacaatatttaaatggattatttctaattttggcactgaaggccccagattttttgaatatttgtcagataaaattttaaattaaatttttaataacaaagaataaaaagcaattagactaaactatgagtcacaacatttttcccatttatttgctctccccaatataaaattgccatctgtaattttttttttgcattttgccaaacatttaaacatttttacccaccgacggaattgataatggatgaatgactcacacatggctcgtgctatgtgccatcaacagcaaatttgtgtgactcaattattgtgagaaatgtgtactaatgccaatgccctttggctaaggtgccgccgcctcctctcccacgcgtcgcccgccaatttgccaagtgcaaatttttgccaacacaaaattagttgggactgtggcattccaaaaaatccaaaaaaccgcaagaaaaacttattttaatagtagtaaaaccctggcgcttctttggcccaacaaacttttggcaattatttttgggctttcataatttgcccgtgcaaatagggaatcatgtttttttggcacaatcctggcaatttcggcacaacttggcaatttgggcacaacgttcggcacacccattgtgcctagcccataaatttgttgaaaattttgcataatttttttagcatatttcatgataattccaaaaattttccggacggcgcctatcggcaccgcctggaaccccattgttaattgaaattttagcgcccaaaatggcaaaaatttgtcttttttggcgcaaaactgcgacaaattcctgtttttcgcctcgacacccaaaatttttttaaataaaaccgggaaaaaaaatttgactcgaagagcagaaaaaaactcttcgggtgccctcaccgaattttttctttctggatacgggcctgcgttctgtcttaattagtctcgactcaaactatcaaattcacacccctgagatacattaaatatcctcaaaattttttcggtgccatcactttggcccacccccgaaattatgatgcccaccagctgtgccaataatgtaaaacgcatcactttttcgccaatgacataggtctgctggccgggcattcgtcacccttcccccgcccaccgcccaaaatcgatgcatatgccatgccactcagtccctccccctaacaaatccttagtcacatgtgtcttcggtcccatcccccgcccccggggggacgtcgagagtgagtttggttggtgccatgcctttctcagtccaaggagtactactactgctggcctcctgccccgcccattgcgcccccttttcattttgccaaagtatgtgccgtgccattccctcccgcccatccgccgcttccccctatccgcgccatttaatccttttgcttcccctaaacgccgctttaagcatccatcccatcatttttgttttatagccgcttcttctgccgggtagaaagtggcattggcatcttttttttgcaaattataatcccgggaaagcatttgaatccccggcacagcttatgatgggtgagtgctttgcacacaaactacataaatattttagaaaaagcgctttatgtgagggatggaagcataatgccaaaaaaaaatggaattcatcgccctatttggtacggtaaatcttcttacaaaaatggtgccctttcccccagggtacggtaaatctgctcaacaaggatttgatgattaggcctggaaaattcatgtaaatacatattttttcctggattctccatgctctaaatagtaggaaaacatttcaaaaatctaaaatttcgaaaaatttttgtacatatttgaggttttgagaatttatgaaaaattaaaagaattttttttttttagaaaaatggacccattaaaaacaattttttcaaaaaaaggaaataaatttttaaaatacctaaaatattattataagcataaaaaggtcagtttatggcattttatgcatatttgcgcttttctgagaagtttttatcgaaaaaatcattggtacatatttggggctttttgtacaatattttaaatatttcggcatttctttttttacattttttatgaatttccctattgatgacaccttcgacaatgttgttacccgtcattatcatttaaattttccctcattttcgctaatctctgacatctttttcactttttaatttggtttttaaaaatttaaatctttttttgatcatttagaatttatagctaaaaatgttccaaatccaacaagcgctgccgccagtgccggcgaccacaacggtggcgacgaccaccagcgtgccggcgccgtcgcagaagccgccgcatcgcgctcgtcccaccacgctcgcggtgcctttgttgcaccacaacagtcaacagcagcagcaaccccaacgcggcacgcgtcgccgggccatggacatggacgatcagcggcagcaacgcgttgcgtatacgcttggcgcggcgggaggcgatggcgccaacaatggcacgcaatggccgacgtcgcgcaacagcaacaaagccggagaagaagaaaacacgccgtgccgccgggcgcgcctttgttcaccggtcgccaatggcacgacggatttgggtaggctgcttttggattttaccggatttgggtaggatggtttagattttttaaatgtctatcggttttgaaaccaaggggatacttactgtaataatgcatactgtatgtggctcgctgacttggcgtggaaagctaaatgttggagaaaaataatcgaaaattatttggcagttaggggatgtggatctcctgaacccgtatgctttgtcaggaagccatgctttggagagggggagtcattaaaattttaaatttaaaaaaaaattttgggagtgaggggagtggactcgaacccgtgtgctttaatggaaaccgccaaaaatgcctaaaatatcgcttgagaggggagaggggcaagccgagggggtgattcaagtcgctaaaagttaaatttcgaaaatttttggatgagttaggtgaggggtcctcctgaacccgtgtgctttgccgaaaagctccccgccccccgcccaaaaaaatgcctaaaatatcgcttgggggcgacaaaaaatgtgactattgaataatgataaatttgtttggtggatggtgtggatgaatcatcatcatcatccatccatccgtccgtccgtcggtggtcgtcgtcgtcgtcatttcccaattcctcccccgcctcaaaaaccgcgtccgtcgccccattttcccatttttcatcgccggcgggcggacggacggcggcggcggcgtcgattttattttttatttttgaacaaaaacattcccaccaccaccacacataataatagcccatccacaagctgtatttatgtaccattcatatgtatgtatgtgtagcaaacagataataagccccaaaaatcaaatttattcattccaaaaatgtgtaagtcttcatgaaaaagtgtaaaaattgatcactgatcgatcattgatgaacatttcaaattcgatcatcatcattcattcattcatgaatcatccttaatttcaattttgtgtaaccacacaactcgatcaaccctaaataactaaaccttgatcactctcctttttccttatgatcaaaagaaatgctgcttatgatcgatcacttaattttatggggcttactgaaaactgttaattaatccgcaggaagccgtgaccgccgctctccattccgtgaccggaaaatcggtcagtggaaaatgcgccagtgatgcaaatattttaaaataaaattctattgcattagtattgtaatatagaagtaaacttctataagaaaatcattctcaattgcgaaccccggacccaaactcgaacaaaaaatcgaaagtcaaaattttcgaaattagtgtttttcttcaaatcggtttaaatacacagaaacaaactgaaatacatcaatcctgcattaggagatcatttatgccgttttgaaccaaaatgctaaattcgaaaatttggactttcgagtttttgttcgaattcgggtctggggttcggatttggccgaaatggataccagattcgtggtaagtgcccccgaaaacgcaaggaacttgtatttatgacaataaaaatttcactgacgctttttccactgacgcattttccgggcgccgcttctgatcaattagcaaaaaattttccctaaaaagtccagcctaaacttattggcccatttaaaaagcaattaaaaatttttagaatttttattcatctccctttttgatagtaaaagcatcagagtgccttatttaacatgtaaataaaatttggtgcgttttagagcactttctgaaaaaatatttatgaattaattttgcaaaaaaataaattaaatagtgaaactttaaaaattcataaaaaattttaaattcagaattgagtgaaaaagttcatttaacttctttatttatcagttattttaagatataaggtagggttgctccccgaccctcgggggcaaaatgtcgggggtcgggtcgaggaataagcccaaaaatgtcggggagcaaccctaaatataagcattagagtaacaacagtggcatgaaataaattaggtgcgttagaaattaatttagcaaaaaataaataaaacatttcaattttaaactttttaaaattttgtttaaacccattcagtttttatatttctcagccttgaagaaaatgcttttaatttttcactttttccattaagaaaaagcttagcctaaatttgtct

SEQ ID NO: 3626 - DNA, 3412 bp, Heterodera glycines
ccccccccctgaaataaaccccccccctttttttgaggggattaaaaaacacattatagaatgcccgggggcatttgtctcaagtaatattgtattttcctcggagaataattacccaaaggtggcggatttacggatcaaacaaaaaaaatggctccattaaatcggaccatattttattttatttatttgtttttatttgttcctctcaatgccttttctccaccaattattaattgccttgtttatcattcattcaaagtcacattattcgcttcgctgctgctgctgctgctcattcaccgtccaaataataaatgttcgctgttttcgtgctgattcgactgcccctcacttaataacccatgtgatggattaattgagtgatcaatagcgcgacaaataattatgtacaaataataggatccataaaaattaatccgatcattcattccattattgattgatcagaaagatcacatgtaattaatccgattaattccattatcgattgatcagaaagatcactgtaattaatccgattaattccattatcgattgatcagaaagatcacatgtaattaatccgattaattccattatcgattgatcagaaagatcacatgtttccatggttagagtcccaccgggcggaaggcgagccgaacaattttccgattcttttttttaaaatttacttgcgactaattttaaatgccgagctttgacaccagattttgtgaaacttggccgattcaattaatgccttaatttaaaaatttttcattttctgaaatcttttttttcaaatttaaatttcgcgcacatagccaaatatatcccggcttaatccccccccctcgtgtttaattcgactccaattcttggaaacttaattctcaattatccctatccatcactatggctataattaatcccatatcatgctcacatcaccatccataattaattttcgcgcctttctccaattcattttttggcacaatttaaagcggcatagaacctaaaatgtcaattaaaagacggtagattaaacaatttctcccatccattagtccaattttggcattttccccatgcgtgccatatttatcgccacaaatcccttcccctcatttattcttcattacacacaactttccctaagtgccagattaggtaatgggggaggggagagtggtgggtttccatttttggtgtgccaatctggccgtattataataatccctcgtgtccaaagtgccgagaaaatatactttgtcatccccccaaacaagcaattagtcataagccatgccccattagtcatcataatgagtggtgtttgttgtcgtgcaaagcctctgaatacaattaaattttgttggcattttctacggtggttggttgtcatggcacggctctccctactcgtgccagaaaatttggttgtttacaaaagcgtaaaggttcacggtttctgacatttgttaggtcgaaattcttccgacgaaattcttttttatgcatcgaaatgccgaagttttcaaatttggcacggcacgaaatttgcatttttatcatcggaatttagttttttaccgtaactccaaaatttttgaatttttaacatttgttgggtcgaagttcttccggcaaaattctttttgatgcaccgaaattccaattttttaaatcggcatcgaaatgccgatttcacaaaatctccgaatgtttttttgggcatcggaatttccctttcgaaccgtaaccataattttagaatttttgactttcgttgggtcgaaattctgtccggcattctgtttctgttgccagaaattttctgaggaccctggggggggggggggggcatttttccgatttttgatttccaaaatgtttttgacgtttttcgtttttcttgcttctttctgctgctgctggttctcgagtttcgccactccgccgatgactgactgactgactgagaatgactcattctttcggcataaaaataataaatgacattttatcagtccgtctttcgtcatcggctcggctcggcacggagggacggaccaaagccattaggccataaaatgaataaataaatgaatgacgaatgaatgaatgaatttttaaattgaaatggccaaacggaaaatggaggggacgcaaagccacctgctgcttctgcttctgctggggctcggtttcttgtaaataattaattgatggcgccacttatgttgtgttttgaaacatttgaggaaagaaaagcatgggaaaaatccaattagcaaagaataaagggtacttatatgtgttatctgtgtacagattttcaaaaatattttatgtttttggctataacttttttctttggcatccaaatccaacattttgttggtatcattcgaaagctcttcagatgctctattagcctttcaaaaaacctaaaaattttctagcctggaaaaaattttactaagaaaaaacttctaatttcgactttttcgcaattttcatgtataacttttttggtaattgtctaatcgcgaagcgatagcttcggaacatgttaagctttcgaatgataccaacaatgttggatttggatgccaaaaaaaaagttatagccaaaacataaacgtttttgaaatctgtacacagataacatataagtaccctaaattgtcctttcgacccctatagacaagaaatttagccatttttgaatagctcagaaaaaaaattttttgaactttttgggcatatatttttgaccgcccagattttgagcacacattttcaaataatcgtataggcggttgaaggcaaataaatttaaattattttggaagctcggggaaaggattaaatgtgtgaagaaaattttcgcttttgtaatttttattatttctacgacattttactcaaactaaattcaaataagacagttgtccttcggcggcccattgtcagcaaaaaagaagaaggaaaggaaaaatgaggacgaaaatgcacgtggtgagaagaagtgttaccgaaatgggacagaaaatgccttaattaaactaaaatgttaattaggtaattaaggttgtccttggaccgaagaaagtggggaaggtaaacctttgagataaaattacaaattgttctctcgaatagcgtttatttttcactatttcattgacatttaaaaaagattttttcttcagacttcacttttgaaaagtctgatcaatcagcacgacccaaagccaagcacttcctcgtccgatggccaagtgacttaacttttccttctctaatccgtccctttgtcgcgttaagtgaatttttcaaaaattcaatctcaatgccaacccccattcccaaagcctccaaattggagggagggggt

SEQ ID NO: 3627 - DNA, 947 bp, Heterodera glycines
ttttccttagatagagaggcaaatcctagtcgaaaaacggctaggaatcgaacaaatggatttttctgttgacaatcattatttttgtaatttggcggcaattttaccccggcgaaattttgtcccggcgaaattttggggtgcacccccagtggtgccaatagtcgtcgttgaaaatttaattaagattttacgcgatgggaggggatggatgaattcatttttttgtaggaagatgttgtgcagaagaaaggtggtgacgaaatgggatgggagaagatgttttccttagatagagaggcaaatcctagtcgaaaaacggctaggaagcgaacaaatggatttttctgttgacaatcattatttttgtaatttggctgcaattttaccccggcgaaatttttttgtttgtgattttgtgttagttagttgttagttttatgcaatcggcagtttccctattgattttgttttcgccttattaatttgaaattaaaattgtcttcggcattgggctgtgttgctttgggctgttgtctttgctgtgtgcaacaacaacattattaaaagctcctgacaacaatcctatttgttttttacgactctgtgctcataatttttattcctccattttttttgagaaaatgtgacggaatggacactaataagaaaaggaatgaaagtgatggaccaggaaaaaataggcaaaatgagcgaaaactgttcatcaagcagtagcagcaccaacagcaacttaattgatcatattaacagcaacttgaatgatcaatcgtcaaaattcttaatttttcccccggcggcgcctgtcggcaccgccggaccataaaaatttgctcaaaatcacaaaatttggtcatttttgtggacaaatctgttaacaaatcgcattaaaaattacaaaatttttccggtgctgggacgttagt

SEQ ID NO: 3628 - DNA, 7042 bp, Heterodera glycines
  unsure (1)..(7042): unsure at all n locations
cgaatgatgaaaaattagaaaagattaaacagtattttgaaataaaagaaagaaacccaaaaatgggtgacgaaataattgccaagaaattggggattggatgggcaactctgaatagatggaaaaaggaacgttctcacccacttgattagtgattttcgatgaaaatgacattttccccttttcccatgcaacaatgtttctttttttaaatttgttgcggattttttggacgtattagtgtagcaaaaccatcaaattttaagttttattatatgccaaaataaaattaattttttatgaataaatttttttctaaagttcttacaaaatcaaaatttttcgattttanatggtgaaattatccactttttcatatttttcgtataaaaaattacagtttcacaagtggccaatcaaccttaagagctatcaaatgaacaaaaattttttagtttggttgataatgacataatttataacaaacggcgccgaactatgcgatttccgcaacaacagctgaacaaaagttttaaattatgattattatttttgtttagaagtaaaacaaacccactttaattaattaacttttttcattggccacattaaatattttttaagtcttaatttaattgtaattaagagaaaaacaaaatcaccagggagggaagaattatataagtattttacattcaaaatcttaaaggttttattaacattgggataaaaaaatttataacactgattcttagcaaagaatacaatatgaaaattatttaaatatattaaacttttataagaaaaaataaataaataaattatttacaatttttcaataaactaaaaaacttatttctaaactttagtttttttcttagcggcaactaaaatagcaattaataattcaaacaatttttaaacgatcgatcatttcagcagaagagaattccattttgttgcttaaatcaaaaatttaaatttattttacttttgttattatttacatttttcatcgcaaatttgctgatccaattattaagtgttcggtgactaatattaaattgctcagcaaaggaatttttagaaagatgaggattcagctttatcattttgaaatattttttgacaatttttattttctctgaatcgtcatgacaatgattgctatctgaaaaaataatttttcaaaataactgaaaaaaccaattttttaataatttatttttaccaattaatctgagtaagaaatgtgattatattgaatttctttaaaaaagtctcaatttatatattttatttcttaaaaatcacttttacaaaaatttcaaattgaaaaaataataaaaactaatgcagcaagaaataaaaatattacttttaataaaaagagaaacaaaattttcaacgaaataaaattgtattgggtaaatatgtcatcaaaaaaataattattttaaatggcagaataaaaattgacctacaaaattttaaattttcacttgaaaaattaacttttcgaaaattaaaaaaccaaaaaataaaaaaatagtcagaaattttatgaaaattcttattgaatttacttgtcatgccaaagtcctttttccattggcatatcactgaacggctgacccccaattccttagcaatttgttggtccatttcataagccgtttttgcgatggatttgcctttcatttggcttttcatttggtcaaattgctgtacaatttcgaatttttgttctttagaatatcttttgattttagtttcttaaaacaatgatattaataaagcgtaaatatgtcttaatctatttaaatttattctattacaatttacttgcattaattccaaactttttcttccaatcataaactgttcgctcatgaatgccaaaagtgttggcaatttttttctctaacattttcgttggcattttttcattttccaaatgttcttttaagttgaaaaattgtttcgtaattctcttcttttcgtggtcagacaattttttagctgaaatttaagcatttaaaatttaaaaaaaacataaattttagtgatgatttcccaaaataaaaaaaaatacaattttcaattgattttaaatttttttttatgttaatataaaaattttgaaaaattaaatttaaatagattccttttacagagaaggaggagaaggattcaaagttaagtatatttaaattatgtacttttggttgcttttgcctgagccaaacgcactttctcttccgtggagctcattcctcggaacaatttggctaaaaggtttttttagacgaaagaaccccgaaaataaggatattttccaaaagtagattattttaagaataatcgctaaatattgagcaaatttttcataaaaaaaggaaattacctcaatttcatataatactcaactgattttacttaaaaattaatgtatttcttccatcctctcactcaaattcaagctccattcttaccattttttgggccatcttttttggtgaaaatccctcttaatctcttttttgttaaatgcactctgttttcttgttcactatctgtcaacgaggaatctgttaaagaaaaatttcataatcataatttctcaatatgaaaaatcgacttaccctcattaggaacattattgatatcagcatcatcttcgctgttatcataaccagaccgaacaaaaaggaacttcaagttcggctcctcctggcggcggttgatattacaacccaatttattagtccgccacggcaatattgtgttgtcgaaaaacactcagatttagagttgaataaaaggggaggaagtaggtgcgaaacatgagaaacatgtatggcactgaaaagccgagccaaaaggccaagtggactacaccccagaccgaacacccacatataagcgctgtcttccctccctccctcgttcattctgtcatttattcctcccattgcaattcccttcgccttgaccattttattattatatttgtgcttcaaataaatatttgttttattcatatctgttgttctcggacacaacagattttggcgcagtcagcagagcaaaggcgaactgaagtgaagctgagcaaaagcatcaacaaatttgatttgctaattccgagacggaatagcaatttccaaaatcgtcgaaaaggagagaaagctaattccgagttggaatagttgttcacccaggtggtggcactctcaattactggtgttaatccgggaaggataacaattgcaatcacttatcgaggccaaacagagcaagaggaaaatttgttggaaagcaaggctgaaagctgagtggcattgttaatccgattggataacattgcctcatcgattttgattgttaatccgggacggataacaatttactctcactgttaattcgagttgaatagcagttgagcagcaccaattttcattgttaatccggtacggataacaattgaatcactgtaaatccaagtcggattacagttgatcagcatcttgaatttgatccgagtgggacaaattaagaaaagtccaactatggcagcggtaataaaggctggaaaaggccccggaccgtttttgccagagatgtgctgggcgacatggtgggaacgtttcgaattcttcatccagcttaaaggcgtgaccgatgtcgcaacaaagcgtctgctcctgttcatcgaaatgggacaggtgtacgaagagcttcggcgaatggcacagcctgaggatgtccgaaccatggaccttgccgaaattgaacaactgatggtggaacgatttggcgaagcaaaatcgattgccgcgtcaggcatgaattgttttcagccaagcagcagacagggcaatcgataagggactattcggtgctattgcgaagtttgatagcaaaggcagaatggagccgcgacagcattgacatgtgtctatgcgcattgtttatcaatggcatctctaatgatgcaattcgggttgaattgatcaaaaagggcgaaggacctaaaattcaaggacgcagtcgaatcagccgttttgttggagcagtcaatttggatgcccaagcaattggctcaaattcaatgccggaggtcgcaaaagttggcactcagcaaagaggaccaagaacgccgacgaaaagcacgagaggttgttttcggtgcggaaaaccggggcattttgcaaatgtgtgcccgaatcagaattcgacatgcagaaaatgcgggaaaattgggcattgggctgttggttgcaaaatcaaaaacagagacggaaatgcgaattttggtcaacaatttgatcaaaagccaaagaccaacggacgaccaatcaagaagattgaatgttcaaatgtcagcgtcattcacgaaatcaagggaatttctgccgatcctggtttcattcaactcaacattcacaatggaaagttggagtttgagttggacagcggtgcggacgtcacagtgattgacgagatcgactggaaacacattggaagtcaaaattggaaccatcccaaggattggttgcctatggcgggaaatccattgcgggcattttaggaaaggcaaaagtgaaactgacgcacgaaggaagaacgattgagtccaatattcatgtcataagtggtaagcacaaaaatttgtgcggccgcgatttgatcatgggactgaaaatcgatctgaaccgagctttcggaattccgacaattcgtgccgttgaaaacaaaaaggaattggaagcatgtttggcccatgaagttgaaaaagttttggaccaatggcaggcggagaaaatcatcgagccagtggcaaccagtgaatgggccactccgctggtcattatgccaaaggcaaatggcaagctgcggttgtgctttgactataaagtcacggtaaatccttggttggatgtacaccaataccctctcccacgccccgaggagctattcagtatcttgaatggtggcgaaaaatttacgaaaatcgatttgaaagatgcatatctgcaacttatgcttgacgaaaaagccaaaaattgtcttacaatttgcacgcacaaaggaacttcgctcgattgccattcggagttgcttcggcacccgcaatttttcagcaagtaatggaagaagttctgcagggcattgatggcgtggcagtttatctggatgatattctgatcacagcagccactgatcagcaacacgtcaaaagaatcgaccaggttcttaaacggctgtctgagaaaggacttcgagtcaagcgtgaaaaatgtgaatttctcaaatcagagatcgaatatttgggacacattgtggacaaaaatggtttacatgcgtcacctggcaaaattgaggcaattttgaaaatgccggagccgaaaaatctaaagaattgcagtcatttctgggaatggtgaactactatggaaaatttgtgccatccctggcaacgctttcagaaccgctcaatgaattgaggcgaaatgatgccaaatggacatggacaaaaagccaacaaaaggcattcgataggatcaaaaatttttcacaaagatgaaaaaagaaaagttggtgtgattgcgtatgcctcccgaacgctaaattcttcggagcgcaattactcgcagattgaaaaagaagcgagggcaatcattttcggagtcgacaaattcaagcagtacttgtacggtcgaaagttcgtacttcaaaccgaccacgagccactaaaagagatttttgggccaaaaggagagctcccgattgtggcggcaaaacgacttcatcgatggtcactgacattgatgaacttcgactttgaagttgtgtactgctctacaaagaatttggcaatgcagacggtctgtcgcgattgccgtgtccggaagagacaaccatcgactgtgttggactcgaagttcagcaagttcaggccgaaaatatttcatgcttgccggtcacagtcagtgccatcgcaaagaagtcaaaaaggatgaaattcttcgaaaagtgaaagaattcatcgaaaaaggatggccacaaaaagtggaagaaggactaaaaagttttcggtgctaggtcgatccacaaaaaagctcagtgtgggcgttccacaaaaagctcagtgtgggcgttccacaaaaaaagctcagtgtgggcgttccacaaaaagctcagtgtgggcgttccacaaaaaatgctcagtgtgggcgttccacaaaaagctcagtgattgataaaataaaataataaatttaaaataataaatttaattattgtattggtaacatccacgttgaaatcaataaccatcaatacatataattttgggctaccactgaaaatgtaaaattaatacaataaatttttatatgtttaataaaattataatttagaaaatgaataagacttttatttttatttttttgttatttcgatttgagtattcgacctctaccaattccggttttgaagaatttataaaaaatcacaaagctatagaacttgtcaaaagctatcaaaataaagaaattaaaacattaaaaaaactccatgaacaaatgcaactaaaaggtattgacttaagtttttgtaccttaagacgctacgtgtcaagactaactattgtttctgcgcatacaaataaaaatgatgcttcaaactcgaatgcttcaagccatgaaatgccaaaacatgaacttagatttgaaaagtgcttttcaaaaactttaagaaaaaatgtttttataattggaaatgaatctgcttggagaaaatatttattcaaaattgatttccaaaatggcgaaacattataccttattgataaagtgataattttctttgactcctttttaatatttaacaaattataaattcccgaaatagaaaattaactgataacaaaaaactttatctcaattttattgtcttgctgaaggactaacaagaactaaaaataaacccattgaaattttttaatttatcttttttcacagcaaaaatataaaaa

SEQ ID NO: 3629 - DNA, 4505 bp, Heterodera glycines
atgataccctttctctgctgctgatgtccatttatttctctttatgtccatttttggccctttttcttcaccaatgcgacgaatcagcgcctttctgacaattgtctcgatcaatctttctttataactccccttctactaggtttgcctggagccgtacctgcgaatgtttttcacaattcgaccaagtacctgaatttgccaggacaacaatcgaaaatgcacaatgagaaaacaagaggtgttacctgggatcagaaattttacacaaatatgaaaaaagagaagatgtagtgcttgcttatgcctccagaacgctaaaatcttcagagtgcaataactcgcagattgaaacacaagagaaggcaatgattttcggagtcgacaaattcaagcagtacttgtactgtcgaaagctcgtacatcataccgaccacgagccactaaaaaagatttttgggccaaaaggagagctcccgattgtggcggcaaaacgacttcatcgatggtcactgacattgatgaacttcgactttgaagttgtgtactgctctacaaagaatttggcaatgcagacggtctgtcgcgattgccgtgtccggaagagacaaccatcgactgtgttggactggaagttcagcaagttcaggccgaaaatatttcatgcttgccggtcacagtcagtcccatcgcaaaagaagtcaaaaaggatgaaattcttcgaaaagtgaaagaattcatcgaaaaaggatggccacaaaaagtcgaagaaggactaaagagttttcatgtcatccgaaatgagttcgccttaatggaagggtgcatcatgtttggaaatcggacaattattccgtcaaaatttcgcacaaaaatgttggaaattttgcacgcgacccacccggggatggtccgaatgaaggccctggcacgtcagaagatgtggtggccaggaatcgacaatgaaatcgaaataatccgaaaaagatgcaaaatttgccaagaagaggcgccggatgagcggaaagtgccattgcatccgtgggaatcaccagaaagactgtggcaacgaatacacatcgatttctgcggaccattttggggatcaatgtgctgatcagcatgtatgccaaaagtaaatggcctgaagtggtcagaatgcgaacaacaacggcattggccacgaatgaggcgctaaggattgtcttcacagcgcatggacttcccgagcaaattgtatccgataacggaccgcaatttagttcaaaagcattcggtgattattgccaatcacggggaattgttcacacattgatcgcgccatataatccaaaatcgaatggagccgctgagagatttgttcaaactttcaagcagggaatgaacaagctccaaaaggaggggatgaagcaagaaattgcattgtctcaatttctcctgaaataccgtgtcacaccgcacgcagcaacggaattggcgccttcggaaatcctcttcggccgcaggcttcgaactttgttggattttgtaaaaccaaccgcggtgaatgattttgaagaggccaaagtgccaaaagagtcatatgcggaacgaatgaaaaggaatttcgatcgcggggccaattcaagaaaaaatttcgaggtaaaccaacgagtttacgcgagaaattatccggacggatcaaaatggatcccaggacaaatcacccgaaaaattggaacggctatgttcctcgttcggacggcgagaggaatgtggaaaagacatttcgatcagttaaaagagaatttgactgatcagaattcggacaattcgagttcagaaagtgaggacaattcggactcagaggatgaagtgccgatcgatctgatggacgacgaacatctgccagcaccgccggaggaacagcatcaactggagcagccagaacagcaggctaatgctgaacctcgtcgttcaacgcggaagcgcaagaagccgaagatcttcgatccctcggactgatcacggcttcaagaaggagggacgaatgtggtgtagtgaccaatcaataagtggagtgaactttgttcactcctttcccttaggaacatttcatccccacatataagcgctgtcttccctccctccctcgttcattctggcatttattcctcccattgcaattcccttcgccttgaccattttattattatatttgtgcttcaaataaatatttgttttattcatatctgttgttctcggacacaacagattttggcgcagtcagcagagcaaaggcgaactgaagtgaagctgagcaaaagcatcaacaaatttgatttgctaattccgagacggaatagcaatttccaaaatcgtcgaaaaggagagaaagctaattccgagttggaatagttgttcacccaggtggtggcactctcaattactggtgttaatccgggaaggataacaattgcaatcacttatcgaggccaaacagagcaagaggaaaatttgttgaaaagcaaggctgaaagctgagtggcattgttaatccgattggataacatgcctcatcgattttgatgttaatccgggacggataacaatttactctcactgttaattcgagttgaatagcaatttgtgcttcaaataaatatttgttttattcatatctattgttctcggacacaacacatttcatttaaaaatcagttaaatattgatatatttatccaagcatatgaattaatatgatcaatagaataaaaatatttcattcaataagtaaccgcccaagaaatcactcacaatccaaaaataatagagaaggcttatatatattggaatttgcttctaggctttattcatttagacatacatacatttagcagtttgccaataatttttgaattctaaataaatctaataaaaaatagaaattcatttacattttttagcaattttaaaaatttcattaatggagaaattggcaccgcaaaattattgtctagccgattcaacagcatcatctttggcaaaagctgcccaaatggaattggacttcatccaaagcgttttgttgggcccacagcgaggaaatttgacggcaattgaatgtttattggcacaaaactttagcaaacattcatcaatgatgcctaattatgggacggaaagtaaaaatgcaaaagtaccaaaattagaaatggaaaaggctggtggtggtgatgaagccaaattggacaatggaagcgagaccgatcaaagtgatcagaagcaaaagagaaaaggggtgggacgaccgaaaaggcatccgagtgaatgcaaagtgtgcgggaggaagagcctttactgttattacagtgtccgatgttgtgaaagtgagtgatggaaaaagaaataaataacgaaatcccgataatcatgtgggatccccaaaaaaagccacgtgatagccgggatcgggaaatgcctggactccgtctcgggatccctcccgatggttttccaaaatctttgggattgatcggaatttggtcgggaacccgactcgggatccctccgacaccagtggccggtctctagtgtgaacaggagttcggcggaagtacagcactttttgccaaaagaaaactgaaaatgtaaacatttttcaatggaccgaaaatggccatccctaatttgaaatgaaaattgttcagcagattctcttttaaattcattaatatataatatttacaaatttgtataaattaaggctgcaagcaattctttcgtcgtattgttgccaagcgaacattgttaaactgttttggagcgaaaaattgtcaaattggaaaaggttgataaagagataaaaaaactaattagcccaaaatattggaatatttatttaaaaagtattaatattttttcagatggcattcgatgccgcggctgtcgcctggacaaatgccttttggccggcatggacccgacaatgatcaatgcaatgcaacaggaaggaatggcccaatatttggacagattggaattgcgaaaaaggagtgctttgttgagaaagaattgcagagaagggaataatttgtttttgtgaccaaaattatgctaaaaattttttattttattgtattgagaatagaatatttttgtgattaggtctccaattatatgtaggaatccatatatgtttttatcctagactgtgaaagacaaaaaaaaacaacatatttttagcttggttgggagcttttaggatgaatatctatatccatatttttcatatttcgcattatgtccataatttatattttcatatattatgcccaaaagttggtgagatcgtgtcataaataagtcaaagagttgaaaaattcgctttttagcttctttttttttaataaaaatctttaaatttaacctttattattatttttcttaaaaatgaataccatatttagccatttttgaaagaaagactttatatttagcgattctaaagatattttcaaaattta

SEQ ID NO: 3630 - DNA, 3735 bp, Heterodera glycines
  unsure (1)..(3735): unsure at all n locations
ttattgtttattatatgattttaattaaaaatattaacaaatttatttgtaaatgattctgtttttctatttttatgtgtaataccaaaataatataccaattttatttaatttattttttttgataattttgattttgctattatcattattttattataattttttagtaaattttcaagaatttttaatggttttgaatgtattctttttttaataacttcttttcgaaattatttatttaatttattggtttttttataatttttattttgataattcattttttgtctttttactttttccattctttgcattttgtgcatcaaatcgaaacattgcgtcgaacacttcggacgatgagctcagaatcaatttgtgtgccgaaatgagcttaaaaattaaaaagtgacaaaaaataaatatattttatttaataatatttgtaaatattgttttgtcatttcgtaatttatttcaattttatataactatacataaattacgcaaaaagaaacagttaaagtgaaatttttttaataatttttattttaattattttattttttgtcatttcgaaatactcaaattttttcaaaattaaaaacatttaaatttaaaatgttttctttttgcctctttttcttcttcttcttgcccaaccaaaaagtgcacatccgcctcattttcaccagcaaaactttgcaattgttcgaccatttttgccaaaatattttaatgtccaattaattgtcaactttttttaaattgaataataaatttaattattaataaataaaatacaattaaaggaattcagccaattcaaatccaataaaattattcattcattagtttagttgcactaatgaggaccaattaatatgaatgacctcataaatggatgaccccaacagaacgggcaaaaaatatgcaaataaaataatgacacggcgcaagaatcaataagcaaaaaaaaagtgtggttttttttagaaaaactaaaaaagagatttagtaaagcttttttttctggaaaatttattattttatatatttttattcatggctcccgtatttgaaatgcttaagcatttcattttggtgttttttggctgatcgaatgaatgcttaaattttcaaatgtttttattttgactggcattgggactgttagttcctgagccggtacacctcattgatttatgcccaaaaaggttggaaaatctggtttttttttcattcttctgcccataactttttgaaccttaacgaaatttttcaaaattttggaggctaatagaggacacttagagctatcgaatgacaccaagattattgaattttttttattttggcatccgataactgattttggaaacgaatgggggcaattttgtgaatttatcattcatccaaattgccaaatgtgtaatatacaatattattgccattccattttattcgttaactctcaatcacccattggtcgctttgagcgtgtgcaaaaacaatatttttttcatgtcattttcaattttattattttatttatttattctattttagatattattccaaaaatacctttggcatctttatgcatatagccgatttggatttattaaaaatttaaaaaatttctgggcttcggaattcaaaaagaaaaagaaaaaacaaaagtaaggggtcgtcaaccgataaaattgaaattttccacttcctttgaattttcaaaaattcaccactctgtttcccattcgtattcaactttttcaaaaattgctttcccccacttttgccgatgaatgaaccccccgggggcctccaattttgccgacacggcgtaagagacaaaaagcggcaccaataaaaggagttacttctagggagaattggtgggtaatagggggtaataaatgcacccaataatcatcttaatcgccatcctcatcatcatcatcatcatcattatcccaccatccaccccactcgcccaattacgttaattaacgtaacgatatggtgggaagaaagacggcgttttcgtccgtccccagcatccatcttctgcggaattgcacaacactgctgctgacagggaagaggaattgagtgggaaagggggggggggcacacaaagtaataaagttttgggcatggcnnccttcacaattccccggagacgcacccatatacggtagacgaacagacacaggcatactgtaattaattgtgcggcagagatactgtatncaatgtcgaagtgtttgttttttaaaatcaaattacaattcttatcattaactattcgaatttcgttataaatttttactatgtatctgatgatcatatcaaattcgtaatgtgcatcaatttttttaagatgccattcctctaacattggtcactgatcaaatttccatgtaaatctttcgccattttggaattttcactgatcacttttcacttctctatttgtctcccttacatttttcaaatttgtatttacatgaaaaaatgttcgttaattttttgttttacttttttggcatttctcacttttgctttttaaatgcctgcttctacaaatgataatttggcatttatgctttactgatcacttatttatcaatttttttttggcatttcattgctgtttaatctttcaagtgccattcctttagactaattaattaattagtgcttttcgccatttagcttttgttttttcttggccacaaactgtgtgtgcgccatttgccttacacattctctcctctcctcctcacactttgtccccatctttgcggtgtgctggaaaatttggatggattgattgactgctgtgctgccggggacggtccccaaaagtcaattgactcccttccccccccattagagattgatgaccttttaatggggcttttgcgttccctgcggcggtggcggcagcggcggccaagctttttgttgtgtcgattcgatttgtcggcaacgaaacaaaaggcgcatcgcccgaggggccaaaacggggggaggggggccaaaaccgaaaagaaaacatttgcttttacacaaaatggtcccgggggcaagcaagcattcattggcaggcagcgggagccatttggccatttgtcggcacttggccacatcccctcgggggcgcccagttgagcaataagcaccaccgatcatcaaaccaatttgagtggataattgggcaattagtggaacaaaatgaatgggacggacggggcggaggatggtggtgatctggccaattgttgatcaccactaacaatgcgtttaacatcattgtgatcaatcataatcatgggaggacacattattgccaagactcaaacatttgccgaattttgggcggttgttgatttaatccaaaaagctatagaaaattaaaattgcaagtgatcaatcaaatttgttaattatggaaacgccatttaattgatcaaaagcggtgaatcctagaatttgtaaggacgattgatcaaatgaaccaactggtgtaattttgtctctgatcagtagatggccaatccaaagattttgtttggcactttggcaaaagattggcatggatcatacatgtattttctggtctaaatacgataaattcggatacagatttttttccgattgtcctcgaaatcctacggtaccagacgatttaaaatatttttataattttttatgccaccccaagaa

SEQ ID NO: 3631 - DNA, 2053 bp, Heterodera glycines
tgacccacaaggtcatggattcggtcagggtcacctcgcttcttgatcacatataaatttaatcggttttgagtttcgggatcatattcaagagcaattagctcactgagcaatgattaaaacttgtccagtctcgagtatcggaataagaaaacccgtatttgttcagcattgtcatgcctatcaaaattatcaaaactataattgctatcaaatcattaaaagcaaaacggcatttcatttccgttcccgtactcatccgtccgtgccattcaccacgtggtcgtcattgtttggcattttgtcactaccgtaccatttgccattgtcgctgggtctcccatcgtcgtagcgacgccacccgcttcagtcgctcgggcaacactcgcagcgagcacgagtgccgcgtttgcctgcgcaaagaacactttttcgtgcgtcgcttcttcttggcgctttgctttggcacggcggttctgcaaaaaaggcgacaaatattaattgtttttaattgtcctcaggcgaacacatagtgccaatttaaatttaaaaaagatttatttaaaaagattttaatgaaattaaattaaatataaaaaacggtcgagagggatcacgaggtcgagatcccgtccaaatcccgtcggtctctaattaatatgacattaaaattagtgtgattttttaaagtcaaataccattactttcgattcatcatcatcatcataataaatcataaatcacaagactctacttttttcctgaccttaacaccaaaacagataattaaaaagccctctgggggccccgtgccacaaaatgaaagaattttccggtgtcgagactcttgacacgtaatctcgatgagtgagtcaccctgctcccataaaaattgttgcacattttggatgatatatgatgacctcatgcccacccccactcccaaatggaccttggaggagagggacattataatatcatcatcatcgtcgtcacctttttgttgacccccgaggggaaaatgccaaaattgggcgtgcgcatttgttaccgtaataccgtaacgcataattatcggccatcatcaaatttggaaggcttggggcggcggggggataattggctaccgaattaacggggacgggggggggggcgtctcatcacgcgattctctcccatgtgtgctcccaaaaattggatcagcatggagaggattttggggtcctctcagggacgatgaagatgatgatgaattgactttgtgactttagttatggggactttgctgggggcaaaaaaaacatttaacccctcgggggtttatgggaaaacaaaaaagtcaaaaaaaaaaaacaattacttaatgagattagtgaaggaggctgaggagttgcatatttgtgcaaaacaaaaataacaaaaataatgggaactgctgctgctggtgaacaatgagcgcgtaaaagatgggcaaaatgccaattttttgggattaattaaattcaaattaaattttcaaatgttagtttaggcatttgctgtttttcaagaaatatttcctcaataaatatacatttgaaaaatgttaaattcgaacattgaatctgtcaattatttttttgattgcctggtccaattaaatattgccaaatactgttccaaaatgccaaaaaataaaattccctattttcggcacctcgcgctctgccaaatttggcaaatgtttgtcccaaaattatttttggtgtttgccgaccaccatcccaacagcattcagcaccgtaattaaacgcttcccacttaagtgccatcatcgtaatataattgggcaaaattggcgcattattctcccccccccccttctcctcaccgaaaagggaacggagccgccgggcgccgcccgaggggcggcacggcggcacaattggccacttcctttgggggattatctttccaaattgaagaccgattttgggaggacaaaaagcggcttaattggatcatcattgtatgtgtaatacaataagaaatattgtttccaattttttaattt

SEQ ID NO: 3632 - DNA, 1933 bp, Heterodera glycines
tgccgaagccgtgctgcactctcagggctgactcggtacctgagttttttttttggaaatttataaaaaattttaaccccttgtaagggtcaaaaaatttttcgatcctcaaggtttatatctcaaaaatccgcccaactgtaaggatttttttccaaaaattttccaacaaaccctagttaagctgggtataaaattgatctctggaaaaatttcatcattagcctggcaagcaggacgtgacaaaaaaatcagcatttggcatgaaaatttcaaaaatttccactacccctgctgatgttgctgctggttgatctgctgatgaagccacaacattgctgcggcggccattggtgacccgggcataaacgcggccgcggcaaccgccgcatgatgatgatgattcatttggggcggcagaaagtcggcatttctgctgcccggcggcacaatgccaccaccagcgacgggcgggaaaatgttgttggcaccgccggagggcacaaacatgggaaatacagcggtggctgggcagcaggtggttgttgaaggaagatcaaagggtgccgccggtagcggcgcggggcaattagtggaggtggttgtgccaggcttttggagcagtagcagcgaatgattgtggtgtttatggtggtcaagaaggggagttgttgaagctgttgttgttttaagtgccaaattgtcgatggaaattgcttcatgtttctgaatgggtatattatctaattaggccaaattagtttttaaaattaattcttaattcagtataatgggattagtctccaattaaagttaattaatttatttatttataacggaaatttaaaatttatttaaattggttttttgactttccccgtataaaattttcgaaataaaaaacaaattaaacgtaattttgctttgtaccttttcgagttcgccgccattttcacttttcgtgccacttttacatttcgtgccgttttccgctagcagagattgaacattgaacatttttctaaaattaaacacgctcagacgagtaaaaattgcaaacattcttaaatattcaaacgtgcccttaatttctatcaaaatttccaggtaaatgacgaaattttaaaagtgatcatattttgaaaagttcggggttcggcacaaagttcagaggcattagatgggccatgagaaagttgaaacagttggccaaattcagtgccaatggtacagggaccaaactcgacttttgtaaccctgaattgctaggatcaacaatcaaaaatggcaggtaccccagtaaatttttcaaaaattagttaaaaagttgaaatttagcacagcaatttttgaatcttaaaattttttgaaaattgaaaattttttgcgtgaacgcttgttaattgggcctgccggggcgcccatccctccggcagcacagaaagccgtcgaataaaggggacagaattgggggcggagtgaatccgccgccgatatcccccggggggccaagcaaatatccgacggatgggcggagcttgccactaatagccgccccaggcaaaacccacaatcataagcgccgccgatcaatgggcggtgtgctttgttttgccaatttcattatgtcatggatgagaaaaatgatgaattttgaattcaaataaatgaaattaataattgactttaaattatgaaactactgtagcagtacaattgggacaaattaccgttatatatactgtaacggcaaaaatattttttgtttcgaaataaattgatcgtcacaacttgggaaatcttgctattcttcgatttttcgaatttgagttgaagggtatcgaaattttaaaattccatgggttaatgaatttgtaaattccattctctgggaggcagaatttcaaaaattaaaaatttccgatgaaaaatt

SEQ ID NO: 3633 - DNA, 1202 bp, Heterodera glycines
  unsure (1)..(1202): unsure at all n locations
cataatggattaaaattccatgagttagtttacgaaattcaaattttccaaaacaaagcaaagaaattctcaggtnttntactcttcaaaatctctcattaagtaatgaatggtttcggagtgaaatagaagataactgaaaaatcaagcacttctaatttatgacgtttcaccgtctaaaaaatattttaaaaaatttttagtttttgatttttccgaatttcttaagtggcgcaaacaaaaaaattcatttatttgcccccctcgcccattgctctggcccttaaatgtctttaaacggtgcggaaattggccatttccccgcggggcagatccatttccatccattttggcttcttccggccaattcgcgcccccaatttccccacatttttctggtgggtgccactaattgagtcgccgccgatgatgcgattgttggctgatggattttaatgggagatgaagaagaagaagcattgggactactactaaatgttctctctgctttttattccattttatacaaaaaatttatgtgatgggttgagaatttttgatttaaactcaaaaaagttagaaaacattttttgttcgaaaaggggacactaattttgttgttaattgataaaatcattgcttaattttaatgtctaataatggcattttataaaataatttgtaaataaataaaaaaattcaaattaaaattaaaaaagaaaattaataatttatttttctcaattaaaaaacatataaattttatttttttaaaattaaaaataattataaatttagaaaatgcataatcggaaacttttgaaaattcaaagctttaaaaaagtcctagtactaccatatacgcacagatttggaatattaataaataaattcataaaaattgcgattaaaatttttaaaattctttgtaaattttttttttgagtctcaatttaaaatttcgaatctttatgaaacccaatttttgaagctcacaattttattaactagaaacactttcgaaggcattttcgtcgtacaaataaaaatttgaagcagcgatttttgcgcccaaattggttttggcgaaatgttttgcgtatttcgaagcccccacccaataaagatnatnatcatttnnncaccaaaaacataatagcttgtgaaggcttccttccactgattgatatggagtgaaaagt

SEQ ID NO: 3634 - DNA, 1680 bp, Heterodera glycines
  unsure (1)..(1680): unsure at all n locations
taaaatttttaaaanttctttgtaaattttttttttgagtctcaattaaaaatttcgaatctttatgaacnccaatttttgaagctcacaattttattactagaaaacactttcgaaggcattttcgtcgtacaaataaaaattngaagcagcgatttttgcgcccaaattggttttggcgaaatgttttgcgtatttcgaagcccccagggaatgatgatgatgatgatttgggcaccaaaagcataatttgagacacattgcttccttccactgattgatatggggtgaaaagtgggaaaattgaatttagcggaatattttttgcccaaagattttagccaataaaaaataaaatttaaatttaaatttttaaaatgaatttttagccaagaaaaagaaaattcaagtattaaagcttgtgttttaaatatacttgatattaaatatgtgaaattatgaattattcaatttctaaaattcataagtctcctaaagaatagtagttgaataaacttattaaaaatccaaaaatctaaaaactaaaataataatatttaaagttttacatttttttaagggtgatccctcccaaagatatttttcaacccatatttttacgaattttatcatttttcgtttctctgaatatagaaaattccatttttcacctcaaaattaaaaaaaaaaaccccaaaaattcactaaaaattataccgaagcaatcgcttcaaaacaaaaatttgcagttcagttttaggcaaaattttttgttttgatttcaatggacggaattttttgtttcgcaatgccttcgggcgacaactttttgctcttttgcgcgatttgccgccaattgcccacggcacggcgctccgttgagggtgtccatttcatttttcatttttttcacccatttcaatgccgtcgcctctcaaaatgcccccgggggctgtccaattgttcacaaatggaacaaaaagaaatgatgatgaaatgtgccatcaaaatgccatcttttatgggaggcaattccgaaaaatttattgcttatccgccatcttaggtgatgagaaagtttctatttttttcgtaagaaattattatttcggatgagaaattaaaatttatacacgattatttttcgtattttttgtgaatttataaattaaattttaggaatttttttgtaatatttttccacaaaaacagtgcagcaaaatgtttaacggcaacgagaaaaatacgctaaactttgccaggtctccgttcatacgaattttttaggatcattttttaattattcccggaatttcgaggtccgattcaagaaattttgggcctcggaaccagcttggttcgggctctactaaattaaaaacgtttttttttatagcattaaattatttttcttaatttgatagattaaaacaaataaaaaagtcaaaaatgccgacaaagtttttcaaaaaattggggaattgttttgtaaaacaaatgttgctcaatattggccaaaaatgatttatggcccccaaaacattggtggccctttttgatggcattgacctgccgatcccaaatttttttgatttgattacccaactaagcatcttggcattttaaaagtacgccttttatcggcatggcatcggcagaaattggcgtaataaaatataa

SEQ ID NO: 3635 - DNA, 888 bp, Heterodera glycines
cccccccccccccccaaattcgtccctccactataaaaattgcgtatttaagcccaatttaccaccacttaaatcactttttgccaatcttttgatttggcattgccatctctccctcacttgcttttctcctgcttcggtcccccgtttttaaatgtttataaaaaatccacagaaagccacccctccccctctcaacaggctatattctatttttcgaaaatccgagcccaaaacttgagatttcaaaaggcaaaaatcgtcgatttaaacaaatatatgttttaattttggattatgaggatgtatggctatagagaagcattaaaagagattctcacaattttatgaattctttcttgtgccttccataattgtaattaaattctgtcaattttactccaatagatagatggccaaattcccacaaaaagtgcttctcttctctcgcttattcttcctttttttgcaaagctcgcgaggatcgggcacacaaagctcgggaggatcgggcacgcaaacgcgggaggatccggcacgcaaaacgcgggaggatccggcacgcaaaacgcgggaggatccggcacgcaaaacgcgggaggatccggcacgcaaaacgcgggaggatccggcacgcaaaacgcgggaggatccggcacgcaaaacgcgggaggatccggcacgcaaaacgcgggaggatccggcacgcaaaacgcgggaggatccggcacgcatagttcggcaccttcgaatttgcaattcgtcattcttgaaggaagtgaattctgtctggataaaattaattctgtagaacaaaaaccatatggatcagttagtacaattcaaacattgaggtcatactatgacgagggctatgaacttgttggt

SEQ ID NO: 3636 - DNA, 1153 bp, Heterodera glycines
atcaaacaatgagatttttaacaattttttgcgggtgcagtttttccataaaacttctggtgaacgggcgaggggagggggtccggcggaaaactgatttgttaacagaccaaaaaaggccaatttttccaataaaaggcaagcaatgactttttcaaaggaaagatttgattgtccggcttgttatttgtgattttttgaacgagttctgtccttatttgtgaatttcgtcatttttgtaccagtgttacctatctcaggaattgaaacagaaggaagggcacactctgaatttcagtttatctccaaatttgggcggctaacattcgaattccaaacgaaatgtgtgactggtagacttataggaaggaccacttttgtctaaaactcattttgacctgaatttacaaggagtgagcagaccgagttctacgcgagctaaccctccgaccaaacagacgccaaattttaccaccccgccccccttcctacaaaagcatttgaattgaagcacatatgagcatttattaagcacaacaacaatacaattacataggcaacaattaaatatacattcatttgaagtgatgatcacagaaatttacatacagatacaacaatttacatgatgggggacaaaatgacaattttgggacggtgggtgggtgggatcctatcatgtccatgttgaggtgacgaagcatccttccatcagacgttgtactcgatcggcaagttcttgcggcgcaccatcccgtctccctggaaccactcgagcttgaacgcggtggcggctgggtccggcgtgttggtccactccacggtcacacggtcgcccttggtgtcctcgctgccggggtcgaaggcgtcgcaggagacggccacgttgacggactcctttgggccgagcactccgttcggcgggttcatgttgatgcgcttcggtttggtggtcttgaaggcgtagccgatgcgcttcgtcccagggttgatcacctgaaaaaggggggggggggttattccgcatgccacgtgcaccacgccaaacgcacccgcatgtagtaggtggccttgttgtcgaacggggcgttgaagacgaccttctgcgtgggcattgttgcgacgtcctctggtggaagttgcgccattgctg

SEQ ID NO: 3637 - DNA, 2582 bp, Heterodera glycines
cgtcatttttgtaccagtgttacctatctcaggaattgaaacagaaggaagggcacactctgaatttcagtttatctccaaatttgggcggctaacattcgaattccaaacgaaatgtgtgactggtagacttataggaaggaccacttttgtctaaaactcattttgacctgaatttacaaggagtgagcagaccgagttctacgcgagctaaccctccgaccaaacagacgccaaattttaccaccccgccccccttcctacaaaagcatttgaattgaagcacatatgagcatttattaagcacaacaacaatacaattacataggcaacaattaaatatacattcatttgaagtgatgatcacagaaatttacatacagatacaacaatttacatgatgggggacaaaatgacaattttgggacggtgggtgggtgggatcctatcatgtccatgttgaggtgacgaagcatccttccatcagacgttgtactcgatcggcaagttcttgcggcgcaccatcccgtctccctggaaccactcgagcttgaacgcggtggcggctgggtccggcgtgttggtccactccacggtcacacggtcgcccttggtgtcctcgctgccggggtcgaaggcgtcgcaggagacggccacgttgacggactcctttgggccgagcactccgttcggcgggttcatgttgatgcgcttcggtttggtggtcttgaaggcgtagccgatgcgcttcgtcccagggttgatcacctgaaaaggggggggggttattccgcatgccacgtgcaccacgccaaacgcacccgcatgtagtaggtggccttgttgtcgaacggggcgttgaagacgaccttctgcgtgggcattgttgcgacgtcctctggtggaagttgcgccattgctgttgttgtcgctgttgtcgggctggctttgtgggtgcttgatgtgtgatcgttgagagcgttgcttgaagtgttgctgctgctgagtgaggagaatgtgcaaaatccacctccttatatacaaaattcgggtgcaaaaattcatgcagcaaaaaaaagtgtataaaaggcgacggttttcttcacttttcaccagtgccagccagccttcaactcaacgcaacatcaacaccagtgcgcgccaagctcgtctacacatttcgtcgcgacaactcatcacttcatcatgagcgacatgagcgcctacatgggatccggccccgccgagcctgcaccgtcgtccggcgccgcggaagcctctccatcgtcaggagtcgcgagcgcctacatgggagcctcgcccgcgtacgagccaccagcggttggtttaagggggacacgggagcaaaagcatcactaatcttttgtttttgcagcaggagaagtccccggatcagagcgcctacatgtgagaagatgcaacaacgaccggcggatggatggacgaaacctgaagagcgagcgacctgtcagaagatgcaaagctaaagaagatgtcccataatcgtgatctgtatttattgatgtattgtacatttgtatgcatatatcatttgctgtgtattatcactttatttccatctgtgttccgaaataaattgaattgatggtcattaagcgtgtgtcaatttattaactgaaatttggtcctctccctccctccctctctctgtttgacgtagacatttggatggcataaagttttttgggttctagtgcagaatacgcgtcccatggacttttacgcgtcccatggacttttacgcgtcccatggttttttacgcgtcccataattttttacgcgtcccatctaatttttacgcgtcccaaggtttttcacgcgtcccattgaatttttacgcgtcccataatttaaaaaaaaatttgattaaatttttatatgttatcacattaaagcaaatattttaggtacgatcacatcacacattatttgttagacagggtagttatggcgcatttcttccaaaatatgctgaaatatttttttgttttcgtgataacgacgaaatgcgtactgaaacaaataagtaggtaaaagttcgggtgtagtcccatgtaaatgtttaaggctttgctttaaagccctccaggtagcctcaattccctgtgtatgtatttgagggttggcgggatctacgaagtaaatttgatgatttatccattcgtggttgtattgctgctgcatgttattaatccctccgtatgccgcccacccatccgatactatcgtgcttcccacctcaatattttcagcgataatgggcagaagagtgtctgcagaccgatcgggcacagggaaaaaccggaccttattagacccttttgaatcatgccaaagacccattcgtatggacgatttagcattcgaccaccgatggtattttgtcctatacaccttcagactcgtttatcagtcaacggattttgatgaattattttgttttcaactccgttgataatgtactttgtttttataatttttttatttaacatttcaagctgaaacaaagaaaaaatgaataaaaatcgatgggacgcgt

SEQ ID NO: 3638 - DNA, 311 bp, Heterodera glycines
ctcggcctcggcatctgtcagtgaagctttctttacctttggaacggatttccaccagtggatccgtaatacctttggaatgaggttcgatcgtaattaatggtaatgttaccgcctgaaaaacaaagaatacacaagcatttcaaaaaaaaggaggatttcagaccgtaacaagcccattagatacgatcgaagctcattacaaagatattacggatcaactaaaagatcggcacgttcccgagataaagaaagcttcattgacggatgccgaggccaaattggtactacatcaccatatcatggtctga

SEQ ID NO: 3639 - DNA, 1036 bp, Heterodera glycines
tatcaaatctaacactattaggtattttgaaattgtgctaggtgtcgtttcgcaaaatccgccattttagcaattttttcggcaaaaaatggcattttaccttgttcaaaagcaaccaaattttacatttcaggttcgaaaattcaatgttaagaatttagtactcacaatcagaacatcacgtggtgctgtgttaattccttgacatttggcaatgaattcttctttatagtgggaacgcacctcttctagtggatccgttatacctttgtaaacatagtcgataatatctaatggtcttacaaccgtctgaaaaaaacatagaatacacaccaggaatggcggcattccgaggccccaaaaattttgggaaatcggaattccgagggtcgaacaattgacaaataaaattatattattttaaattttcaatacgttttgatagtccgttccaataaaattatgtttgattgcgttagattcctgttgtctgtgtctttggagagcttcaaactttgtttttataaattcgtgcaattctttgatggctttttgctcatcggattctggcttaaatttaaatatatatatatatatatatatatatatatataatgcaaattgtaaataagtacagtatctcttctttgtaactaactgtggacccagaccgggtttcagggttttaaatcctgtttttcaggactcctgacaagggcacagctaggggggggggctgtagagagccaatatctatatcatcgtttttccttttttttcgtatctttcacaaacaaaaaatagatttcattctctattcccattaatttacctacttatgcaacactaaaattactcatattaatgagaattgtattccccgaattatatttgagatctgatcatttagcattttttagcggaaccaaaaaaggcattttccgtcccaatgccgtcccctccctttcctactgctcttctcattaccttccccttttcccgcaattccttccatttctagttccttccaaatatc

SEQ ID NO: 3640 - DNA, 2010 bp, Heterodera glycines
cccgaaatcccaaaaaaagtaaaaatttccagcaaatcgaaaaatacacccctaaaaatcgaatgaaaaacgtaaactcgagtttaaaaattcattaacaggggaacgacaattgtttaattataaaatcaaataattttatgaaaaatacaatttttaaagagaaaaattattgggtttttggagggggcggctctctaagaggggggggggggggctctattgttatttataaaggagcttctaccaggagggtagggggagcttaaaattatgaatacggtaaataaattttcaatcaaacaattttttactccaaattcgatatcaactgctctcccaatgatggcgcccactgcgcctgcggcacggacgaattccatggcattttcactgacaaatctcaactgattaacaatgtcccatgttgaggatgttagcgatgaaaattgagttgccatttcattcacagcatctgttgtttctagaaaagcagaataaatttgtcattacaattaatagggatgggaattttacgtaagaaaaatcgcaaaatatgtaaataaaatatgtgtaaaaaatactaaaatatgtatgaaatatgtacaaaaactcccaaaaatgtactaaaatatgtaaataaattttttaaaaaagttattttttcgaaaaaaaaatcttcgtataggcttagaatcaccttttaatattttaaaattaatttttgatatctcatttttgaaaaaacaacgatttttagagatacattaaaaaaaaattgtttttaaatttttcacaagaaattttataaattttcaaaaattcttcctactttttagagcatggagaatccaggaaaaaatatgcctttgcataaaattcccacccctagtcattacaattaaaaaagaaagctaaataaacacaaccgcttgacaatgcatttggccatgagatgaccaaagtcaaaaagctcgatctttaaaaaaaattaacaaatatgtgaatattataaatttttgtaccaagttcacaatttgtgccatttggaagtgccaaatttatcacaaaatttttgattaaaaagtccagcaactccctcacactagtgaaaaccttaaaaatcattatcacaattgaaaaccacgagaatatgttaagaccagggctgccagattaaaattttcaaaagcctcatttggcatgcaaaaaaacctcattttgggtcaaaaagcctcatttttacgaaatttaagcattttgtgaaaagctgagcacgaaaaatcgaagttgattttttgcggcgctttttccaaagaacttttggggaataggggggccggcggcgtcgataggcgccgtcgggggaaaattaagaatttttaccatatttttaacatattttcattgattggaattcaaaatttttatgggacgggatcccgcatatataaatcccgcaatttccaaaatgtgggattgcggattgggatcccgcaaaatcccacaatttccaaaatgtgggattgcggattgggatcccgcaaaatcccacaatttccaaaatgtgggattgcggattgggatcccgcaaaatcccacaatttccaaaatgtgggattgcggattgagatcccgcaaaatcccgcgcgggatcccgtcccgcaccgggctataccaatttggtatcatgtgagtgtttttcatgtttaagatctatgattatgaaattgcaaaatgttagaattagaataattgaattttttttctattaatcgctttttaaatacatgcatataaattcgataaattgattgaaacatataataataataatattaataataataattgcgcaaaatttagataaacatattttattttgaccgaaatagccggaagtgtttgccaacacttatttgcctaccggacatttgcggacagacatttgcggacggacatttgcggacggacattcacgaacaatttcgggaaaaaataaaataaatt

SEQ ID NO: 3641 - DNA, 4881 bp, Heterodera glycines
attcggtgagagtgctatttttatctttaaaaaaaattctgagacatgcttaatcgcaaacaaaatttactggcaatttcaaaatgaacaggctattatataaatgctgaaattagctgtactaaaatccgattccccacatttttgggcatcggatttccgatttcattttctgaaaatttgtggtgcctcgaaatgatttactgctgatgaaaagtagatcaagacttatgtgtcttgggttcttctccaacccgaacaaataaggaaaagaaaattcagggggcgggtaacaaattcccctacaagatttgtctgtatggctagagaaattttaaaaaatgtcggtggaaaaaccctcgttggaaaataaagttttataagttatttatgggaaaaagcccaattataatgtgcataaaattttagttttttttatccaaaaagaaaaaatatatgcaaaaagtggtaaaaaacaaatatatgtaaaaatgtggtataaaagtggcaggcgggcgtgcctaaattaataaacatttttttactcaaaatttggctgtccgccggccaccaccacccgcccgtcccagtggggacagccgcggggggtgaacaatggaaaaacaaaataaatatgatgggggagggagggtatatagggaataaaaaacaaaaaaaaatgagtaaattccggtggtgcagcggcccgccctaattttgagacacgcaggcaggcagcggcccgcctcatttgtatttgtacgtcgagagcggcggctccccagtgggcaccagggggccgtggaggacggggcggtgggtcaggtgcaatgccgcaatgccagtcgcctcgtcgcactggtagagcagtggaatttttcggccactaaagttatgaacattatatacatttacattggtacccctgtaaatgtacattttgtattgaaaatcataaaaaaaattgaaaaaaatggcaaaacgtacatgcaaagcagtgcctgtgcaaggccatggcgcttgtacatttcctgcgcctttgttgccggcacgaagtcgtagccggcaaccggtggcttaacaaaaaaaaaagtttttttttttaaattttgtgaataaatttgaaaagcattttacctccttcttcggtttctccgtgtaaataacattctgaacaccggagtgcactcgctgggccacatctgccagttcgtcccagcgtcgctgcacagcagcggcccggtcacagttgttcaacatgaagtctgtaaagaccatccgcaaatttgggcgaactggaaaaaagttttaatatttcagttttcaccccttttccccacccatcggtacatttacgggggtacccatgtaaatgtaccgataggtgggtaaaagggttaagctctttataccgaaatgcttaccaaatttgcgctgggtatgcgatatgcagctgccctggtcactggtggtgaccatgtcggtccagcgaccttttgggtcggagtggcgctgcactgtgtggttaagcgactacaaaaaaaataatgttattttatttaaaattatttgaaaaaaaaaccttgaactttccaaattcggccaccaatttggtgtttgagcagcggcccttggggtggccatcctgcaggcagatgaagcagtttttgctttttctgtccgcaacacgcttgaagtgctccatgtactggccctccagctgtaggaaggcagcggcccattccactgcaaagagaaaaaaaatattttacaaaaaaaaattaagaaccccaagcttccaaaatccagcactccgccggcctgtggccgatacccaggcagcacacgcatgctacccgggtaccgccatttggccctgtcgctttgtaggacgggcattcggaaggccggtgccggccttcgttgcagaccttgcacaaattctcgtgcccggtcttccaaatgctgttggcagcggcccaatcgccgttgattatgctgctgttgttgtacataaaaacgaatttacgaaggaggaagagagagtagtattaatttcgaagtaaaaatgttcaaactaaacaaattaaaaaattttaattttaaaaacaaattaaaagacaaaataaatttaaattgttgctcgtttggcattatgttattagataaattggaattaaaaatattttttattttaatttacttattaaattttgcctgcggctttgtaagccatccgcttatccccccgtatcccttttaacctaaaaccggttttttctgtagagaacatatttttctaaaattaaagcttaatttcaaatttgtatttagcagatttaaaccgtaattgcttttttattttttaaatcaaaatttaaatatacttttaagtgatgttctttggttctttgatgcggaagagcaaaagatcaacccacggtgggactcgaacccacgaccccagctttccgtgctgtgctctaaccaactgagctacgcaggcatcctctccattgctctcttctctctcctatcttaggaggagaatcactctcttaatctccttcactgccgtcttggcacaaggggagagagtgaccgcatttatcacatccccggcctttgagaagaccggtccccggtctctttgatgagaaagctccagtctttggatggacaacttctctcagagtggggagggggagctgtcggcttgacacaaactccacaccgaatgtgattccatgacaggagcgccaagtgatgttctttggttctttgatgcggaagagcaaaagatcaacccacggtgggactcgaacccacgaccccagctttccgtgctgtgctctaaccaactgagctacgcaggcatcctctccattgctctcttctctctcctatcttaggaggagaatcactctcttaatctccttcactgccgtcttggcacaaggggagagagtgaccgcatttatcacatttattaataataatatttgttttccagatcaaaatgcctatgtccatctactatatgaatgtcgttcacgacatcatagcgtcctagcttgcactcaatgaggacgaaaaaatcgaattcgacgccaagaagaaccacttcaagcgcaaacttgggccgctgagttatggcaaccggatcccgaaggccgaaaaggcccactacaccccggaacagcgcaggaggccgaccgctggttgtccaaccacgcttggctgcccccagcgcccttcaagggcatcctcttcccggccaagagtaagtgctttaaaatttttagtctgggactggaaaaaggctttaagactgtaatttctgtacatttatatgggtacccatttaaatgtacattaagtattgtttttatgtaatgtttgatttttagtctggaactggaaaaagggggcagctgcgtatgctgcgcactggcgagatgagttcattgggtccgataacccggacgtcagggcagctgcaaaggccgctgccgagggcaactttgtcagactcggcaccaacgagtacgtgcgactggacgtgcgcgatctcacgcagttgaacatcgacgatgcgctgggaaacaatgtttgtttgttttcctttcggtctataagaaaatgctttttaagtgtgtgttttgcagatacgtaactatatactataggcacatttatgcgggtacccgcataaatatacctatagtatatagttacgcattttttatattgacaggaagacgtggcggacgtggatttggtaaagccgctgaccgctccgaccttgaagaacgtcaacgccgacacgcgccatgagatcatgggcacgatcgtcaagcgcagccttcgcgcaaaagccatcattgggctgctgcagcgaaaggtaatcggacttgaatttagctttgatctgactttaatttctcattgtcttccaacaggtggtgttgaccaggcatgcactcgaccgcaccaaagccaagtttcgaaagcgcaaaagggagctgaaacgtgaggtcaacactgccattggcaccatccgcgctgccgaagacgacctttttcagcaagtgcaacagctcaaagagatcgctcctaaggctaagctgaagaagctcggtctcgcggacattggcccggagctcagcagcgaaagcgaaggggacgaggaggaagaggatgcggctcacaacaccgagcagcagcagcaggacgatgccaacgacgtcccagacgacctgaccatggacgaaagggccgatgctgctcgccgccgtgaagttctcgactttgagacaccagtctacgctcgggaactgcgggttttttttttggaatgttcttagacccttgtaattatctataaataaatatgtactaaatatacatttacaagggtgcccatgtaaatgtacgttttgtacatccttttatcatgagtccgtagaagcggccgaatgttccccacaaaattaaaaaaacgggcgccaagcgcccgtcctgaggccgcgaagcggccgaatgtcccccaaaaaaattaaaaaacgggcgcgaggcggcagattgttccctataaaattaaaaaaaggcgcgaagcgcccgtcctgaggccgcgaagcggccgattgttctcaacaaaattaaaaaacgggcgcgaagcgcccgtcctgaggccgcgaagcggccgattgctccctacaagattaaaaaacgggcgcaaagcgcctgccctgaggtcgcgaagcggccgaatgttctcaacaaaattaaaagacgggcgcgaagcgcccgtcctgaggtcactaagaggccgtgcgtcccctgacagattatcaaacggaattgagagttcttgattat

SEQ ID NO: 3642 - DNA, 5980 bp, Heterodera glycines
  unsure (1)..(5980): unsure at all n locations
tttagtttaaaaatggcgcgtgcctgggcgttgtgccgacatttcatccgaaaacagaactttcggaattgcgacnncaacaancacaaaggcgcgaaattttgaactgaaaattgtaagtgatttcanaattaatttttgagaaaaaaaccatcgctaaatttttcaacaattttttcgtcattttggccttctttttcacttaataagaattcgaaacaatcaatgcttatcagtcgaacatccaattggcagcaaagcctttccatggccaatttggccgcttcgaagttcgattggaacaaaactaatgggttaattttgcttaataattaatatatttaatcattttgcgtttattttacctttcattttcatttctgagcaattgcaaaaatatttttgccaatttatgtgccaattcccttataggaaagggcaaaaagtgatggagtgccaaatttgaatgttgggggaaacggccgtggaaagaaaacggggaaaggtcctcaaaacaggaggagaagtcgcgttgaacaaaatgagcagctgaagaagcaaaagaagaagaagacggaggaaaggaagcctaattggggacggattaatgggaaaatatgtcaattaggaaggtcaattaaataatattcattggaattttcaaatggcgaaattttcactttgtaaatgcggcaattcttcggatttgatgatacattaaataaatcgccatcataaagcaacctaaataaaagaaaaaagcatttaaaaagtggcaaataaaactttggctctctaaaaaagttgctgagttcctcttcaggctccaatggacactcaaaaggaaatgagttaatgtgttggtcaattaatttgacatgaaaagagggcgcaaatttaggcgatgactcaacgcaaattgcattctaaaaaaagaaattaaaaagaaataaaataataaataaaactgacaacgagaaaaacatttgtgaattcatttccaattgttgagattccaaacagattaaaagcagtaaagggcgaaagaattgcaaatcgaaaatttagcaaagcaaaaggaaaaggacggacaaagcaaatgcgagagaactgatcaatctgaggggaaattttaaaaatagaaaaaataaataaaaataattaattacaattccatcggaggaattaatagaagacgtaaaagaaagctcatagggacggtcgcattgaaaatgccaccgaagccaagtgaatgcatcgacgaaaacaatgctgaaaagggaaaagtgccaatcagtcctaattagtcttaattactttaatcatataaacttttattttgttaatttattctattacttttgctgcttttcattcctcaaatggtcaatgaatgtcaatgccatcggagtgctaaaacaatgcaccggcgatgccaatgatgacagtgcttcagcagtgatggcattttgcatgaattggtcagaaattttttgacaaaattttgttgggaaacgaaaaaaatggcggatgaaaagagccaaggaacatttttgtgaatttagcaatttattaaaactttttttacacattttagcaattaaaagccctaaaaatatatttaataaaataaaaatgaagaacatttaattaaaaataaataaataaacaaataatgagaaagaaaaggaaaattacataaaatgtaatacaataaaatgaaggtttaattgattgtattcttaggaaaaaatcaatgtgaataaacaacggacagtcgtcaccttccttcttaaatatacaaaattaaaattgtttgtaacttttatttttattttttcaccctttttatgaacattttatttttggtacattcaaattatattttttgtttgggctttacaaatagtggtgcttatttttttaaaacattttttacctttttgaatggtcagatggaccgtttcgtttggtcggtctttcatcaaattatcatgcggaagtgatatcggaggaatctcttctaagtgattgtcggattctttcctatgcaattcaattcaaaacaatacatttaatttgagtgtttgcgtttattctttcgacataaaaacgattaattaattaattgcactaataaaagtttccatcagaggagcatacatcattcattgctaatctctctcttcttttttttatttttcacatgccaaactcagcgatggtatcctccaaaaacatccgcactctctgcaaaagttccgtccgtttgtccttctgttcgttcggcgttttgcctatcaccgattccatgtgataataacaggaggcgccgaaacacaaataccttaaaagctcgactcacagatgaaaattcgaaaataagtcttttggtgccaaaaaagcctcaaaaacagtaaaaacgattaattattattatcctttttttcacactgtttcaatcctcaacaattttttgctttcatttttcaaaaatttgttgtttatgagtcttcttaaagatttcgtctaaaatgtctaattgtgatgtttttaggccgaaataaaggaaaataaaaatttctatgctttttgatcaaaaaatgacaattgctttacaaaaagcttcaaaatttcaaaaactttattaaaaaagccactgccaaatgataaaacattatcacatctgctgggatccccaatttacggtgaccaaaccggccaattcagccccggacatcgcttcggggcatttcttcgccttaaacaaataatcgttttgtgaaatggggtctttttagtttattttacaatttctgtgatgcttagtccatcttccaatttaattttcttgcaaagtgagcgcaaaatgcgctctttggcgattggatcatttgccggattgatggggacgagtttgtcgaagctgaaaaaagccaacatgcacttccaaacggcaaatttgaaggacaaccgtcccggggaaagaaggcacgggtcaagcagatccgggcgatttgttgcgcccataatgaacacagctttgttgcgagtccaatggcacgaatcgagttcagtcaaaaactgagagaccattctaaggaaagaaagggggagggattgggggatgagggggatcggattaaacgaaatttaaataaatagcaataattaagctaattgcttttaaagttccactatggtgccaattcgaacatccttgcattagccgcttcttttccatcacaatttgcccacctgtccatcaccccgcccgagtccgaattggcccctcgcgcgggcactaatgagtccaactcatcaaaaaacagcaccgacggggcagtacgcttcgctttagagaacacttcgcgcaaattgcgctcgctttcccccacaaattggctcagcaattcgggccccttcacgctgacaaaactgagtcccgcttggttggccacggctttaagcacgttttggccatttttcgttgttttgcccaccttttgccaacatcgttttcccgcaccccggggggccatacagcaaaatgccggtccgtcgtcggagacgacttgcattttcttcgcctgctgaccattttcgctcttcgaccttaatttgtgtaaattagcagctgctttggctggccaaatccttttccaccaattcggccaatgcttcggatagtaattccttcgcctcttccaatcccccaatgtcgtccatttgcacgtcggaatagccaccggcccttttcgaagcggattcccaccgtttgagtgccaattcaaaatggccaatgccaaggcgaggtgaattggcaactgtgaacgaatggcgatcatgctcaccaatggcaacgcatttggcatcatcaaacaatttgatcaattgcgacagagagaagctctggtaaatggaaaataaacgtgaaatacataatttatttttaatgacttatttaagagtaagttatttctaaacttatgatcattgatccagtcatcaactctgataatgatcatattcatgacaactgatcaccgattccttccaataagcgaccgcacttcgcatgatcagtgatctgtccacttcttctgatcattctagtcttaccgatcagtagtaaggtccaccccttattaatgatccatccagtccttctgacaacaaaacaatcaattccttgcaactgatcttgttgaccccctgtatcagtgatttgatcatgtgcactcattctgttcactgatcacatcacttctctgcctcccccccccccatctgtcacaaattacctttgaaatttcaacaattttgttcactaattgggtgtctgtccactcaattggtccgtttttgagtgcccattccgcatattccgccctctcttccgcacccattcgttcgtcgccctcttcaagccgaaattcccaatggaatgctttcgcaagacgttccggcacttcgctcgtgttaaacagtggcgaaatgttcaaaaagaaaacggaaggccagcgattagcagaagaagaggaacatttggcagcatttaagcaccgaaccaaagcatcgaacaaatctgttaaaaaatagaaacattttattttctgttttttagtttaaaaatggcgcgtgccttggcgttgtgtcgacatttcatccgaaaacagaacttcggaattgcgaacccaacaaacacaaggcgcgaaattttgaactgaaaattgtaagtgattttcaaattaatttttgagaaaaaaaccatcgctaaatttttcaacattttttcgtcattttggccttctttttcacttaataagaattcgaaacaatcaatgcttatcagtcgaacatccaattggcagcaaagcctttccatggccaatttggccgcttcgaagttcgattggaacaaaactaatgggttaattttgcttaataattaatatatttaatcattttgcgtttattttacctttcattttcatttctgagcaattgcaaaaatatttttgccaatttatgtgccaattcccttataggaaagggcaaaaagtgatggagtgccaaatttgaatgttgggggaaacggccgtggaaagaaaacggggaaaggtcctcaaaacaggaggagaagtcgcgttgaacaaaatgagcagctgaagaagcaaaagaagaagaagacggaggaaaagaagcctaattggggacggattaatgggaaaatatgtcaattaggaaggtcaattaaataattaatattcattggaattttcaaatggcgaaattttcactttgtaaatgcggcaattcctcggatttgatgatacattaaataaatcgccatcataaagcaacctaaataaaagaaaaaagcatttaaaaagtggcaaataaaactttggctctctaaaaaagttgttgagttcctcttcaggctccaatggacactcaaaaggaaatgagttaatgtgttggtcaattaatttgacatgaaaagagggcgcaaatttaggcgatgactcaacgcaaattgcattctaaaaaaagaaataaaaaagaaataaaataataaataaaactgacaacgagaaaaacatttgtgaattcatttccaattgttgagattccaaacagattaaaagcagtaaagggcgaaagaattgcaaatcgaaaatttagcaaagcaaaaggaaaaggacggacgaagcaaatgcgagagaaatgatcaatctgaggggaaattttaaaaaataaaaaataaataaaactaattaattacaattccatcggaggaattaatagaagacgtaaaagaaagctcatagggacggtcgcattgaaaatgccaccgaagccaagtgaatgcatcgacgaaaacaatgctgaaaagggaaaagtgccaatcagtcctaattagtcttaattactatagtcatataaacttttattttgttaatttattctatta

SEQ ID NO: 3643 - DNA, 7006 bp, Heterodera glycines
tcaaagtcaaaaaccttaaagctactaggcgattggaataaatgaaaaataaagcatagtcaaagactaaaccttacagcactaggcgattgaaataaatgaaaaataaagcaaagtcaaagtcaaaaccttaaagcactaggcgattggaataaatgaaaaataaagcaaagtcaaagttaaaaccttaaagcactagtcgattgaaataaatggaaaaaaagcaaagtcaaagtcaaaaccttaaagcactaggcgattggaataaatgaaaaataaagcaaagtcaaagactaaaccttaaagcactaggcgattgaaataaatgaaaaataaagcaaagtcaaagtcaaaaccttaaagcactaggcgattggaataaatgaaaaataaagcaaagtcaaagactaaaccttaaagcactagtcgattggaataaatggaaaaaaagcaaagtcaaatacttatcctacctaatttcatggtgacgaggcatttggctacctttaagactcccttaagagagacccttctcttctcatgtgcaagaatattgctttctcgcctgcgcggaatttcaatttagaggtgtttaatcataatcctttaggtggtagcttcataccattggtctatcgaccaagcccagctcatgttccctattcattggcttaacattcagagcactgggcagaaatcagacacggtcagcgcccttgcgcttatgctgccatcctttaattgccgtaagcgaataaacccttggctgaaatcatgcatgtctaattgtgtcaggaatgaacacatcgttcagacaggataaaccaaaaaactgacagcgagcgttaccggcgcttatattacagcctttataacagccaaagttacaaccaaacaattccttacgtcactacatgcctgacaaaatgctcaagccagcacttgcccccgacgggtgcgctcaaaagagcgaaatactcacaaaatccaaaaagtgcaaaatggaaaagtgtaaaacaatagtattaagttaaaacactagtccatttatggaaatattgttacgaatgatgttcgtaggaatctgttacgagtgatgttcgtatcaatgtgctacgagtgatgtccgtaggaatgtgttacgagtgatgtccgtaggaatgtgttacgagtgatgttcgtagcaatgtgttacgagtgatgtccgtaggaatgtgtatcgagtgatgtccgtaggaatgtgtcacgagtgatgttcgtagcattgtgttacgagtgatgtccgtaggaatgtgtatcgagtgatgtccgtaagacgcacggtaccgttagattcgccacatcatgctgagtctacggacaccgatcgcgtcccgttccgttgcctattcgcggcacagcgactgctttcgtcggttcactttttaccaatccactactgttgtaaggattttcaccaaacttcgtgcacacattgtttagcgtatgggcaacggaacgtgacgcgcacggtaccgttagattcgccacatcatgctgagtctacggacaccgatcgcgtcccgttccgttgcctattcgcggcacagcgactgctttcgtcggttcactttttaccaatccactagtgttgtaaggattttcaccaaacttcgtgcacacattgtttagcgtatgggcaacggaacgtgaggcggtcggaaccgttagattcgacacgtcatggtgagattacagaaacctaccgcagtccgaaatcgcgtgtatggattggaccacgagtgcaaacacgggagcactatccgataatgggctagcgagacattgagagccatcgacgaagggcacggaggagaagaaccaccacgttccgaaggcaagtgcagtcgctgaatctgtcggcgcaaatccatgcttcgaccttttggacaatggggacgatggcagcgatctcagcaatggtttggacgtcatcattggcaggcttgacttcgatggtgatgggccaacgatcctcgggatggataagccaacttgggccgttccaccagagtggatgggaggtgagttcaagcacagtacatccgcgtgaggcgacatcggctgggttttgctctgtcgatatgtagcgaaagcaaacttggtcgacggcacggatctcctttagccgattctccacaaaacgaggttgctgctcggaagacgacacccaaccaaggactggtttggagtcacaccaaatgaatttgtggcgaacggcaagtccgagctgtttctctgcaaattgaagcatccgaatgccaatcagcattcccatgagctccatgcgcggaatagtgagatttgacccctttggcttcactcggctcttggcaaaaatgagatgggccgtgattgtgatttcatgttgtgcccgaatgaagatgcatgctccgtaggcatctttgcttgcatcgacaaaggcatgtagctgatgagaggccacttccaacgggatgactcggcgcgggacacggaccttttgctggttccaagtcgtggcaattgtgttccattcttgcactttgtcagtcgaaagaggatcatcccagtcaagcttggtttcccaaagtgattggaaaaacattttggcatcgtgaagtgccgggcacactagtccgagagggtcaaaaacggaggcgagctgttggagaacagttcgacgagtaacgcaacgactttcggtgtccatgggcggaaagtcgatgtaaagcttgtccggcctcaactcccagtgaaggccgagcactttgggcacttctttcacgagttggtcttccttcggaattcggcacatgacttcgtctgagttacagatgaattcgcgaatgttcatttgacaggcgcggaacagagtcttgctgctcatgtatttgttcagcgcttctgagggtgaagtgcattgcatgagcaggttgtcgacgtaggcattttcagccatttcaatggccaatggggacccgtcctgcttcaggtgcttctggatggtggctgccagcaaaaagggcgaggcaatgactccgaatggcacccttgaccatcggtagatgaccacgttatccggcaacggtggtttacggacgtcgttaacccagagcactttgcagaattcgcggtcgcgctccagcaagctgagtgaattgaaggccttttccaagtcaccccacagcgcaatgccagccaagcggaagcgcatgagaatcccagcgagttccggcataattacgggccctctgaacatgcacttgttcagagagttttgcccctttggatgggcagaagcgtcaaggacttgacggaatttgtgtgtgacaacacaatgatgcggcaggaaatgctcgagtcctcgagtacgaacggctggttcgatgagccccagtcgaagctgttcctggattgtggcttcgtacttggcaagaagttcgggaaaatgttgaagacggttgagaattgaagacaatcggcgatgggccatggcaaaatttgagggcaggtccggcggaaaattcttccatggccatcccacgctgtatcttccgtttgccaggcgcgtagtcgtctggtcgaagatttgttgtgccgtctcgtcatcgttttcgagtggatcatctctgatgccaatgttttgaaggtcccagaattgtcgtagcgagtcaagatcagagatggattcgtttctctgaattccgctgacagccgtattgggcatctcgtcttcattggcaggaacatggacagtgacgggcataacggacagtggatggtcggcagttgggcgggatggaatttcatcgcgtccgcagacagtggaaccgatcgaagttttgactttgaaaagttgcggagagactcgttggacaccgttgaaaaacttccaaaagtctgccattccaacgagaatgtccggttcttcatccacaggcactaacattccctggaggaatgtggcacggcgcactgatggcactatccagtccgtccgatgggcaaccagagtttcgtatccgccgtcctctcgttggacgcacaaaacgtgttgcggcgctttcatcttgatgggttgccgcgtgtggaaaggattcacctctagctgatcgtcttgtagtttcggaaggctcagttgccttatcagtggcgtcttgaccatagtgacttgcgcaccagggtcaaagaagaagagtgcgtcacggcgcttgttcggtgcggattctgagaacacaggagctcggagggccatgagcatgacgagatgaggaacggatggggagacaattgccatgattgtgttaacagttttcggctcagtgattgagtcagcctcattggcaaccgcggatgacaccaatggccttgagttgcgctcgtttccgaaactctgtttgttcctgggcgagggcttctgttgctttgaacgggcagaagatgtccctttggcactagggcagattgcagaatgatgccgttctttgcacactcggcatacttgctttgaccggcactcccttaattggtgacccttccgtaggcaattgaggcaccggttctgctgcaaaaggcaacgttttcgagtctctgcatctgtcactttgttacactccgaggcccaatgccggccagggcagaacaggcaggacggaactcgcttgtcatcagaatttctgacggactgagcgacggaaaaaactcgcgcattttcatgccgttctggtcgctgaggtcgatttggccttgcttcgtgccgaaatcgtgtttgtctgtcggcattggcttcgcgcaggcatcgttcgacctcttctctgactccgagaacttcggcaagtccagctctgagctgaggagtaccccatggaatgcctgctgcacgttccattttgatgagttcggacagaacagtcgacggcaatttgctgcggatgatttggtacatgaatgggctgtcatccggcatgttgaggttcaaaagttggcggcacacacgctccaaagtctcgaggaagtgttgcagtgatccaacgctatcgtccacaggccggagattgatcagttcggactgaagtgcttcggcaattttccgtggatctccgaagagtcgcctgagtgcggcaacggcatgggcataattgtcccctccacggtaggcggttacggcacgagcagcctttccgcgtaagcaaccgtggagatagttgagcttgtcgacgggctcaagggcggcacggtcgacggcactctcaaaactctgccaaaacgcgggccattccattggttcgcccgaaaaaacaggaagactgagctgcggcagccgagcagtggctaaaggcgcaggcgcagcaacagccggcaagtttggcacgatttgttatttggcaccaatcgtggctgattggcatggttggcaacagcagctggctgttgaacattggcaccgccgagaaatgcggcattgttgacgaatggcacggctggcacgggtggattcacagcaacagctggttgctgtcttcccgccgcgattggctggttgggctcatctgcgagttccgctgctatgtgagccagcatttctcgcgcatcttccaaccactccgtcaagtgccggtcatctcgaataaaggcagtgaaaagcgcttcctccgcctctctcgctgggccttgcagtccgttcatgatggcaccccacgcgtccagctcgacctccatccttgacaggatacgggtgatgtgcccccgttcctgttcaaggttttcggtcgtctcggcattgatcacgggctcgtccagcaaattttcggccgtagtgacatgttgccgaagtcggaacagcgcgggccccaaagccatccggcatcgagctgaagacatctttgattgctaacggcaccacttgttaactcgggcggcaaaggggggcaaaaatggaagggcgcgagggagagagggcggggtgaataaggggggaaaaaataccgaataaataaaagaagttttatttggtaaatataataagatgtcagatgaaaagaatgtgttgaagcgaaaaacgtgcgtgtttaaatagagaggaaaagcggaggtggagcaatttagacagaacgatcaacaacaaaaaagagtgactaatactaagcacgaaaatcacattgaataggaaatatcacaatttagataataagaaaatcaatcacaaatattaaattattccaattaacacaattaattcttcttcctcaattctctctctctttttccattttccatcatttcttctttttctcctctttcttagtcgctttggcgacattctgactttttcattatttatttattttttgcaaaatttattcataagtattttttcagaaagtgctctgaaacgcaccaaatgttaattaaaagttaaataaggctctctgatgctttttctatcaaaagggagatgaataaaatttttaaaaatttttaatccctttttaaacaggccaaaaagtttaggcttatattttaaaaagtttcatcgaacctagcgcactaaaatcgatataatctctccaaattttgcaggccttctccattgtaaaggactaacttaacctgaaaaaatgccacgcttgttgtttttaaaatttttcgaaattctgactttttcattaattatttattttttgcaaaattaattcataagtattttttcagaaagtgctctgaaacacacaaaactttatttacaggttaattaaggctctctgatgctttttctatcaaaagggagatgaataaatattttaaaaatttttaattcctttttaaacaggccaaaaagattaggcttatattttaaaaagtttcatcgaacctagcgcactaaaatcgatataatctctccaaattttgcaggccttctccattgtaaaggactaacttaacttgaaaaaatgccaacgcttgttgtttttaaatttttcgaaat

SEQ ID NO: 3644 - DNA, 4855 bp, Heterodera glycines
aggttcatgtaggagaatttcgcgtggaaatatgtgcaatatagcgttgacttcctcgtcattcctgtcagggattgtgtccttagagctcgagaagctcacctggcccttgacgtagtcgaacattgtgctatatgcgttcaggaaatgagtgccaaggacccaatgatggaattgaatcatcggtcatcagtacaatgaacataccgtattttctttatattatcgctacgtattcaataattacacagtctacagatatccctcccacctttctgaggagattgaaaaataatccccccccccccccggggtgataattagaaaaaatccggtagattggttgtgaaaatgcataaagtggaagtgccaaaaagtctttcagggatcagccaatcctgggaataaatgagttaacaatggcacaatgagcacagatttacgcaaaaatgccaaagtgaaagggccgaaaagttttatagaccagtcccaatcctggaattgaatgaatcaacagctcaatcagcacagattggggtgaaaatgccaaagtggaagtgccaaagaaaattctaaatgttttaccgtcgtgaatccgacgccatattggccaaacagcccaagggcacattttccatccggcagattcaactattgattaattaattcattaaaattggttatttaaaatcaaatttcacacacacatcaattatatattcctccgctggcaccacaatgtctttcccattaactttcagcacaattgaggccaatttgggtcgttggtcacatggaacagtgtacaggttgtcctcctcgcagtaatcagcatttgtggcagcaactcaaaaggattaaaaattgaattttattaaaaaattccattggggcgatgggatttttgggtgcttaaaagcttcatttgatggctttttttttataacggctcagcacagtacaagttatcctagtacgaaatcccgagctagaattagtgcccggagctctctctcctctctctctctctcctctctctctctctttactaaactttctcgtctcttctgattatcgtgtttgccagcagaacccactcactgatcatttccatcagatgaactggtccaccgatcagcgccgtgcccgtgtccaccgcagcagtatagtcacgatatgaacgatatttgccgatctggaacctgaaagatttccaaaaaaaaatttttgaggaattttcgagatcgctaatcacgagaatccggaatgcgtttattctttatttttttgccaaaaagggcggaccaaccacaatacctattaccaaattttggtcccaagacacctgcccactcccctgtcttaatcggtcatcatatatcttttggtctccacccgggtaaatcaatttggattctcacccatccactcgaaatgtccagctgttccatcgagatataagtggaacattatgccatggtccagaacagtggtcattgtccggaccaccaattgtcatgaagccaccggagccgcccagttcagcaggacgacgccttaagaaatgttttgcaattttttgttattttttcgaactgcgctggttggtttccgaccatttcagtgccaaaaattatttaaataaataaaattatttttcaatgtgcaatattcaaatttttaaacaaaacaattattaaaagagaaataaatccaaaaccaaaagtgccgtgaaaagagatcgtcaattatgtaattgaaaaatagaaaatctttaaatttgttgcatcataatttttgctcaccagtccgaccatatagtgaagacgggctggtcaagctggtccagcatgttcatcaacggaggcttatggcccaaaatcattgggtcgtagggccacgctaagcccaaaacgccatccaaagggaaattggcccactgatgctcgataaagtcgaccaaaagaatgccttggttgtcaaaatgcaacggctctatctgaatgattgtggcactagttgcaaatggttgctatgacgaagaacgaaaaataaatgcaattgatcaaattaaaattcaaatatttatttgaattaaaatttaatagtaattatattatttaaatattagttacattaaaacttttttcatttttattgataataacggaaaaaattttttttttagaaatttaggcttttccacaattgaccaaaacacagttaaaatggtgaataagcattcctaagctgaaatttatcccaaaatatttggaatcatcgattgtacctcgattttcgaattctaccaaaaaaacgagttgagtttttaccaaaataaaaatgaaatacaaaagaaaataatttgaaaaaaaagaaaattaaaaacgggcattttataacaagcgacactttgttaacaaaatttaggggtgactttattttcaggggcgcaaatttttgaaatacggtatctacagtatgtcgaatatttttaattaaatcatgtaaatcatttgaatttataattaatttatttgtttaaacaaattcaaatacctgaaggagttctcgatggaaatagcctttgttccgttccttttgccacggttctgttatgcaaaattaaaaaatttaattagactcccaaaaacactgcaggcctagaaattatttcaaaaaaaaaatttaaaaaaaactccaaaatatgtgtaagaaatttgtacaaaaacccccaaatatttaccattttttttaataaactttttatagaaaaaattcatagaaaaaattgaataagaaaaaaatacagtaaaaggaaactaattaggcttatttgttaattttttttatctttcttttttagaaaaaatctaatttttggggtcattttcaaaaaaaatttacattctcataagaaatttatataaattcgcaaaaatatatgaaaaaaatgcgaaaaaatcgaaaatatatagaaaaatattgtatacacattatctaaaatggtgaaaaatcccaaaatatgtagaatattttaaatgaaagtctcaattttttattcggaacaaaatttccaactattcaaagaatatttacatgaaaatttcaagccctaattattattatcaaaattgttttgttttttcttatttaatgagacttttctcgactcgatgcccatcacctgctgcttctatgtcatccatacaattatgacatggtatggttaatttgtctccactcccatgaaggcttgtcgatttgcttgaatttaataatagttttttcgatgaaaaatatgttgcataaatgggcaaaattttttttttttaaatttgggtgtcaacatttcgggttttttcgtattattaaatatttcggcattttcgcatttttagataaatataaattcatacgatagtcatacttttaaaacaattgccattgtttttctctattagagataacgtttcaaggccccaaaatttcataaagcggaattccgactcaaaaaatgttcttggaaatcagaagttggaaatttcggaaaacctaaaaaaattatttgagttttaataggcgaacgcaaataatttgtcgcttaattatgttctaaaaaaaacttttgaaaatttgttcaaaaaaattgctattaaacacaatttttgcaccataaaaaccaaattttcagagcagtgcaacagtgcccgcccagcacagacctggcgttaaagcaatgcttttcatattcccaatccttggcatagtgacaattttggtctgtgcatcggcagtcaattacccaaaagaaggggtagcaggtgtcaagcgccacttgcagctgctgcgctaaatcactgataatgtaaggactattcgacgccatttccctcatttgctaattcccattagccattaccaaaagaagccgggaattttgaaaaagtcgggattcgggatttgaacaaggccatggatagaaagggttactgggattgaaatccccgttcgctgcttgatcattcctgctgatagtcgagacttatttactaaaatctcgtggataatcggtgtatcaaaatcaagttaatccctatgatcaaaatctcatggcggaatttcaaattttcgctcccccaaaacggcgtaatttgcgtaagccgtaattgcgccatgccctggttggatggaatacaatacaaaccttgcgattttcccactagacagggcggatgcatcaggtataattaattaagtggttaaatctctcacttaatttaattactcctcaaaattgtacggtaattaccgtacattgaaagtaagccaaacccccaacaacatacgtggcgtgccaactgtgatgttagcaaggtagaagccacggtagtagtactcttcactgtcatcctccgcgtccaacgcagtgaaacggtcaacctcctctaaccatttgccgctgtgcaaaagccggctgcgcaatgatccggtgaccgtaatgggcagtcgatggaccaggcaaatacagtaggtgggccaccataagaaaacacagagcaaaaacagtcgcatgggattactgtaggggaggtttgaaaggtgctgctatgtcgttacttaaaaaaccatcattatgatttgatgaaaaattatttataacttagctgaaaatcaaccgaatttttaattcttgatatgattcgatagcccttagtgttctctataagtctacaaaatttcaaaaaattttgttaagtttcaaaaaagttatggctagaggaactcaaaaaaccttgattttcgagcattaatcgagcatctttggccctaactcttttgaagcttgatgaaa

SEQ ID NO: 3645 - DNA, 4523 bp, Heterodera glycines
ggaacacaaaaatccttgcatttcgagaattgttcgagcatctttgtccctaactcttttgaagcttgatgaaattttttgaaattttgtagactgatagagtacacttagggctatcgaatcatatcaagaaaaaaaaattcggttgattttcagctaagttataaataatttttcatcaaatcataatgatggttttttaagtaacgacatagcaccccgtttgaaattttcaaatgtgaaagcaactacggtaagttgggatggttttactgttatttgaaagagtcgataaatgtatttagaaattaaaaatggaaattttaatccttcaaatatttttctattatgtcatttttattttttctatttgtttttttactttagtttttctagaataaaaataataatccttcaactattttttttatttaatttaaataaatttttttatttatgagaaatttttcattaaaataaaaatggacaaaaataatttgtttataaaaattttttactttagctttttctataataaaaaagaataacaaaagcttttcgtcgaagctgccaattttaaaatgaaaatctcttgagataattggatgccattcttataattggggctgctgttgttacatttttggcacaaagtattataacgtgttcaaattccccagcgaggtttcattttcggcacaacggcaaacatttggttgcagtaaattatttaaacaatgcccttattattttgaattattacaattattattagaatagtagtagccacaaagataaataaaaaaatgacatcataatatttttaatatatttcttaatcgaattttgctgctagataatttcaaaatttaaattcatccattcttcttttaagtaaaaattttatatttaactcaatttcattttaattacttaatgtttttaattttacatatcattattttattttttaaaataatttttatttcaacaattcaaagtataaagatgataaacttaaaataaaaattgctaaagctgtcaaaaacagattctctttgcactaaaatatgcaaattgcctaaaaatgcctccagacacgcataaattttctaatggaaggcatttgacaaagcaaaaaattgaatttatgtgttaacaagctttttttatactaaaattgctagaataaattaatataaatatgttttttgctttatatttttaataatttaaaaatattttattttgaaaaataaatttgtaaatattaaaacaattttttagcaatgagcagtgcaccacaacaccatgcttcatcgcatgaacaacatcaaccacatgccaacggcagcatttttcaaagtacacgcgaataaataatttgtaaaaaattattcgacataatgccaagccaaaactggacaaaaaaacattttatcttattttttattccgcaatctcggctctcgggattatttaccggtctcgatcagtagaaattttcgaaaagctctgtttgtttagacccaacgccattcctggactccgcttcactgctggtgtttgccggtgctcttctgttaccgtaggattgagatcaaacaaaattattgattaaataccttaaaactgattaaaataaattaattaaaattgcttttacattcaaacaatcaccacagttctctcttctacatggccgtcttaattttggtctgttgtcagtgccctgagcgacaacgccaacggcaccaacaacgtgaacaacaacaacggcaaaaacgacgattgaccgggtcggccggtaataaaaatggaattcaaaaatttcggggcggattttcaagatcccgtcccgtaattcctgtctcaacataaaaggggcatcatgtgtcagcaaatttttaattaccgtattcccgaaaacagggcccctcagggtgctttattttttaacccccctcggtcctctaatttagtggctgatttacatgatcccgtcccgtaattccggtctcgataaaaggagtcatatgtcagcgaacttttaattaccgtatttcttaaaatatagccagctcggggtggtttatttttcaaccccctaggtccattaattttgggggtttccttttttttaggaaatgcggtattaaatatttttttaatttagtggaaatagttgaatctaaagcaacgacaatttcgacatcttctgcctcctcaaatgtggatgttgaacttcaagcaaatgaacaacaaatggggaaagaaattgctgagcataaattttaaagaaaaatttaaaaattgaaactgccttattttttttaataatgctaatattaattaaagcggttatttttcaacgaaatatttaattcattttaataaacaattgatcaaaatgttaaaagtttgagctgttgttctccagttccaaaaattaccatctgatggctgtagttccgcagctgaataaacacaaataatttttaattatttaaattattattaatatttaccacaatttcgtcattttgtccatcaattgcgctcactgaacgcccttcacaatcccttgtccccaccgttccgtcgtccattgaccgaatgacgaaaattcgtgtggttgcctcataaccaaccctttaatttaaaatattttaaatttaaattttctcaattttgtggccctatttgggtttttaataataaatcctgccgattttttcggcttatgtaaatttaaaaaatagttttctaaaatgaaaattcctactttgaattaatgtcatctaaaaattgggaatggcatcgcatgccattgacaggattgcacggcattgcccactcaaaaagtcggcacaaatggacagcttcacggttggcaccgccaacgccgatgaatgtatgcaccaaatgggttaatggtgggcccaattgttcttcgtcccatactgtagccaataatatccacttgagatgaatgagtaaattgtgtgattgcacgaatcattatgcgaatctgaattgtgtggtaattattttcgaagagaaaaatcgattaaaataaaatattaattttttaattagttaattaaatttttatttttaaaattaaactgtgattaatttaattattttattataatgccttcattagacacctactgaggtaattgttttcaaggaataaatcgaataaaataaatttaataattatttatttcgacgaataaaatgatcaaaatacaaattaatttttattatttaaattaatatatttttattttaaaattaaactgtcattaatttaactattttaatgcgtatttagacagacaccattttcacatgatcacatttcattgcatcacgtagccatttccatcccttcataccgtaaccgtaagtggtcgcgtacaattcgctgtcacggtagccgcctttttcgcggaacagtcgccgaacgtagtccaactctcccgctaaatttgttaagccgtgcacaaaaattacaggacgttttcttaaaaatttgaaattggcttcaataggctaattattgaatttaattttgaaaaaaaattaattaatttataatttacatactttgccttaattcgcccttttccaccgccaaaacttccgtcagtgcccaaatctctgcgtgcaatgttcttctccacctcatcattgaagtaattcgtagaaattgtgaaaatgccgtagaaatagtgccatttgtgggaggaaaagtgccaaaaaacagaagcaggaattgacaaattgcgacaaaaagtgccaaattcatttgctatgattttttaatattgggatatttaatattaaacgactaattattcttctaattaattgcttcacgttaattagctagccaaaggatactttgtaaagatcaaaaaatagtattgaataaacaaaaacggttaattaccaaatattgagtgtctgatcaaaactgattaaaactacttctttttgaaagaccattgatagtctaaatcattaattataaataaatgattaaatagcataattaatgacaactcagagcaatgaagaggaaaaatttgttggttggataatttgaggttcattgaaaattttttttttaagacttaacaaaggcttggttctaaccagacaccgatactgattagatttttgagaatttatcagttcaagccaactatcattgaataaaacttgacaaataagcaataatgcatgtataatttgacctgatcaaaaaatttttttttctttgatcacaaaatgtatttgatttgtttgattgtcatttttaataacaataaaaactttccaatgtgattattattattattattttattatttatgaatggcgaaaagcagcattattttatttatttagtaaaacacacattgatggtctatgtatgtaccatcaatcccaaacgccaaaaagacaaattgccaacccggtttttatagtctgaagaatgccaaaat

SEQ ID NO: 3646 - DNA, 1132 bp, Heterodera glycines
  unsure (1)..(1132): unsure at all n locations
ccaacccggttttttatagtctgaagaatgccaaaatgtcaaataaacgaggcaatgatggaacanaattgaaatcacataaaaatttgaaaagatcaatcggtgccaatgcgacacttcgccaagcatttctccttcgtttcgaagcgattttcgttgccgccacatgtctgcgcaccaaacggataacattgagcggtgaccgcgtcaaaatagtagcgcgtcagcaacggtgttgacgcgtgtcgcagttgcgaagcgtcgtcgtcgtcgtcaccgtccgcaagcccctcgcctacggtagcgcgcgaatcgtctactgtagcagccgccactttgatgtgatcagtgtccgttgtccgatttgtcgccggcgggcacatgccggattctgttgattggatttttgcatatgtacataattaaaattccaaattgagtgcaaaattttcttaaaaatcgttaaataaagtattaactttgaagaaaaccaagtaaaagtcaaaattttccatttttggcttattttaaataaatttcttatttttgaaagtttaaatgaccaattagttaaatgtctgaactgagctaattaataggatgattgactaattatgaaatgccatactgaaacttgcctggaggcaagtaacaaatgcttggataatgggaaatggcctcgaagattggcggcccggcagccttggggatccgtcattatggggaagcagtagcagaacaagcacagcaatccttctcaacaaaaatgatgctgctgatgaggaatgtccaaattggcgatgtgttattatgggaaagttattctgataagctgataatgccattctaaatattcaaaattgttatagctcataattttcattattacagtaatttgaggagttgaaattgtatatttcttttaaatattttggaaaatttcaaaaaaagaaatttcggaaatttaacgccgataaagaaataaaattgaataaaaaataaatattggtaaatcattgctcaaaacatgttaggttggtggataataactatttcgattcatttaacccatgattttgcgctgatcaaaacaggctctgctgtccaatttttggatggatcaaaatccgaa

SEQ ID NO: 3647 - DNA, 1918 bp, Heterodera glycines
taatttttgttaaaataacatttttactaatttttaactttccgtcgaaatattgtacaattggcccagcaacatttcggaagcgtcgtccagcagatcgaatcggtcctcttccatcatttccattgagtcgggcgtcttctccttggactccgattcgtccgaacattccgtcattttgggcgacgacgacacttccattcccattgaatacgttgatgaacaatggcacgattgcgacgattcatttgtcccggttgaacttgttgatgatctcccaaacgaaatgccggactttacaaacgaaattgagacactgaaaaagcctcaaaactcgccgccaaaagagaaaaaaaaagtgggaaaggcaaagaaacaaaacgccaaaggatgcagcaactcaatttcgaaattattcaaaacgaaattcaaaaatatgttgaagtcgccgaaaaagaccaatgggagcagcagcagcaaaacaagcgaaacacaaaacatggccaatcagcagaagcaggaggaactgcagccgctaacttcatatttgttggatcagaaattaaatggacaggtaaaaatgggggcaaattaatacaataatgtagaaaattgggtaattggtcagggatacggtataacaattagtagaggaatgacagacgccgatcgaaattcccggccaacaaatcttttatccctcaaatataccaacattagagcgcggatttgacggcatatgccattttctgctaacttcttacgaattaaaatgcaataaaaactattaacacccttaaaaatcgaccgaaaattttcaaaatgatccccaaaaaatctaattttttaaagctttttctcattttttaaaaaaatatttacaaattttgcatttatttttatttttttactttggtcccagaaagttgtttctcataatcttttaagaaaaatgccgtaattacggaatgtgtaattgcgtccagtcctgagcccgattaaaatatattcactgataaatggctaacaaaatccttccgaaagttgaaaagttaatatcgctaagtgtttgttctcttcaaagggcacttcgtttggcggcggaagttttgccgattaccgcgactcggacgaaagtgtgccgtcagtaataattgtcgacacggagcaagagaaggccgactgtccgaaggaaatggaagaaaattggggcccaattcctttctcggcattgttacggcgatcggatgaggacaaatgccgaaccgtgcaagttttgcggcagaaattcgaagtggtgcccaactttttagacgaggccatcgaagtgagtggaatgaaaaatgaagcaaattccggcatttatttatacttttttttgcgtattcagacaattatgggggccgagtcggagggcgaaattccgtcggtgatcaatttgcgattgggcaaccaaatttcgttcaaaaaacagagaattttgaggggcaaaacgaacaaaggtagtcagtcaacagggcaggagcgcggacagaaaaatcccgcggttcgcgcatcgcggattcaatttgccgcggtcgcggatcgcaccaaaaaattgccgtgaatcgcggtcgcgcatttgtcaaaatttttaaaccattaaaatttttgttttaaattttcttatataaaaattaattaaaatcccggtgtatacaatatttgggaagggactgaatgggcggaggaggggtgggtcagtgtctaaatttgcgaaggggttccagtcatgcaaactctatgatttttttttttttgcttttcaaactgctttttttaggcgcgctttttctaaaaattcatgaggaaaagggggggtcaggcggtgccgataggcaccatcgggaaaaatttttgaaaatttgagtgcaacttg

SEQ ID NO: 3648 - DNA, 4591 bp, Heterodera glycines
  unsure (1)..(4591): unsure at all n locations
aaatgtttctattattttaaagagattttatgacaattctttattttntgctaaattatntatttatttttgttaagaaaccgaatttttttgtcgtttagtgacacattaatgtgattcatcatgtgcaatgttcattcttttgacaatattttcgagaaaagattgattcatcaacgccttttagcttcttcacaatccattaaaaattatgcgaatttccccaatcttttcatgatttctgacagttttattttattgcatatttaaaaaacaaattccgaataaaaaacattctttttcaatgtttgctcttctttaatttgcttttgattctgcatatttttttttacaaaaatgcgattgaatttaaatttattttacaaaaattattgcgaaatcaatcactttctgatcatttaaatttatcatgccaaattattttttacaattagaaagtccaattgaatgaccatctcttataatttggacatttcttcctcaaatgcgttcacttttcttcgaattgtgttcagatggcgcggctctgtgtggaaatcggttggttggcctatttttgcttttcgggagtgatcggacaatccctaacacccacaactgatcaaccattgatctgttggtcattccaaaaatgttgcactataaatttatggttcaattctccttttgattacaacgttaaatccaaaattaatgtgtcgttaatggagtaattaattaattacgtcatttggaattttccattgtttctctgcccttttttagtctctccaaatttgagcaatgcttttcaggtgttcaacgaatttgtggcttggactgttctttattattcggtttttatgctctaccgttccgcactgccaccatacgcacaattggcattcgaagagatcggacggcacattgacgagagagtgtcccttttgcctattacatttatgtgcgaaaattaattaaaaattgaaatatacattggaaaactattaaaatagcgaaaattaattaaaaattgaaatatacattggaagactattaaaatagcgaaaattagtttaaaatataattattaaggcttggctttttcgtgacaattgttttcgaccggtaaaaccttttttattaattacagacaaataattcgttattttctgccttttctcagatggaagcaaatctttcaaaatattggcttcgtcgatagccctgcatttttcattggcacttatatccgtggtgacagcccccaaataagggcaattaggaggaacataattaggtaattaggcagcaaatgaatgggtgagccaggggcaatgaagctaacaataatatatttttaaactccttgcaatttaaaaggtatttgtgtttgacccaagtgctcgtcctccgcgacatttccatccaagtccgaaagcgttttccaaacatggagtcactggttgactccgaactgatccaagtcagtcgaacgacaaacattgatcaaaatggaatcatccgattcgaatgcaaattaattaagctaccagaattggacctaatggaaaatgtgaaaagcgaattcccaaaatattggatgccaattaattggtcggtcaatcattatttatgctaacaaaaccgatgattaacattttgaaggatattttcactttgctatgagctgcgccaaaaagggaacattgagtcggacctgcagatgaacatcattttgcaggagtgcaagctgtacagagaagtgcttctttcttcccattagcacttaattacccataattaataaatttatgtgtctgtgaattcagaaactgcaaaatttgtgcaattacgattgggtccccgtcccattgggtcattttacacattttaattaagtgtaaatttgcttgctctgttcagcttatccccaggtggtgtttctcgccgtgcgcatttactttttgctctgtctgatcgcccgtcaataccgtgtccacgaaaatgcggaagaacagaaccaagtggacagagtcattccgctaatgacagtgcgcgaaattctatgccaaattaaatttaattaggtaacaatttcagatgctgcaactgattttcgtgatgggatggctcaaagtggcggaggtaaaaatggaaaagcattaattttaatgtttttattttcgtttttaatttaaggcactgttaaaccctctgggcgaagacgacgacgattttgaatgtttaaaattattattattatttataatatgtaaaatgactgataccccattaggcaattacataattgaccggaacattggcattttcctgacaatggtcgacgagtgttacgatcagaaaccgccccaatgggcaggtgaaaggacacttggaattttcaatatttttaaataaataacaattttaaagaaagcacaaacttaaaaaacacgaagaagcccctctacgcggagaattgcgcgctttacacccaaaatccgctcgtcggctccgcaactttgtgccatttgccaggggaaagtgatcgcgtccgaatggtccaacggcggccgagtggtaaaaaaaagcaattaattaagggcctaattagaatttgtgtacaattttttttcgagatatgggcaggcgtcacagcagcaatttcccctcccaacgtccctatttgatctctccgaagagacttcgttttcgccattcgttgccaattcgtcccgccgaattggtgctttttgtacataagtgtgagcagcaggtgctttcccgttgtacaacagaacaaggcaaaaaatattgcttttaatgtcaaaaatttaatgtaaatttaatgtttttttgtgttttattccaaattatttttttggcgcctaaaaatgctaatgatcggccattattatttagtaataataatactaatacaccgaaacaaattcaccataaaaaattttataaagccggcatcgaatcttttagcttgtttgaagaagcaatatttgctctgctcgagtcccacaactgaaaagtgcccgttgctaatcttatttaacaaattgtgccattttaatttttttaaatatttatttttagccaattattatttcgagtggactgtacgaaaatgatattgtcaaatcagcagaaaatgtaaaaaaaaacggagaaaaaaatatttgaacaaaacattttgccattttagcagggcatttcgtcgccgtgtccgtcctcggccgaagtgccgcgccatttggacacagtgaaagaggacgaagaggtggaaacggcaaatgacatcgcaacggaggaaaacggcacaaagggaaggggcgactgagcgactgatggaaaaagaaattttaaaaagccgaaataaaataattgagaaaaattagacttttatcattagctgattaaccattcttttcccatttgccctttttgacaaattctgaggcaacaaattaaataattgatgaagaaatcattcattaatcctttctttctctgtcaaatgttcacttttattcattccgcagttttgtcaccccacaaattttgtacattaattgcataataattattagcgagcaaatgttttttgctgttcattgaaagctcatttaaattcaatgattaaatgacttttgattttttgtttttaattgtgatttatccataattcatcacataaattaaagaaaaaccagtcagtctcagcagctctcacaattacccacagttttttttaattgaatttgccatttggcacatgagaatactatttaataattaaaaaaataaacaacgaaaaataaaataacaataacatagtttttaattagaaaattaaaatttattttcattaatgagataagtctaatcaaaaatgatcacaaaaaacaaaaaaaatgccgtgaaatccgttggtttaacgaaatatattttatgaataatttttggtaaaagaatttaatattttttggaaaacattcgaattctcaagattcctttcacttgtttgcatcacaaattgcattgatcgtttattgaaaataaatttttagctgaaatacaaaaaaaatattttaaaagaaaataaaataatgaaaaataaaattataaattattcaaatatttaagctttaatctatgaaggaagcacaaaaaacaaaacaaaagtgccgtgaaattgtgttgttgtgcagcgcggcaaaaagcttggcggtgggcgtttggatggcgatgctctcgggtgcggtcggagccactgtgaccgcgcgggagattttgcctgctcccttgcgggcctgagccgttgctctcctcattgtgcgaccggcacagcccgggctcccccgggccgcccctgtcgacgcggcccttggtcgcgacacccaatcggcgcacgcccgccccccgcccgccttcgccccctactcgctgggtcacaagggcccgccacgaccctcggcggaggctacggaattaattgactttataagcgaagaattgggaagagaaaatgtctgtctctctcaccaaacacacactattaattgctttttcttcc

SEQ ID NO: 3649 - DNA, 1646 bp, Heterodera glycines
attctgtgaagagtttttctaataaaatatgaaaaaatatctattatttaactaaattcttataaagtaggggagaaaaaaatttaaacctttatttttttttatcttttttttacaaaatattgaaatgagaaaataaattttgtgcctattcttaaacaaaaataatttaaatgtaattcattttcttctcttcgtaattgggtccaaccaaaagtcaatctctctatattttatatgacttttgctatccaattaattaaacaaagttttttgtttgccatgcaaaaatttggtcgcaaattctgccgcctttctcccgggcaaccgaccgaccattccaaaagagcctcgcttcgtttgttggcttttccctcctccctcacccccttctctcatttgtttgcattcactgccatttatcaccttaatgaagagatccacgagcattcaatttgatcacaaatccgccgatcattctcctcccgctccggcgacgatcgccgccggagagagtcgaaacagcggcaacagatcgcctcatcagcctccgcccgcaacggcgcccattccaatgaacctgtcaactgcaagtttcgtgccgctagcgccggcaccaacggcgggtgtacccccggggcgtctctacccgaccattgcgccaccggggaccgtcgcggtacaatcgacgccggacagtcactttcacagtgagtcaaatttaaaaaattaattcatttaatatgggtccaaaggcgataattaacacaaaaaggctggtaatggcatttcaaaaaagcctaaattgacgggtgaaagttcgagactcaaaaagtcattattattactaattgaggctaaacatgggttggacagctgaacaaaaaatttgtttaagcattgcgcgagtcgcttgagaatccgccacttccaccgattgatcagcaaccgtttgccaaccaatcgcaacaacaacagccacttccttttccgacaatcgctccgccgccgtactacgatcactttgctggaccagccaacggtgtcggtagcattggtgtacggtatttagtgcacggaccgtcacaaacgcacgaagttcactccgtgcacgcagtgccaagtggaaatgccggcgcagcaaggggaggtgggagacaggcgaagtcatgagattaaagaagaaattcaaattcaattaatcttttaattggtaatttcgtttttcccgtgccattcagagacggtgttttactacgtctcctcctcctcttccgccgccaatttccatcggcgccctttgccccgccttttttctccccacccgcgccgtctcagtttcacttcgatggccattttcacagtgattgccatcatcatcatgttcttctccttcaaaatgcactccaaattcagtcaacagtttcaacaaaggcacaacgcccacgacaattcattggcattgccagaacaaaacaatggggagaaacaatgacagaaaaaggggtgctaattgaattccaaatggcattctcgagactcaagtgcttcccggaaaccgagtccgtcaaaacaaaacaaacaatcgaggatgagaggtttgacacttctaaccttcgattatgccacttattacattaaaatat

SEQ ID NO: 3650 - DNA, 1887 bp, Heterodera glycines
acattttaaaatttaatttttgttattgtatttttaggggtatatttcaaaaaaaaaaagttttttaatttttcacaacaaatttctataaattttcaaaaattctcagaataggatgtaaaaaaatgaaaaatttgccgaaattttggattttttttgaggatttccaaaaatttccttaaaaaatcctcaaaatatgttaaaaaatgaaaatatgtaagaaaaagtccaaaatatgtacaaaaatatgtataaaattaagaaatatgtaaaaatatgtaaatagaagtcccgatttttgttcgcaaacacagaaaagaaagtgtttttcctactatttagagcacggagaatccaggaaaaaaaataatcgagcacagaattgcaaaaagtacggccaaaattatagcgggagcataagtgccacaagttgagctaagattttcctcaaattgagctgcgccacaatttaaaaattttttgcgctagaggaactcgcacaaataggagttgatgattaaaaaaaataatttatatgccccaaaacggaaaagtaccgtactggtgtaccgtacatctatacaaagataaggtaaaaatactttttgaaactgaatttttcgatgaaatctttttgaaatttataatttttttgagaacgtcgtgaaggggtgcccctgtaaaatgtttctatttatttaaattgaacaattaatttttagaatcaaatgacctggtgctgtacgaacagaattagggaaatgaccaaatttgcaaataacaataaggaaattgagatgaaaagcaaagggcgtctgccaattcggtcgacaaaaagcgaagcaaaaattaaggaaaacttaaaaattgtaaatttaaaaattaaattagttatgtataaaatgcttaccaagccgaaaatttgaatgccaatgtaaacgaaggaagaggacaaagcggagaagcccattgtctgttgtaacacttccacgatgtaagcatcgatcactaattgcaagacaaatttggcaataaaaacaattaaaaagttggccaataaatgcccaccgctgatgccacaaaatgccatgcaaatgcttaggaaaatgccaatccaaaggcccctcgctgtgccgatgctttgcttctctctcaaaacttcgagcattcccatggcatttgaacgttttgtttgttcagtgcgaaatccatccaaaatggcattggcacttttattttgtccccagtaaaatttggcggcgtcggcggctttgtcgtgctggtcgtggaacagtagaaaactgaaaaatttaaaattttgcaattatttaaattggaagcattccggcctcgggctttcatgaagcgtaagcattgtgacggtgaccgcaattagcacgagtgcctccagcagaaaaagcatccaccaatgcgattgatcaccgagcaattcgggcattgccaaaagagcgccgacgatgcaaccgaattggatcattatgcctaatgaacggataattaaaaatgtaattcgattagtgaaggccttcttgatcagaccagtgatcattccaattccgcctcgacattgcactgggcttaaaaatgttcaggaaaatattagcaaatacggtaattgtttgttcgacctgcactcgattaggaaaactgaactgatgccaatgccaattgtgacaaaaagtccgagaatgaagcgactcgcaacgaaaagttcgatgctatttaactggaaaagagcataagtgaaagtgatcatttattaaacaatcattttttcaattacaaatttcgaaacggatgccaaaagggcacagaatgcaatggccgcgttagacaaacaatgccaaactttctgccaaaattgtc

SEQ ID NO: 3651 - DNA, 2325 bp, Heterodera glycines
  unsure (1)..(2325): unsure at all n locations
tttggggcatacttttgtacggcaaatttttgaacaaaacagttgactttccaattggttaatctcttggatatgtgaaaagaagagttccccgcccccgaaaaagaaaaaaaagaaatgtcgtgatgccgatggttggattctgtgtctcattcacgttgtcaatacttgaagttgttaatctttacatgcataaaaatgaggacgcttttgagtaaataaaagcaaaaaattgtttgaaatcgggttagggattcgaaataggtcgaaatgaatgttcggcacatatccgacccgaccaaattcagtcttaaataggcactcacgcgaaaacgtactccacgcgaaaacgaaggaaatcagtacattttcctagccatagacagtttttcaaaatgggtaatggcaaaggcaatttccgaccaacgtgcggaaaggtggccgagacattcatagaaattgcaattcaccaacattctacaccagaaacagtggtcacagaccagggaaggcaatttatttcacaaattttcggaaatttgacaaaaatttatggatttgaacatattatgtccactgcttatcatcagcagtcaaatggaatggccgaaggttctatgagaatattggcaaatataatttccacgacaataaatgcacaaggggacaattgggatgaaatattaagtcatgcaatttttacttataataaatacatcagtgcatacggcaacaaaatattcaccctattttatcatttatttgcgtgaaccccgactacccaccgatcaaattttgaaattgccctcaagtaatgaatttttgtcggacatttccgtttgtacacgaaaatacactgagaaggcatcaattgcatggaaaattgtaagggaagaaattttgaaagcccaggagaaaaacaaagctgaaaatgaccaaataaggaaagcaaatttcagaaatttgaaatggcccacttaccactgataaaaaaggaagtacttaaacataatttgaccaacaaatgtacagagtacatataatcaatttagtgcacattcaaagaatacccgaaatttgggtttcccataaagaaaatgtggaacgaagaatgagtgacaatgaaaatagcagaacagcagctggactttgataattatgttgcatttaattaaatttttctattttctaataacaaaaaattaataatcaaaatataaagcaaaattaaatttaattgggggcgatccctttaatgccaacacttatccccttccccactcttccccacgatcagtctctgtcccgactgcgaatcgggaataggcggaccatccaattatataatactcttgaataaatgattgttaacaccaccgctaccaatttgggaatgataatggacccgcctggacgcacagtattcaaacccaaaaaaatatttcaaattattaaattaataacaatatattagggttcgagcctcgtggggcgggggtggcttttcgcgggggcgggggttgcgggggtcagagtcgcgggggcggtgacgggggcacgataatccgccccgcgggggcgggggtttgctttgaattagctccaaaaaatctcacaaaaaaattaattttatgaatgatgtgttgcctccacatccctttagtcgatgtatgcctcgattcaattcttttggcataaattacacagattttgtctaaagaatgaccaaatttagggatttttgggtaattttttaagaaaaaaaggtttttttggggggccggcgtgccgataggggctaattttaaatttatttctaacagataaaaacttgatgaatgtgcgaggagaggtccggcggtgccgataggcgccgccggggggaaattttaagaatttatatgaattttgttagaacttagccaaatttttcagaaattttcctcttttagatgaaaataaggccttacccccaaatcagaacatttcttagaaacaagaacataaagaaacactgtattaatcagaaaaaaataaataaatttaaggaaaacgtcaaccggtgctgaactcataacaaaaagtgttgttaatgttgaagcactaaccagtaatccacaaatttatttaaaaacgaaaataaaatttagttgtttcataaaatttgttaagatggttaaaaaaattcaaaattgtataaattttttgccttatttcccacgaatatgccattcttanggggtgtattttcacccccgcggggggtgaagggtcgcggggggcgggggatgcggggtgtctgagtcacgggggcggggggggggg

SEQ ID NO: 3652 - DNA, 1532 bp, Heterodera glycines
ttttggggggccggcgtgccgataggggctaattttatttttatttctaacagataaaaacttgatgaatgtgcgaggagaggtccggcggtgccgataggcgccgccggggggaaattttaagaatttatatgaattttgttagaacttagccaaaattttcagaaattttcctcttttagatgaaaataaggcattacccccaaatcagaacatttcttagaaagaaacactgtattaatcagaaaaaaataaataaatttaaggaaaacgtcaaccggtgctgaactcataacaaaaagtgttgttaatgttgaagcactaatcagtatccacaaatttatttaaaaacgaaaataaaatttagttgtttcataaaatttgttaagatggttaaaaaaattcaaaattgtataaattttttgccttatttcccacgaatatgccattcttaggggtgtatttctgagtcacgggggcgggggcgggggtgaggccaaaaacctgtcccgcccccggcgggggtgacgggggcggggctagaatcctacaattattatcaaaaatattcgctacataaataaactttataataaccatttatgtgcagagccgaagctacactatttaatatctaattacagcaaaatgtttttcatattttgcgctcaaattcgtgttcgatagagtcgcgtttctacataaaaaaaaaaccaatttccattcaatattttcattaaattttttttgtccaaattaccaaattcttaaattttcggtaaatattgatcatatggcccagagccgaaaatggtcgaaatatgtaccatcgatagctctcggtctgtaatggaagaatccgaaagaatttttttgcggcaaccaatccctgaagagttacagacccgggactgaaatggccaaatgcctttgggactgaaacgtccactgacttaaaacacatggaattgctacaaaacacatataaatcgattcctcacggtctgctattcatgaatccgaaggaattttttttgataaaaaataaattggcaaaagttatgggtcctcaaaaacgtttaacctcttttaaccgctcagttaaaaaaaaatagcaaattcgtcaaatttgaaaattgaattttgcttattgcgctaaaaaaccgccgcacactcgactacggcgaccaggggccttatgctcgtctcgcggtttagtaaaccacggttaacgcattaaccacggtttcgttaaccgtggttaacgaccgaccttaaccggtatgctcgtctttaaccatggttaagtaaaccatggttaactcaaccgtggttaagagaatttatcttgaaattgaaaaataattaatattaaaaaatataattaaattattataataattattttttgtttatattatcaatattagcatagattttattaaaaaaaacccccgaaaaactattaaatcaagaattggttttctaaaattttttgccataacttttttaacacagcaattttttttttt

SEQ ID NO: 3653 - DNA, 2363 bp, Heterodera glycines
  unsure (1)..(2363): unsure at all n locations
ttcagggatcggtttccgcaaaaaaatttttcggattcttccattacagaccgagagctatcgattggtatatgttttgaccattttgggtttgggccatatgatcaatattttccaaatttcttttttttgaaaaataatagacaaattcatagattttatctcaaattggtgaacacattgtgtctttcttctgtctgtctgtgtgtctgtctcttcatcttctgcactgtctgctgttcatgttctgctgttgctcatccacacttccatgccccgttttcgttgattcatcacatttctccccaccacttcgccgtcggcactttcattttcacgaatgttttgtgccaaattcgcctcctccgcccaataatggtgccaaagaaccaactttatgggcatcaatatattttgataaataattttacattattatttactattttttcaaatttaatagacccaggacatgttctgcggcttatatcggaccagaatcccactcaaatattgtatcccggaaacattatcccggtccgttctgtttccgaatttcggtcttgtttctaaattcaggctctaaataattttttatttttaactgtaaacatccagtttagcaaaactcctccaatgtaaatgcaaaaggcgattcccaacgcgttatcaacagatcgactcagtgcttcaagctaaacttaataaaataaataaagctttcatttttattttctataattaattatttgaaaaccatttttggagttgtggccattgtcaaaatggccattccaagcacataagttgattgcataaacagagctgaatgttatttctaattaatattgaattatacaaaaaataaatttgacaaattacctggccaataaagccaaattcgttttagcgataaaataagaacaatgagaaggacgaggagagcaagagaatgctcaacacacctcaaaaaaagaaatatttaaagaaaataattttgaaaatatatgtaaatttaaaatgcaccatgaaaagcggagatagccgccatccttaaaattgaaaaaatgtataaaaattaaaataatttttaatttgccaaataattcgcgacgcatttggacattttcaaaatgcgatgcatcaggccgaagtcaaaaatgaccaaatcgtaagccaaaaggcgctgttcagtggtggcatccgccgaaatattcgacttgcatttgaaacttaaaataattatttataatttgtaatattttttttgctttttccgccgcttacacatgcccaaattttgtccatgaataaacgtgctaaaatgagaaatgtttgaactgaaacaaagcattgaaaacaatttcaaacttgaaacaatgaagccaaaacgacgagaaattgggccaaaccgaacaaaaagcaaagggttcgattggacacgcgaaaacagctgaggaattgcgtgtggtgatcagaaatgttaagcaaataccaaaagcgcatttctaagaaaacgaaatgaccaaaaatattttttattttttcactaaaaatttgcgataattttaaaatgttaaaccaattgaaaagtttggaataggatgcgtttttctgtcacttttagcccagcaatttcttaatggcaagggaacactttgtcatgcttcacactttgttcagttggcactttttggtgctaaattgactttaatttgttgtggcatttgtcaatttaatttttcttcaccaaatctccgacgaaaataaaactcgaaaatctccccggattcttcctttactaatttcagcatattacaattacaaattgatcacccaaatttagggcagcaaagtctaatttgctgctatgtttgaagctaaaaaaggagaacttctcagtaagaaatgtttataaaatttcacatttaaatttagtaaaaattattaaaaagtaatattttttgtggcaaaaatctattcacaaatcctattctaaaatccaaacaattgatatttgtgggtaaaatccgttaataaattgcaataaaaatccataaatttccagacggttggacacactttccatttgaatttgtttattatgtcaaaactcaaaaagtaatttaaaaataactttcattgatggaatgtttcttaaataatgtttaatttaattttacttcttttttacttacaatggaaccacccgaactgtaagtcggaaaatgcatatgtgttatataccattggatagagcaagggtgacttctatttgtaattttaatatacgcccccatangaagaaaacaaaangtatgaggcctcaaaaacgaaattttaggcctacgggccgatttcca

SEQ ID NO: 3654 - DNA, 1681 bp, Heterodera glycines
tgctaaaatgagaaatgtttgaactgaaacaaagcattgaaaacaatttcaaacttgaaacaatgaagccaaaacgacgagaaattgggccaaaccgaacaaaaagcaaagggttcgattggacacgcgaaaacagctgaggaattgcgtgtggtgatcagaaatgttaagcaaataccaaaagcgcatttctaagaaaacgaaatgaccaaaaatattttttattttttcactaaaaatttgcgataattttaaaatgttaaaccaattgaaaagtttggaataggatgcgtttttctgtcacttttagcccagcaatttcttaatggcaagggaacactttgtcatgcttcacactttgttcagttggcactttttggtgctaaattgactttaatttgttgtggcatttgtcaatttaatttttcttcaccaaatctccgaaaataaaactcgaaatctccccggattcttcctttactaatttcagcatattacaatcacaaattgatcacccaaatttagggcagcaaagtctaatttgctgctatgtttgaagctaaaaaaggagaacttctcagtaagaaatgtttataaaatttcacatttaaatttagtaaaaattattaaaaagtaatattttttgtggcaaaaatctattcacaaatcctattctaaaatccaaacaattgatatatttgtgggtaaaatccgttaataaattgcaataaaaatccataaatttccagacggttggacacactttccatttgaatttgtttattatgtcaaaactcaaaaagtaatttaaaaataactttcattgatggaatgtttcttaaataatgttaaacttaattttacttcttttttacttacaatggaaccaaccacccgaactgtaagtcggaaaatgcatatgtgttatataccattggatagagcaaggttgacttctattgtaaatttttaatatacgcccccataggaagaaaccaaaagttatgaggcctcaaaaacgaaattttaggcctacgggccgatttccaaccattttcactttctattaattccaaacctttacattttattatattttttgcttatttttactaaagaagaactattatagtttttttttactctaaaaaatggttcttaaagtatttagttatattatacattaattaaaatgatttatttttatgttgtattttgaacccgagctcctaaaatgcgaatttaaccaactgagccaccaatttaaagcgaaaacaaagccaaaatttcagtttttgggatcccataactttttagtttctttctatgggcatgatattaaaaattcttaatagaaatcgaccctgctctatccaatgataccaaatttatatatgttttccgagttatagttcgggtggtttcccttgttagactttatgttttttccatttttgcaataattttcggttcgttcttattttccaatttaacctgaacttagttagaatttttcttttcatttccagttttctcagttttttctttaattaccttaaattttttgtgtcttctttctctgcttttcaattaatgtgttctttttcttttatgtattcctccattttcgtgttcttttttagtatttgtttgggggcactgatttccagagaagggattt

SEQ ID NO: 3655 - DNA, 3162 bp, Heterodera glycines
ctttctattaattccaaacctttacattttattatattttttgcttatttttactaaagaagaactattataggtttttttactctaaaaaaatggttcttaaagtatttagttatattatacattaattaaaattatttatttttatgttgtattttgaacccgagctcctaaaatgcgaatttaaccaactgagccaccaatttaaagcgaaaacaaagccaaaatttcactttttgggatcccataactttttagtttcttcctatgggcatgatattaaaaattcttaatagaaatcgaccctgctctatccaatgataccaaatttatatatgttttccgagttatagttcgggtggtttcccttgttagactttttgtttttctttatgttttttccatttttgcaataattttcggttcgttcttattttccaatttaacctgaacttagttagaatttttcttttcatttccagttttctcagttttttctttaattaccttaaattttttgtgtcttctttctctgcttttcaattaatgtgttctttttcttttatgtattcctccattttcgtgttcttttttagtatttttttgggggcactgatttccagagaagggattttaagacataagttttggcgcttctgcatgaacttttttaacggtctaaaaattcccaaaaatacaccccataaaataataaatttttcataaattatctcccaaaatttcatttttccaaataattttttatcatttttcttttttttcaaaaaaaaaaactagaataagtgctaatttttgtgcttttattccattttcatgcctttcttatgccttttttcacagtttccgtttctattttaggtgcagaaaatttcattcctaaaatctgcttttttgttagctttcgactgttcctttcgagacacagttctatgctgctcgagaaccttggctaaaaaatgatcgcactttattggaattttcgatttcgaatccgacctggaaaatgcgactggattttttgggttcattcgtgaaaaattttgatttccgattcggcactaacttttatgggtgtattttcattttctgcattgcggcggctttttcaaaacgtttttattttccgtttcttttattcataatgccaataaataacaatgtcaaaacttttcatgctaaattcaaatcccaatcagtcagtcccttaaacattcattcgtttatcgtgccaaatttggttgccaattgccctcagaaaggggcgcactgattgccggcccaaatagctgagatggttgttgtcgaaaaagttggccaactgaatttgctcatcaaatgccgcacatttgtccgtgcgcgcgtcacagaaatgttcggcgaggtcaaattggacacattttggacagttcaacagacggagacgggcataggaaaagcgatttgtgacgtaatgctcctaagaaaattggcagtgttttgtaaattggcacgggaaggcgaggattccccgacgagggcaaaacaatgaaaaaggaagtgccaaagagattaatggcaattaaaaaaataaaaaatattttttaaatcagtaaaatttagaaaacggaggcaacgattaacaagctttacccgaagcgatagttgcaggtcgccaagcggagcgtgttgccacaaccgtttggccaactctttggccacgtcatgtttgaattgcagtgttggggccgagacgaatattcggttgctgacgaatttttgaaaatgccgcaattcatggcgaaatgctttcaaaatttcgtcattttttgtagtcccattttcattaaatgggacattcagaacttcattataccacctaaaatttaatataaatgttaattttaatctttacgtagttttgatggtttaaaaaatcgttataaattcacagcaaacaaaaaattgttaattaattaattattttaataagcgaacaattttttaatttaaaatatgtaaattaataattatttatattattttctttctatttaaatgtactaccgaaagaccataaatacaacgtccggtttggtttgttctacgatattcctcacagtacgtgtgaaaaacgggcacggaatgatatggccggggtcgaaagggatcaaatgctcgggcatggcgattggcatacagcctatgaaatactatataaatataatacttcgtcaagacagacctaaaaaatagagaatttgttggaaatttactaatttttttcaatggattaaaaaataccataaaaatagaaaatttaattctaatatgtaatttcaatgtaaaaaattctcatcgcaaaaaacattatacatttgttaggtgtcttgtaacaaaataatatccaattttgtaattttttaggatttgctcacatttgatatatcaaatcaaattatgcctaaaagatttttgatttttaaaataaaaatattcctttttgctaaaaaaacaattttctggttttaggacaattgttgcggatttttgtccccggttttgtcctttttgcctcgcttacccggcattgtaaatacttgaaaatcgtggtaataagcattcatttcctctcccaattcacgcgccaccacatcggcatgactgttgccgacaagaaggacagtgccattcccggtcccctgaaatttcaaaacaatttcagtaaggttttcgatttataaatatttttactacttaaactagagttcgacttattggaaaagcctgtgtctgtattccccggtttattctaaaacctatttaatattcagaaaccaataattattaataatttatttaataatttttaaaaaaaacaatctgtacaggcattaattactctttttgaattaccttaactttacggtcaataacaaattttaacagattttgaggtgttttgttcccttcttgtactaataattgctttaattgttttgtccatcgctccgtccgttcttctccgggtaggattttataacggtccttaattaatttatattttattaaactttaaaaattagttaaatttggctgtttctaagaaaattatcaagtgttgaatctacaaaaaaattgatggcgcaagacataataagtcat

SEQ ID NO: 3656 - DNA, 1489 bp, Heterodera glycines
  unsure (1)..(1489): unsure at all n locations
ctgtccgacctttgtcagcctttgttggccatgtcccagcacataaggccaaccaatttggtcaacgctttccgctgtctcatttgtttccttttcattttgttggtcgccggtgttgaaaaatggacaannanttccggcaaaaaattgccacaggcgacaaaccataaggccaaaagagagggcaggcattacagtagtgagcagttgtgtaccaataaccgatgcaagaagtacggtggagcagaagaaatggcgcagcaaacgggcggtgtaagccgccgaagtgacagcagcaaaagcatggccaacggggcgagcaggtaaaattgcatttccacgccaagggaccaacagtggaggaagggacggtaggagaacaccttttggggacgaacgaaattgggtactgtaagcaatactgtagtagcatatttcgattatggcttctactcctaattctttttgacaccaattttgcattggtttttgctatagatcatgtctctaaattgagtgtcaaaaagcgtaaacaatttgaatttttggcaatagttcaaaatttatttaaaatggccaaaacatttaattctgacctaaagaccaatttatgaataaaattttgctatttttgagtaaaaaaatctatttcaaaattacctctgcgaaatagtcgttgttttcaaacaccggttggatatttgcgacgaatgccaatgcccagtacatgtcaaagcgtgccttttggaagtccgagtcgagcattattgttcgagaaacgctacaaattaataaattaataaaacaatttgacgaattttgtggttacctcaaagtgccacaaatgactgcgacatacattggcacaattcgctttacacgacgggcataaaactggaacaatttgttccgaattttatctgatttggcgccacaacatttgccagaaaaatttgctagacaaacggccatcagatgaccagaaatgacgaaaaacctaaaaacgagttaaaaatgttatttaactgagtaagataaaacaacacgaaaatcgaaatgcttatggaagagaaattccgatattctcagaactttttaatatttaatgctttttcagagattaccgacggagtgaaattataatcaaaaaatgattttttctaattgaaattttgtcgtattctgacattatgctttaggaaaaaacttattttaattattttatttttactgacacgtcaacgccgagaaacccattgggaaaatgtgtaggccaaatatggtagaaaatgactgccaaaatggagacggtgcgaagtccttggatgtcggcacgtttcatttggcataaaattagataatttaattattttctattttagttctaaaattaaattttaaatatttctcaagcaataatcttttattttttaaattaatgcatttatctttttaattctttatcttttatgtgaattaattaaatggt

SEQ ID NO: 3657 - DNA, 1396 bp, Heterodera glycines
  unsure (1)..(1396): unsure at all n locations
actgttggcagcaatgagcgncaatttggaaaaccaaaacgctttttgtgcactgcaacatcgcctgcggcgttcctaaaatataacttgaatctattgtaatgttagttattcttttttaatgaaatggtttatgactgcgttaagagtgattccctattcgttaaaaattaatgacgatttttaaattcccttagagttactgtaacaaaaaaacttatttatttgaattcctatctgttaattagcagaaaaatgaaattggttgacttttttatttgaagaatgttttttaaattgtagataaaaatgaaaataattgcctaatttaacagcgcctcagaaaggacggtgtttggccttcgttttctctgataagtgagccgattgtgagatggcctgtttggtcttatgacaatcaaaactgttaaatctgctaatagggcccggaaatttcaaatttgcgaatcccctgggggattgtaaatgctgctaaaacataaattaaaattgattcgtgaattgaataagacaaatgtagaccattgacgtgttgtcgaatgagaaaaaaaaatacacgaaaacgagagattcaacggcactggattaatagtgctgttcaagaccgaaaatttccagagactcaagaccgagagttgccacggagacaagacaccgagacttgaccccgagacgactagagaccgtgagcattaatccgagagagacattctggagtcgagaccgatttgagtctttcttaacaatttttttttattagtgaaaaagctaatgcatttttgattctaagataaaatataccggtagcgcagcgggagggtcacaggattttagcttggatatgataccgccgcactagacgacaaattttttgcttttcattccatttttgcggcgcactttttaaagaatgggagagtggaaagacaaatagagagagaaaaaatttatatttcagacttttcggtttcgctgactacgaatctggcttccttttctataaattgccgaacccctaccttctaattcgcgatcaattcactgcgttctgcgcaacttcaaaaatcgcttagatttcaacacattcactgcaaaataaattttatttcaagttaatattttttaaattatataataaattcaacacggcttcctttggcaaattcaccaaaaagcacaacaagcaccaaatgcagcataaaaaaggggccaagcacaatgagagataaaataaaccaaatgtagtgctgtcaatgaatcattcgtctgacttttaaatgaaaaaattaataaatataaaactgaaaaaaatcacgcacataatacgncatataattattataaatanataataaagcaccaaggggtatggatg

SEQ ID NO: 3658 - DNA, 952 bp, Heterodera glycines
ctgtccaatgcatttggttgggtactgctgtttgctcaatgtttggcatggctttgtgaattcggccttgggatgcctgatgagggacgacaacaatcatcaaaatcacaatttttaacaaaatgtatgatgtttttttaatatattttttgttctgttcgtcattggcatgttacccgtggtgttgacgagatgaagttcttcgttcgtccgaagggagagtgactcccgaaggagtcggccaaatttgccccaaggcgggcagtgtctaataaatatgcgcataatttttaatgtcacttattttggcgttctgtttttttggggattttcaaaaaaagaatgcagcggcacggcgcgccaacgattcgtcaactcagtcaaaaattgtttcaaagtttccattgcttctatggcgcttaacaaaattaattataacactcattattagactaatttagaaagaaaaatttattcaaaaagttgtataaaacgaattttactaaaccaaaattctaaacaaaaaacgtatcaatatgatgatcatcgtgagattagggtaaacaaatttcggaaaaagtgaagaatacttacgggattgaaacttttattgttcaacccctccaaaaaggggcctttaattagagagggccttcaaatagagaaagtacggtatataatgttgtgtaggctgccaggggcttgaaaaaacttaattttgaacccaatttttgacataggcgcaaatcgggtaaacgaatcccgagctaaaaattaactaccaatttttaaaatttttattaaacaacgtcctaaaaatttagagagtcatgggcctcggcccaaaaaccggggccgggattcccggtcccgggataaagccccgttccattttccatgtcacggctccaacgtttcgaaattctggtctctactatttatttgaaataat

SEQ ID NO: 3659 - DNA, 746 bp, Heterodera glycines
  unsure (1)..(746): unsure at all n locations
acatcatggggcttctttcaccaatgggcgngacctaccttcttttgttttgttttgttgtttattccaatggcatcgcttcctcccagctttgccgtcgatgtgcctcctctcaccgccgcgtgtctgaccacttggtcgaaaaaagtgcacaaaaccatccgattggtagtgcctggggcaataggcttccgcgcgtccagtgaaatgtgttcatacgagcgcagtaattgagaaagaccacgtgcacgggttgaaccgcgttggtcagcgccggtccctggggggggggggggaatgggaaaagataataatggaaaagggcattcaaaaaaagtattcgaatttatacttaaaatttgaaaatttcttcgctttgccattaagaaaagacagagttccatatttattaatctgaagacccgatccagtaaaaaatttagggaacccgaaagcattttttctttgctctcccaatcgtaaatgttttattttccaaatttggtaccatatgtgaattattggaatttttgaccattttgggatctaatttggaaaaaatatgcacaaatttgtgacccggcagtgctgttaggaccgccggggaaaagttaaagaattttggatcgattattaagaaaagcgaggtaaatttgaaaaaaatgttacataattttcttgtttttattttttccttttttagggggtggcggcaatttccccccttcccaccccctgggtgcggg

SEQ ID NO: 3660 - DNA, 2036 bp, Heterodera glycines
ctgaaactggttacatttacatttggtgaaaataagaatttaaacaatacccaccgacaatgagaattgggatggtgtaaactctgtccatgtccaatgcgataaagcgctccccgcttccgccgtcaaagctcctctccggcgatacgatggaggaggcgtcgctcatgcttaggttgggcgaggagaccaatcgcgaggagttcagcccatggcgacggtggcgagtgctgtgccgttttgagcatcgtttcgcccttttttttgcattgtctcctcacatttgagcatacaaaagatccacccaaagtgccaaattctgctcactccgcacattgttaaggtcgtgcaccaaaacgactccgtccgccccgtccataaacactgcactcgccttgcgatgtgaatttgagccgcccacatcccaaaactccaacagttcagtggcctcattcggagttccggcttgaaactgatgggggaaaatctgcgaaaagggagggcaccatcaaagaactccaaactgaaaatcaaatgccttggcccaagcaattgaacgttttaccgaaacaaggcacagacaacaacgacccacctgaactgtgcagccgagcgtgctttgcggtggtgagccaatgccacagagcgaattaaccagcgaagttttgccgacggaggaatcgccgaggaaaagaattttatgatgactgttcattttcactaaaataaaaaaatcggtaaatacaaaaaaaaataaatttggcaataaaatcagaacaaattacatcgtattgtataatagtatagggatttgatttctgaagatatttttatatgttgtgtttcttattacaataataaaaagacaatatttgcataataacaaaaggacaatcgaaataaagccataacaaaaagcgagatgatcaccaacataatcgacaacaatgtaatattaatgcttgtacgaacaaatgtgcgcttccaacggacaactgaaacattttgtcaaaatatatacgataatattaaatcaatgtttaaattattaaataaaaaattgaattaaatttgacccgtcgggatgcaatcggtggaaaaagcaatggctccgcgggggctttcctccacttttccgtgcgaattcttcgtttacagtgctccattttcgcattgaaacaatgcctttgatgacacagaaaatttggtgttgattgcgtaagaaagtctgaagtcctttgtcctggttggccaacattcgccggtcgtcggccgtgagaagtttttgggccaacaattgtaaagaaatgcttccgccacaacgccacccactgaaagattcaattggaaatataaaccaaatacaattaatagggctgtgaaagctcaaaaaacgcatttctgcattaaaaattttcgattctgatgtcattatcggtcactagaaatcagtattttggagcttcgtcactaaaatagtgaaaagtcactatttcggcattttttggaaaatttctcaataaaaatgcaataaaaacgaagattgcacacctaaaaatcacttaaaaaatttcagagaaatacacccctaaaaataaatgcaaaaatttttataaaatacactcctaattaatgaaaaaattttctcaaaaattcattttcttggcaagaatttttaatttttaaaattatttgttaggtacctatttttggttttttgcccttaaaaatctcagtcctactcattttcaactgcaactggtgaataaaaaatattttacttaatttttggctaaaaattaggtcattatttcgaactttttgccactattttggcatttttactcactcttttagttaactatttcgagatctttagtcactaaagtcgcagccttaacaattagtaataaaacatactcaatgttttctcctggggcaattttgatcagacaattcacaattcgtttaaccaaatccattcggtactcaaatagcaattttgagcaattgcgcacctaatgtaagaataacaa

SEQ ID NO: 3661 - DNA, 4593 bp, Heterodera glycines
  unsure (1)..(4593): unsure at all n locations
cattcgccggtcgtcgccgntgagaagtttttgggccaacaatgtaaaagaaatgcttccgccacaacgccacncactgaaagattcaattggaaatataaaccaaatacaattaatagggctgtgaaagctcaaaaaacgcatttctgcattaaaaattttcgattctgatgtcattatcggtcactagaaatcagtattttggagcttcgtcactaaaatagtgaaaagtcactattttggcattttgtcactatttcggcattttttggaaaatttctcaataaaaatgcaataaaaacgaaaattgcacacctaaaaatcacttaaaaaatttcagagaaatacacccctaaaaataaatgcaaaaatttttataaaatacactcctaattaatgaaaaaattttctcaagaattcattttcttggcaagaatttttaatttttaaaattattttttaggtacctatttttggttttttgcccttaaaaatctcagtcctactcatttgcaactgcaactggtgaataaaaaatattttacttaatttttggctaaaaattaggtcattatttcgaaatttttgccactattttggcatttttactcactcttttagttaactatttcgagatctttagtcactaaagtcgcagccttaacaattagtaataaaacatactcaatgttttctcctggggcaatttcgatcagacaattcacaattcgtttaaccaaatccattcggtactcaaatggcaattttgagcaattgcgcacctaattgtaagaataacaaaattaatgacagcatttttgaagagttgacctgttctttggagggacgaggcgtaaaaatgtcctttgtgccaattttagccaaagataaaaggccattgatggcggcttcaatgcgctccgatgagccaaggccatcggcagggacaacaccgaccaaacatttctaaaaataaagccgaatgaccggacatttttaataaaatacgacaaaattacgcgttttcgagaaggaattttcagttgatcaatttccactttgaaaccgagttggtggcaaatatgttcaatgtaggcaaagtgttgttccgcaattcccttcggcgccccggctgccaaagccttttcggatggcatttttttggaatatttgccaaaaaaatcataagtgcagcatggcaaaaggaaaaaattgcaacgaagtctgaaaatgttaacggattcgaaaaactttgaggatgaaaattgacaccttgcagcgatcactggtatccacggggtcaattcgtcgctatgatttccgatcaaaaagtcgacccctttcaaatgctccgcaacggaatcgcgggaggagggatcgaacttcgtttctctcaaatctgctccttgcatacgaaattgctcccaaatattcctttcgcgcacgtccaagcccaacccacggaagccgtgacagctgagcagaaagacaagcagtccattgccacagccgaggtcagcaaattgtttggagggaccgatgccgtaactttgccaaagttcgagaagatacgcgacaatcccgcaatcttcgtaaacgaatttgctagggtccgtcttttcagtccacgccttaaataaaagaagctaaataaacagcaaattcagaattaatttatttattccacaaaaaaaaactttaatttataaaattcactattcttctctacaaaaatatttcacatggcaggaaagatgaagtacataaaaaatgtgaaaaaggaagtaatttcattttcgaagttttttggttttcgcatacacctgtcagaaacctaccaacttaaaaaaattattaaaaataaatgagcgattgaatctcagcgagcttccaattctacggattaaaaaattttgaagatattaccgaagcgatccttttgccgaaagcgttcttaatttctttgtatctgctgcagtacatctcatccggcagaagcttattggacattgcttttgtaattgcggttctcaatcgaaaaagttttttctttacatatgaaaatttgtctatgagatagacattaaaagtaaacaacggattacaaacgattctctatattctaggttcaaaaacaactctttattaaatttaaagatgaaaatgtgtcaaaattggagatatttgtatcgcttcgttggcacattctgcccgacttccgtttgcctttggtatccgtaccctttgagcaattcttcggcatttgaatgcattcgttttgagcctggtaaatggttttcggcagctaacggaggagaggattgagctggcggtggtggcggtggagaaaacaaaagagacgtattcgtcgaagacgaagaacggacagaaaaagggactgattgtgagacattttggggaatggcattaacaggcgaaaactgttgaccaactgaaaagaaacaaaggtaaacaagagaaaataagtgaaggaaaacgacagaaataagcagtcggtggaatgaagcccatttgctgctgttgagccgctgcccgcgtcgcctcctccttttgctgttggatttgccgtttttgccgaatgatttcctgccgagagataatttttttggcataaatacgcactccctgcaaaaattgcaaggcgcctctcgcgatgcaacgttcgactgaaagttcgtcaagaaaatcaacgatccaatactcattgacgggattttgctttgcttcctccgacgaagttgagaattgttggacaatttctttgacaatgccaaaagagctgagatagccgaaaattgcgggttcagataaatcgtttcgcgttgcctcagcgatattgtagacgattaacaaacgtcgagactgaagtattttcggcaaatcgtcggattggtcgcaatatgatgaagaggacgacgaaaccatcgtggaaacaacaatctgtaaaagaaaattaaatggaatgaaatcgtatcggcgcaataggacctcactagttgggaaagcgggccgaacgtcaattttatggtgtccaatgtaatgaggacgaccatttaaaatggcttgagctgacgatggcaaggcgtaagtgataaagccgaagccgcgactcattccattttttgagtccttcagaatttgacattttgtgatctcaccataagcagtgcaatatttgtagatggtgaattcctccaaatcacttgtcaaattgtttataaaaacacgatttgttggttgagatgcttcgacagctttgggctcattttccgcagaaatataatgtgacatgaaatagcttaatcaatgataaccaattaaaaaataactcacaaataaatttaaaatagattgacacaaaattgaaaaatcactaagcacacttggaaatcctgacaacacatacatatgcttatgcatatgtaatttctttccctactcaataaaatatatttcgatttaattaataaattcttttttccaatttgataaaactaattgtaaaaaattattgttttttttctatttttttagattaatcaacatagctatgcctaagcgttcaattggatctgaagacagtgaggatgaacttagagaaagtccaagtgggccgaacggagagtcaccatgtgccaaaaggagaaaatgcgtcgaatttgagccagtcaggatttgcagcataggaagcgtggtgagttttaactttttgtataggtaaatcaagttttacttaagaaagaaatcgaaaatagagttctgcttgcacagcattacaaactttgcgaaagatttcgactgaaggagaagatcagattagagttggagaagcgaattgaagggtttgaacgtcgtcagatccaagacgatgcggtgatgtgtatcatcaaccgatactggaacagagtgtgttttagttagatgaaaccattttagttcatcatatgttatctaatttcattttcccaatttagttggatgaggaaattcaacttttgttacaacgatttgacagagaaacagcacaaattgacactgagatgaaaggtggacaattgaccttgtttagcatacctaaactattagcaagcaaaccaaagggctttttaatttttgataaaatttaaataggaattaaacttaaataatgaatgagttgagcctgaataaatttgatggatttttctgtaagatgaaacggcgaatagcactcagcaagacgacacacatttcctcagtgtaattgctcaatggacttgtgaagagatggacgaaaagctgaaacaacgcgtcgaatttagtcagcgatcgctcgcaaaattagtgcaaacattcagcagaattgacgagcgaaatgggcgaatcatagcactgctgcgaggtttgttaattccaaatgtttgtcggttatttatgagtttaggcgatggcgaaacatcagtggaaaccgacattaatgacgagacgaatctcggaactgaaaaggacaagaaaaagggtaagacaatgtctaattgcaagacaccgacgatttgctaaaaaatttgaaaattctgaagcatcgccaacttt

SEQ ID NO: 3662 - DNA, 8546 bp, Heterodera glycines
gcccgggatgttgatgggaggcatccttccgtttggttgcattttcatccaactcttcttcattctgaacagtatttggtctcatgaagtatgcaagagggattctttcatttgctcacattttttaatgttttgattagtttttatattcttatttgcaggtgttctatatgttcggctttttgtttgtcgtcttcctcattctgattgttacttgttctgaagcaacaattcttttagcttacttccatctttgcgccgaggtaattatttttaaacaataatacacaaaattacgtgaactgcaataccgcgtgggatcccgcaaactttaaatgcttgattgcgtgattaatcccatgtgatcttgtccagcaaaaaaaaaattttaatttgttaggattaccattggtggttccgttcctttatgacttccggatttactgctgtctatttgttcatctactgcattcactacttcaactcaaaactcaccatcactggtgtatgtgttcattgaaaactgagtttcaattactattcttaatattttaggtcgtatctaccatcctctacttcagctatacttcgatttttgtctttttgttcttcttaatgaccggttagaaaaattttggtatcttaattcatttctcttcagggaccatgggatttttcgcaacttattggttcatctacaaaatctacagttcagtgaaagtcgattaaagatgtaaatttgatttgtgattagaatacatgttaattttttttggtcattggtttttgagcaatgatgggcttctttcaatgtttaatatatttttgtttcccttgtcttaatgttttttttataaatgtgattagaagtcgaagttcggataactatgaaaggagatattccccaaaaaatggcatgggacgagtcaatagcactcgtacaaaaggcaactcgtacactgttgtacaaaggaaacttgtactaaagtcaactcgtaaaagcttaagcctaaacctagatccaagcaagcataggcctagcctaaaccttaggcctaacctaagcaattgtatgagttgtaaattcgatttaaatcaaagcaaacgcgagtcaattttgggctcccagtgtaaataattttttttttattcagaacgccaaaattctgcataaaattttttggggttttcccttgtaaaaacgcaagagccgatctcgagttaaaatatgtataacttccaaaaataaacagggacggcccgagccggtcagttatctgtccggttctttcaaaattccgggctctagaatttattttccctgtctgtgttgattatttttttataaatttgaaaatttgtttattatgccaattgattaatttttttttttgaaaaatttcgcctgtttgagtagctgcagtgaagcacacgtgtaacctgttgctttataaagatcatataaacgcttttgcgtccgtattgggctgtgtctgttgagtgggcggtagggggaagggaaggctgacttagggaagacagccgaaagttacacaaatggattaaacattcgataataatgcagtgaaaacaaaaatgaatttgcagcagcgcaaatcaaaaatggcaaatgctcggcgttctgattttggcgaagaatttgtggaaaggcttagaaaagaccgcttccgaaaggcgtacattttggtgaatggacttagcagtggcgacgaggaagaggacgaagaagagctttgttttgaggatgaggacgacgaaattgtcagttgcattggtggggtgggtgccacttttgtgttggttgtcaatcctccctggggttgctttgaatgtctcatgccatgcccatgcaattgcattttttcaggccagttacactttggatcccccgcgtccccctccctccgtccattcctcgcgccgtccaccctccgtagccaatagccaacgtgccggcggagcctctggctttgatgcgcgagacttgtactttttcggggttttatccgaacttaccgacaaatttacaccggtttgttatgttttttgtgtgtttattcaacaatcttttcccaggaacggacagcccgtctcatggccaaaacccctccgcctgcggactttcgctcgctcgtctctatcgaacgggtcgcatatttgctgttcttttcgctgtacggccgatatttgagtgttggcaagtttcacaatgttttcaatcgcgagtttttcaaatacacaagtgccggagattcggagagagtcgctttccttaaggtgccatcgccaatttatgggaagggacagcaaataatatccatctttcagatttgtcgaataactttcgaggaatacaagcgaagagtaattgaacacaacaaacgggcctacaaactctcacaaaagcatctgttcagcgatgggcgggcgagtcccgacagtcggtgggacaaagcgcgagtgacttgtctgattttgctgtttaaggttaagcgatcgaccaagcatagaaagcgaggacgtgaacagcaccgactcgctggctaaaggtcggaaaggatcgccatcgcctctttttggccctgactactaacaagggaaccacccgaactaaaaattcacaatagaagtcgaccctgctctatccaatgataccaaacaaatttatatacgttttccgagttacagttcgggtggttcccttgtaagtcgttcaataaaaatgaattattttccttccttccaaaaattattagtaaaaataaaaggtaataataaagtttattcccttcccttcgaaaaatttttagaaacgaagtgaaagacattattgcttcaataaaaatcattcaaactaatcattcaaaactattagactaaaatgaaatcgaagtatttgagtttttgactttacgaatttcggtccggggttcggaattggttgaaatggatccccgaaaaacacttggaaatatgtttccagcctcatctttatgaaacgacttagtaattgcctcttttagttcaaattggcgttttctcctttccgtttagaattgatgtttttccgttttccccacactcccgttcggtttggccgtggtggaagaataatttacgtggacccaacccgctcagttagcactgtctgtattgaagacctgaagcgtttcattaaagatgctgaaggacggagatacgtcgaaattttggaaagttttaaaggttggcttttgccttttcaatgtcggcctaattttcactgtttccacaggccctttgcttgtcggtcacactccgtctcaaacgccgctgctattcatccaatgccaaatcaatcggctcctccaatcggatgtttaccgtgccaatccctcttccggtgatgccaatgattgtctgctcatttggagtctgctcgaaatgctcattcgccaacacggagtgcgcttttctcgatttgttcatttcgatccttacaattaattttcgtgcaaactgtataatacttgtggccgtttaatatatggataattccagaaagtgactggccctgaccttgctcgtctgctttgttccaatcagccaaatcatttggccgctctccgaaaaaactttctcaaaactgacgctgactttgtgcggagttcttctgccatttctcgccaagactctgctgatgctgaaccatcccttgacatttccgccattgaacgaatgacacattttttgcttggcggtcacattgacgtatttcttaccattttttgccaatttatttttctctccaggaagccattgacagtgccatcagcgacggacttctattcgacgcgcttttgctggcccatcgtttgtttcgcgacgacaaggaccgtttggaagcggttgaggggcgtttgatggcttataggtcgcccgatcatccgatcaccaccctgttgagcgtcgcagccgatcagcccgtccctttactggttggttttgcgtttcttacggaacctttcttttccaacttgacatttcccttcagaccaatccaacttcatatgaaaccaacggttggcgttcgcacattgcaattgttcttgccaacttacaaagtccgactgcgatgaacgccgtttatcagcttggcctggctttggcacaaaaggaattcaattcggcagctgatttctgttttcttgcagtaaatttgttgtacggattcgattgcttccaagaacaacaatcgtaaatttgaactcattcacctgtcattttttctttattttgactggaagtgatgaaaatcaccgccgtacaattcgtctgatcagcgccactttgcctgacgatggggcaaattcattccttacgcgttttgggttcgattgatcttttgcggaacacattgttcttttcagctggtctattttggattatcaggcgaccgaactgttcgatttcgccctgcaattagccaacccaaacagtcccactttgttgtccaaatcccattattatgcaaaggttcgtcttcaatacgcgcaattgttggatgaattgggcggattcaaacatgcggttgagctctatcgactcggtaggatttacttattttgttgctccaaagaaggaattggtgtggagtgttagttcggactacattcattttctgataaatttcagagaattccaaccattcgaagacaccgtcgcctcctccactcgttccttctgttcacaaaaccaaattagctcatctcaaaaggcaggaccatgagccaacacctgccgttgctcctgctccacctacttttctaccagtgcagttgcagtcggcatccaaagaggaccatgcgccaaccccttttgccgttgctcctgcttcacatactttccaaccagtgcagtcggcctccacgcagggccaagagccaacggcttttgcagttgctcctgcttcacaaactttcctaccagtgcagttgcagtcggcctccaaaccggaccatgagccaaccccttttgccgttgctcctgttccacatactttccaaccagtgcagtcggcctccagtcaagaccacgagccaacactttttgctgatgcccctgttccacatactttacaatcagttcagtcggcctccatgcaggaccaagagccaatggtttttgccgttccttctgctccacatactactttcctaccggttcagtcggcctcaaaaggaattccggatcactctgttcgttcgcccaacagttttgacggtgagacggcattttgggtggatagataacatacatgaaaaaagagagggcgggggggggggggtcagaaacttgcctttaggaaatacccccctcctgtctacctatgatagataagcagcctttagataggcccgtatagaaacatttgaaaccaatagttcggcagtgcggacatgctcctcctgagaaattttgttggatcttttgttgagaaaatttctccaaatttttacaaattgtcagattgagagtaacccccccccctcccaaccgccctggtaataagccgtttggctttttttctcacaaccaattttttgttatttaagatcactatgaatataagcaccgcccttcgaggagtccgtccccgtcctccgctgccattttgacacattcttccaatgtctcttctaatcataaatttgtggaagattccaaaaagagcgaaagtggtggtggtggcggaaaaggatttcttcgcggctttctctcgaagattaaagcgcctatggagtctaaagaaatgaaactgccgaaggacaataacccgaaggtattattgaatcggtcgatttgaccaacctttccgaaattggtaaaatgcttttgctttgactgctatttcggtgttcagattgtgtgggactcgcagttgggccgttacgtcgaccaggaacaagaacagcaaccacaagaggagctcgcgccccctcctatcatgccgacatatcagccgcaacagtggcaacaaataacccaaccagcggagcagcagcaaccgccaacagcgccgtctgttggccgtgctttccaaggagtaaaagtcggtcgaacgccaaccaaatttatttgttattttagaagtcgagatatgccaatgcatggaattcgtaaaacgcataagaataaagcagttgttgtgattaattgactttctcttagtttctaacggatttacagtcattgtgaataaataagaatcaaaactttttcgctacaatgtgatttttaattcatgggaagatgataaatttctggcataattattgcatttttttatctcgaatagacatttactcatcttggctgaaatgcacgaccgtaacatttttaaactttgcccgcctaattatgaactccttgcaaggaaataccacgatttcagagtcaaatgttttattggggcgggtggaaaggtaactatcgaaaatgtcctcatttttgctctgcatattttggtgtctttttaggtttgtgtgaatttcgcagatgctgagtccgtgcgtttgttgtcccaaattttgctgattgaatacttccaattgaatgtccaacttccaattggtcatctcgtgccgcgcgtccctcagcgattaaattacattttattagtggaggatttgatttgcaaaaataacttcgatacttccaacgtttgggggtttgacattggtactaatctctctctgactcggataacttaataatttctgggacgggtgcttcgtgcatatttccgcttttgggggcacgtctcaatggatggaattttgtggcgacagaagtggacgcgaattcattcgcttacgcagcacagaacgtcgaccgaaacaatttgaaaggacggattttagtggagcaaacggagggaaattcgcttctgaaagttattgtgtgtcttattttagtgatcgggtaattcggttcaggaagtgatgtcgaagggaccgcacaaagacaaaaagtttactttttctatgtgtaacccgccattttttgaccccgacgaagccacgcaagttagtcataattggtataatccaattgcccacttaatcaagaaatttaccgtcaattccgctgggaatacaatgacaaatttgttagttagcgatcacaacaaccccccaggcaaatgcccgccccattctgccaccactgcaacgcgcacagaactttcttatgtggtactttttcgttcgctaaaaaggaagtgcttacattattagggaggtgaaagtgcttttatcatcaaaatgttagaagaaagcgtcgatttgagcaaatctttttggtatgatttgcattcattgggctgacaattacactaatctttttctttttttgttagtttttttacaacgatggttgggaaaatggcgagcttaaaactgcttaaggaggagctaaacagaagagaaattcggtggtctgtccactcattgtgccaagggaaaaccacgagatgggtaaacatggaaaaggcggagaaagaaactattcgattgttttttgtttaggttttgacgtggacatttttggatgacttcaaaattgaataaaataataataatttacctttcttatggcacaaaaattgatcatttttataatactattttaattgttgttttatttcaatttttgtttgattaacagaaatgaatcgtgctactgcaaacgaagtctccgtttttgacgattttcattctgacatagaaaagtcgaagaaaattaacaaagatcggttgtccaaattttgtcctaaacttttcaagaaggaaaatgggattggaatgtcttcaattgcttcggtgccttttgaagcacttttggccggtgaattcgtcttcccatgttcctccatccattcgtatgttcacaatgcctacaaatcgaagaatcccgcagaaattgcggatgaattggaattgttgctgaataaattaacggatttttgccgaagtgactccgactttgagaaggtgtgttcatttatttccaccacataatttccacaaaactgtttaggttctgaatttttctctcgcattgtccgattgttttggccgtttatttttcgattgcaaatcgctcgaattgaatatgaaattagtgcggatgcaggaaaaagttaaaaacctggttggcatttcaatacaaagacggttgaattactataaataacaaattaagacgtcagcacaatttttattcgcccagaatatggccctaatcaagaacaaagctgcttttgtcccctcatttgatgactgttcagattatattgtaaaagaaattcgaatgcgtgaactctaacaaatattttttgttctcgctaaatttttcttttgttaaaattctcaaattcgacgaataattttgattttcatacaattaggtacttataaaaatatcaataaagatatcgtactgagtgtcgtaatattccttattaaacccgttatagcaaccaa

SEQ ID NO: 3663 - DNA, 5352 bp, Heterodera glycines
  unsure (1)..(5352): unsure at all n locations
tgttgctgaagtaccatgccagcgtcgatgccaccacccattcggggctggcaccgctgcacgtggcggcattcatgggctgcatcaacattgtcatcttcctcatccaacaggtccccctcctgaaattttattttactaaaaaatttgtttattatttagagtttgtacgaaattatgaaaattttgaagaattttttggatattaaagaaaaattctttaaaaaaatccttaaaaattgtaaaaatatatacaaaaaaattgcgtaacagtccaaaatatgtaaaatatatttacatgattaaattatagaaaaatcagggaaagctaaaaaagtatgtaaataaaagtccaaaactttgttcgtaaacacaaaaaaaaagataaaaaaaagtttttttactactattttaagcatggaaaccccttgaaaaatatatttataaatatttagttataatttgcagccctattaattattttacataattgtgtttttttcagggggcaaatgtggactgtgaaacggtacgtggcgaaactccgcttcatctggccgccagggctaatcaaacggtgggcccaattatttattttattttgctaattatatatatttttttaacaaattatttttaaatgaacaattaatggaattccaaaaattgtttggctaattttgtgcaggacattgtgcgcgtgttggtgcgcaacaaggccaacgtggacgcgcaagcgcgcgagctgcagacgccgcttcacatcgctgtttgtgtctttaaataaaaaaatatatataataatattatgataaaatcttcgaagcagctcgtttccaccccgccgtcccttctccccgattttttttaaatttcaaaattagaaattttttataagaaatttcaagaaataaaatttgaaaatttattggtgattttttgatttttgaaaaatttattaattgattttttcaaaaattttcttcttgcattatttttattaaacaattttctatgattttttcttgtaaaattactgtttgaaattgtttttttttcggtgggtgcgtggtactgatacgagggggggggggggggggggggggataaatgcacccataaatttctacaatggttggagtcagtgccaaaaaaacacaaaatcgtgaatctaaatcccgaggcttcaaatttcaagaattcgatcatgatcaagtttaaatatataaagatttcatcagaaatactggcgatcactacatatatatatatatatatatatacatacttttcgaagaattaatgaatagaaaaaaattgcaaaatttcgatttcataattctgctgtttatgtctcattaattatgcttcttggcaatattcaggcacggcttggcaacgctgacattgtgatgattttgctgagcgctcatgccaatccgaacgcggcaacgcgcgaccaatacacgccactacacatcgcagcaaaggtaaatggagtgagtgggtgaacttttgatatataatttaaatattttggaaattaaataataaattgaaaaaatataaacaaatgaaattcaaatttttgtttttttattttcgcttcaaaaatttattgaaaaaatgaaattttctttttttcagatgagaaataataaaaattaatttagcattaaaaatagttttttaaactaaaaatgatttttaaaattatcattaaatgatttttaaaaaaatatattaatttagcataaaaatgattttttaaatgaaattaatttaggttttataagtgaaattatttacattaaaaatggtttttaaaaaatattaatttagcattaaaattatttttaaatgaaattaatttaacattaaaaatgtttttttttaaatttatcattataattggttttcttaaatattaattgggcatttaaaatgtcttttaataataaataaataaaaaaaattccttcccattgcaggagggccaagaggaggttgttcagctgttgctggagaaaaagtccaacaaaacgctgctgaccaagaagggcttctccccgcttcatttggctgccaaatatggcaattacgcggttgtccgtctgttgttggagcgtggcacacccgtggacattgagggcaaaaaccaagtgactccactgcacgtggccacccattacaacaacgaacgggtgagagggnagaaggggggagggaagggggaaaaggcataggttgggctgatcgagagtctcggcaaacgagttttatactatgcttgatcaattttttttttgtcgaaattttgactaaaaaatctcaaaattagtcattttgaaagggcgaatggcataggttagactgctcgagaatgagtctcctcggtaaacgagtcgagaaaatttttattcaacgcctgaccatttttttgccgaaaattttacataacgagggaggggtgtggagtggagaatggcatcgagagtctcagcaaatgagtcaagaaaatttcttaaaacgtctgaccaattttttgtcgaaaattttactaataaaagcctcatcagtggtcattttgaacgggttcgagggggagggcgggtggtactgctcgagagtctcggcaaatgcgtcaagataaatttttgttcaacgcctgaccaatttttttgtagaaaaattcgcaaaatttttcaaaatttgttattttgaacgggtgggagggaagggtaggcggaggaatggcaccggttggactgctcgagaggagtctcggcggtaaaaaaaaaagtcgagaaaatttcttggcgttttttgtggtttcataacttggctaaaatttcccactggcgactggaggcaccgcctgttgccttaaataaattttttaaattaaaattttagctagttgctaactttgttagttacctaaattaaaattcttaattagttgcaaactttttgttttcacgttcctcattccccctaaaggttgcccaacttttgcttgagcgcggtgcgcgtgccgacgcgtgtgcccgcaatggctacacaccgctgcacattgcggccaaaaagaaccaaatggaaattgcgcacgcactgctcgcctaccgcgcggtgccaaacgcggagagtcgtgccggcttcaccccgcttcatttggcatccgaggagggccatttacagatggccgcactgttgacggagaacggatcagaggtgattaaagatggggtggccaactttggttttttatgcgctgttcgagagtctcgaatcgataatagtctcgggttttttggtgtcggtctcgtgtctcagaaaatttttggtctcgatagcactggtatttggccatttaattaatggcctttgcaatttagcgcaatcctttttggcatttcattttttttcatataaattttaattcaaaatttagttttttggttaatttacaaaactccaattttaattttaatacttatatttcttcactgtcgttcaattaaaatgctttttatccatgatttccatacatttcactaacaaattgtttttttgatcaatcgaattttgatgaaattttattttgctgacatttggtggaggttcaaaatctctgagaccggccggcactatcgatttatcgatagaacttttcgatatatcctacgatattttaccgtacaaaatcgatcaattttgtattgtttgtgatttgcgatccgatctgagtgagcacagtgcaaaagctaaatagcacaacaaaatcaaaaatgcatcaaattattcaggtcaatgcccgcgcaaagaatggacttacgccgatgcatttgtgtgcgcaagaggaccgagtgcaagtggctgatcatttgttcaacaacgaggccgacattaatgcgcaaacaaacgccgggtgagtgagtgaattagtgagtgatcagtcagtcagtgcgggtggcccttttgggcaaggcattattttgtattatatgtataaaggtaaaattttgagcccatgttaatttgtctaatggataatctccattaaacccacattaattaggcaaattgggtaattagtaaattcttattaagagtggtagccatacacaggcaaatttaagagtaaaattgacgacagtacactacatttatttgtctaatggataatcccattacccaccttaattagtcaaaatggctaattagttgcatcatattaagaagagacccaaaaacacataattaattaataaatgggtgattagcatcataatatttaagataatattgaccataacagctttaatttatctaatgctatctatcattacacttatattaaaatgggtatttagcagcatcattaatgaattttactgcagctaattaatttatatatgtcgtatatcctaatacacatatatttcctttaaagaatataaaaattattatttcccgagcaattaaaaatgacataaaaaattcactgacatttttcacaccaattatttatttccttttttcatgcgattgtcggcttattattttgtgttcacattgtaatatttgacccatttttaatttctctctgtcgttgcattgaaaattttttgacattatttttctctttaccgaaaatctccgaaattcgaaaataaatttttcaataaatccgaaattcttttcgactcaatttttgttggaataaatgacctgttgacgtagagacaggcttgtaacagaaaaaattacggagtgaggaattcaaagactgcctgaacattttttttttttgcatctaatgaaattttggacctgtcaatagtgacaggagctgatgggtcaaatttttcaaatttttataaaactagtaagaatcaatatcaattttcctagaatgcacagctttttcatttcggggagggcacaattcatcccatcccctcttggttaagggcctgtatatataggtctacacagacactatcagaaaattttcttaaaattttaatgcaatttttctagtgttttttttcaaattttattattttttgttttcttattattttttccccgattttggcacaattaatattttttgtgttgttgttcagttacacgccgttgcatgtggcgtgccactttggccaaatgaacatggtccgctggttggtgtcgcatggggccaatgtgaacgcggagaccaagtccaactacacgccgttgcaccaggcggcccagcaagggcacaaccatgtggtccagtttctgttggacaatggcgcttcaccaaacacgcgaacggcggtcagattttcttatttttttgct

SEQ ID NO: 3664 - DNA, 2029 bp, Heterodera glycines
ttggagttgagcgcacaatttatgcattaatcttctatttatgaatgaatattaaatcaaaaacgaatttattcaaatttaaaaaatttttttttgataaaatgcaaatattagcattcgttatatactgggaattaaatttaaaaaatgcgcccacattctcataatttgaatgacattttttaaaattatgagattaaactttttacttatgaaattttttttctaatttatcactttttataaaatttggtttgactaaaagttagggaatgcaaaatgcaaaccggccccctggtccccaaatcaccaacatttttgcctacggtatcagttcggtgccgactgtttcggcgccgccaactttgaaatgccacaacatttttctttgccagttcacgtagcaaatctgggcaccatttgatagcacaatttgtgctatttgtaaaaaaaaagttatggcatgtagcgctgaaaaagctatgaaaaagtcaattttttcaccatattttttttgtaaattgatgaaattttttgaaatttagcttactaattgtgaaccttaataactatcgcatcatatcaaaaatttaatttggtttataatgaaaaaagtcattaccaactgcgccgaactgggcgtttcccttccatccacccggtctttctattcctcagttttttaaaaaaaatttttaaatttttttaagctctccaccctcttaatttcttccaattttccctcattttcccctcaaaaattgaccccccccccataaattgttttctgatgcccattgatcacaatggcaaataaattaatgcgcattgcttttgctttcactccaaattcaatggatgaatagtgcgtgaattatctattatattattctcagtcaatgcttttccccaccgccgccgccgccgcgcgacaattaaacaaaacgccaattcgcgcgatgcattcaaaaatccgccagtaattctcctctattcatcacagaaggggaggaggaggaaaagcgggcttaacaattcgaaaaatcacagagcgaaaaacaacaaacattttacatttgttgaaatttttaaatgttgttttttttgaaaaaaataaaatcttagcaaaaaataaaattaattgaaaaataaataaataaaattataatttagtttttataaaaatgattttaaattaatttcacaaattttcgagcaataaaaggccaaggatttggcatcaatgcggcaacttttagtgttgttgagtacataatgttgtaatttgtcctattttcgtccgcccaatccctctcataaactttttctatctatttttgggtacacgccaaaatctcgtcgcccgaaatctcaagcagaaattaaaaaaaaatttttttcaaggaaaaaaccttagaaaatttttataagaaaatttcaagaaaaaaaaattatttgttgtattatgaaatttatcataaaatttcaacaaaaaaatcgctgaaaatttccaattttttttctaagtttataaaaaaatttcaaagtttgtaattttttttcttgaaatttttgcggcgagattttgttccgtccacctatttttcatcccaaatcccaagccattctttctcctctcatttatcttttgccatttctatccatcctattcatctctgttgcaaatatgccatccattccatcaaaaattctctgtgttttgccgtccttactcctcacatcctaaccaaagttcatccccattgtatcagtttataactaagatgacaccgttggcggagtaggcaaaacggtcgtcagccgaaacgtcgtcgaacgaatttttcgaccataacttttttctttctcaaccaaattaaacattcttggtattattcgaaagcattcgaaaaatgctattagcctgcaaattttccaaaattttttatttatgcacaaaaaaatcagagcaaaaaaagttcgaattactggggtttttgattcccttctgggcataacttttttgaaa

SEQ ID NO: 3665 - DNA, 4637 bp, Heterodera glycines
tcccccccctttaccttattttttgaaaattttgaccttaaaaaggtaaaaattagtcctttaaaggatccttgttttttttttgctctccggcgctgaaattttttaaatttgaaatttttttttggcccgatggcaaaaaaattttttcgggttccgccctccgacttggtcagtgctgttcaatgcctttggcaaatgtcaacaatcctttccaactaactaattgcaccgaccaactcaaaatgctctgtgaattcttcttgaccaaattattaatcacggcttttaaaattcacaattattttgtcaatgcttttccttctagtaaattccctccttaaaaattgtaattttaaatggcttaaaagccacaaatccggggacacaattaattaatgacgagcgtttaggcgccgcttcgcggtttgaattttctactacaatcatctcgtttaaaattaaaaaaaaaacatactattttcaataaaacatccttaaaaatgaattttttcttgtcacttttcccaattttccgtccgtccgtcccacatgagcagcagcagcagaaagggtgtggtggtcgtgaaaaaaaataaataaactcctatttttggcaatgtgtgcttccgtccgtcccaccccccgggggttaagttaataatcgtattgatttggtgggaggctcgggattcagctgccaactcggccgggaacaacagtgcacagcaccagcaataaaatgccccaataaacattttcctctcccctctccatagtccccccccacatttgtttgtgcccatatttttgtgccgtctgtttttttgtcagggatgaaatatggtggtgtttttcagttttttggacactccaattttcggaaaatctagaaatcataaaaaataattaaattaaattacataccaaatttgacattcattaacttgtttttgctttgatgaatacaaaattcgtgattactaattaatccaaaaatcctaataaattcgtattttcgagttttttaatttttgaaataattcactcaaaaaattaatattaaaatattttaaataattcttattttattattttatgatttttaataaaattttcattcaataaaattaatattaaaatattttataaaattttttattttattgccctataatgtttaaagaaattttcttccagtaaaattaatattaaaatttttaattctaattttattatcatttaatttttttcatttaaatatcaaattacattgccccaaaaatttggttgaacagaatgtaccggccgcgtaaacaaattaaatttagttatatttgcgggcaaaacatagtacaaccccctaacacagagaatgtgtgagggatgggtaattcaatttgcccaattatttcgacaaaaatttagccacaaaattttctctcattttcgaaacaatgggcagtgaaattcgataatctttctaaagataacaaaaatttaaaaaaaaattctttttttttaaattatctctaattgattggttttaagtaaaatatttatgtggaaaattttttttaaaaacaaaaaggccattattaaaactattcaggcccgtagttagtattcatgttgcaacttttttataagttgtttaccaaaagcttctaagcatgtagagctttcgaatgatgccaaatttataaaaatttaccaccaatgaaaaatgttatgatgttttatgcttggccaactgacccctaccgaccaattccccattggctacgaagcctgaaactatttaaggcgttaaaaatcatcaaatgttttaaaaaaatttcttgccgagcttatcggcgccggcgcctcattaaattgaattaattaaattactttaaaacctttaaaacgtttaaaaggaattcttatgaaaaaatgattatgcgcccgtcctccatttttcagaatgttctcagactctgaggatgaagcggatgatcaccaggcggccgcggcggagcacgcgcgcgatttcaacgagtccatcacgcaagggctgcgcgactcggccgtcgtccacctgatccacaccggggagcagggcgtgggcggcaaaagcagcagctcaatggcatttgacaccacggacgctgacctggaggcggtgatcaaacgagcgcaggcaatcaataatcaatcaatcatttgattaagtatatcactgagacataggcaattaactaattggtacagaaactaataaataaaacacagttcatatgtcgggcgggaccctttttactcttcgaaagcctaatttttttttattgtggttgcacgccaaattttttgcacgctttggctgcaattaaaaaatggagagaagcggggtccggcacatgcctatttcgacgatggaaaattggaattttttgacagaatttataaagaaaatcgtcaaaagtttcccttttttacaagccctaccccttgcaacagacggcctttccccccccccctcgaataaatgcttttatttttcagaatgccccagtgacaacggcattagccgattccagctttgtggagaatgggaatgacgacaatgtggcactgagtcgccacgatctgatccaaccgaggtccttcctttttttgaaataaaattattttataaaataataaatttaaaaatattttttatttcagcaaattgttcatgaaaacgtgggtataagttgacaaagtttacttctttttttttcatgttttgatatttttttcgtgttttgtgttttaatcccgccaattttttattcaaaagcaattaaaattgtaattaaattattcgaattgattatcccttaaaatttttttcttccctggtgtggttttatactaaagtgccaaatgtgaattggtttaaattagagttcaacattttgaaaaaagcatggattcctggacaaaaatacaaaacattcaggctaactcgaggcctgaacctgagtttctggaaatttgttttaaaaagcaaacagaggtttgaaaaaaatcaattaattttgaacacctaaataactaattacataataaattctttttaaatctattctaatcattttttgaaaacttgaaaaaaaacatcggttatttgaaatgataaattctaaggttttgtctaaaaaatccaggttgccgaaatatggcaggacctgggttcaggaaaaaaaccaagcctgggtccaggtcgagctctagtttaaatctaaattaaaattttaaaaaaatatattttttccttttcgattttatttggcgcttttcatattttccccatttttctatacatacaattcactagcttttccgtctgtgttttgtacacttttttttgcttttttttcacacaacccattgtaattgttggcttaattaccccccccccccctaattaagctttctcgtctcatttttggtggatgcccgcgggggcgcaatgcgcggctgccgtcacagcggcgttcgtgtgattattccaccgcgcaaggcagcggcaccaattcgcatcacatgccgttacctaaagaaggtgaattaattaattaattgatcctttaatttcaatttttatacttatgaaattatttttgaatttgaattttcatttgaatttattatttataatctttgttttttttaattataactttttcgttttaattaattctaacaataattaattagcttcaattattttaattgttttgatcacttatgatcattcggcttaatacaaaataaaaattaaatttatttttgaataaaaaatttattcaatttttatttatgaatattatttttaattttgcgagaaaatcccaattttttaagttataataaacacaacaatttaaaattcttttttttaaagtaattattatattatttgtaatttctttattaaataaatttaccattttctcaaatttttaaaattgccaggaaaaactgactcatccgccgccgttgagcgagggcgaagcgcttgcctcgcgcattttggagatgggcccgcacggggccaaattccttggcccagtgattctcgaggtgccccattttgcgtcgttgcgcggccgggagagggaaattgtgattttgcgctcggacgatggccaacattggaaggagcaccaattggaagccaccgaagatgccgtacaggtggggccaagcacgaaattaactaattaagaaaaggaaattcgaaaaaataatggaaacaataaatttatttgatttgccaatttataaattagtgtgaaaaactgtttaaatgtggtgaaacagtcaaatttaaatatttattagcaaaaaaataaaaataaaatttaaattaaaattttgaaattgcttttttattcgttttttttaatttaacaaattactctttcggatatttgcaaaaaattaaatggacaattaaatattcgtcacagttttgctcaacatcaacctattttgcaatcttggttattacttttggtggctttaagtgtttctattagccttaacatttttttaaaataaattacaggaaaattatgaaaaaatattaccaatgaaatttgttg

SEQ ID NO: 3666 - DNA, 6046 bp, Heterodera glycines
  unsure (1)..(6046): unsure at all n locations
ttaaaatgtttttgcttagcaataagtaaaaaaatttccctattaaatcacgctaccccctttccgccctcccatctgatatgaaattcttaacgcttttttcttaattattattatttttttcatttatttccttatttttaactatcatcacctattattattattttactaaatttattttaatatttattttttctacaactcttcatctttcattaggcttgggttatgaccccaagtacctattttcccaccccctcctagtcgcccaccatgtcaccaccaccccctcaaataagttttgggttatacgaccaccatttggccaggttgccaactaaattgttcatgctatgccacactaccactaaaatgagtcgccgtctcaagcccagaatatctgatgttgggttttgcataggcacaactgtcacaattaatcacccttttgactcacagctgaaagttaaccggcaatagggaacagctacacactatctgtcccttcgaaaagggtcctttgacttggttcttttgcatgggcacactgtcacaataaatcacccccattgactcacagcttgacctcaattccaagtgggatattattgacacttccgtgggcattatacagtcaaaatgcgtccaaggggttattaatgaccattccattggctttggctcggtcagaaatacaccaaaagaattcccaaggggataattaatgaccactagcttcggttggacagacatgttcacaaaagaatggttaatggcgctcagttggcttttggtacaacagactccacatctcctaaggggatatttatgacactttcggaggcattagttagaaatgcactcaaaggaaagattaatgaccctccgtaggcttaggtttcggcagaaatgcactcaaaagaatgattaatgaccctccgtcggccctgcgttggtcaaaatgcacttaaaaggaatgttaatgactctctgtagactttgactactcaataggctttaggtctcagaactgaaatatcccgtgggcactgggagtgaaatggctaaacttaaaaaataactctggggctcaaatggcggcactgtaaaaataactctggggctcaaatggctgcgctgtaaaaataactctggggctcaaatggctgcgctgtaaaaataaatctggggctcaaatggcatacgcgagcgtttaaatggcacacacgcgggcgctcaggtggcatgcgtcccttgacgcccatcctctgcctccctttccttctctaataggatttgacctcgggttttatccttcagatgttttttcaattatttacctcttctgggattggatatatttattataggtgttttttaaaggtttaaatttggtactgaaatgtccctttccagtgggactgaaatggcggggctgaaatgcaacccccaaaatcttggggggtaactactaaattattccctttattatgtttaattatatttttaataattgtcaaaattgaatcagaaaagaaaacgctgcaacaaaagtcatttggcgaaatatttggagaaaaatgggaagaaaaagaagaagaaaaaagaaatgaactcaaaaaaagagaaataattgcaaaatattataaaataaaagaaaaaataaagcaaaaaggaagaaaatattcagcaaaagaatggaataaaattgacagaaaaatagcgaaaaaattgggaacaaatcgaaattatattcaaaaatggattaaagaaattggactttataaatatcacaaatcaaaaactgatgaacaaaatatgaatttttcaacgctttattgaaatgacaaatgaatataagcaaaaaagaaaatattcgccaaaagcatggcaccaaatttttgccgaaatttgtaagaaaattggagttggcattgggacaattgaaaaatggaagaaacattttggcattcgcagaaatgactgacaaagaaattgcaaaaattgtgaacacttctcaacagaatatttccaattggaaaaaacattttgtggctgaataaaatcattcgatttttagaattaacatgaaaacttttttgataaattttataaaaccatttaggtttgctgtttttttcaaatgtcgtaaatatactgaataaacagaaaactgaatacaaaaattcattaaagcgaataatgcctttttctctaatgagttaattatttttcaaaatttttccactttttccttattactccgattttaacccatttgtgctgtcttaattaatatactatacattcatgattaaatttggaagttgattccatgttggaactttcattttataaaaataattttataatcatttattcagttttttaatcagaaaaaaaatcatttatatgcctcaaaaaatgaattgcgatttaattgaataaaaaaataaaatcattttaagacgacaaaaaaatgaaattattccctttattatgtttaattatatttttaataattgtcaaaattgaatcagaaaagaaaaaattgcagcaaaagtcatttggcgaatatttggagaaaaatggtaatgttattttataagttaagaattaaaaaaatatatattttttttaaaaatattatttataatttattggattttttataaaaatccacaaaaaatagttaataaaaatttttttaggaagaaaaattggaagaaaaaagagaaacaattggaaaatattataaaataaaagagaaaattcagcaaaaaggaagaaaatattcaaaaaaagaatggcatcaaaattatgccgaaatttgcaagtgtagaacataaaaggtaactcgcccggtgggactcgaacccacgaccccagcaatccgtgccgtgctctaaccaactgagctacgggcgcctcttttagaggttctctcaggtcctttatcccactttctcccacactccgttccttctggcatcacacaagaatggagtaagccgagaaacaattaagaaatggaagaaacaatttggaattaacacaacaaacagcgcataacgaagaaagaaaaaaattaaaaagttttgacaaataaaaaaagaaaaacaaaaaatgaatgacaaaaaaaattgtaaaaatgttgaaaattcatagaaaaatcatgaaaatttgaaaaaaaatttggcgatgaacagatgatttagaagtacacaatttgatttaagaacgtgatttattttttgacaaaatttttaatattcttttaagcattaattttgcgcttttttaatggcataaacatgaaattaaaaaaaactgattaactaaacaaatccaatcgagctttccataaactattgtcttagactttcattaggcacccaaataagccaattaattaatggtaattattttatgcgagtctttggtttatttcaaatgccgatagtttattccttatcattggctaaatttcccttcggcaaataaaatatcatttacaaatgagtttttgatgatcaaattttcagtaattaattaattttgaacctaactctttctattattaataaaatcgcaccaaattttaattattacacgttaaaggcactctaatgtttaaatattaaaaatggtttataaattcgaaaaattgtttttcaataaatttatttttttgcttagatattaaatttggaaaagaaatattagttgatctctttattttattatttctttgcaattaaataggatttccttattttattcgttaattaatagaaatattatctttttcaatttttaatcagataaaattcataaagcgacacttgcgtcagaattaaaagaccaaaaaaataagtttggggtgtctacaatgacttttaaaatgcctattttgcctattttggactttttgtgctcatcgaattatataaattagcattacaaaaaaattaaattgtgaataaaatgcaattatgcattttattatttttatttttgattactctaattgatcaaattggtggaacagaaaagaaaaaattacaacagaaatcatttgacgtaatatttcgagaaaaatgggaagaaaaagaagaaaaacaacgaattgaagagaaaaaaagagaaaaaattggaaaattttataaaataaaagagaataaagcaaaaaggaagaaaatataaaaaaaaggaatggggaaaaatggaagaaacaatttggaattcgtgtaaaagaatacggaggaacaaaaaatggaaaaaaatgaaaatttattgggaaatgaaaagtgaaaatccaaaaatgagtgatagaagaaataaacgaggaatgaaaaagggataattaaattaaaaaattgtggcattttgttgtcctccttatttaattttattttcaccccatcagtttttgtgttcaccttattatattcattctcataatttgtgtatccattcaaagatgtcaatagtatagagcgtcaaaagcgagcgggttccgagcgggtgtttcccgcacgaacccgtgcctatgggagggggcatccctttgatgttgccgccccgcacaaacccgtgactatgggaggggtgcatccctttgattttgccgccacgcacaaacccgtgcctatgggaggggtgcagccctttgaagttgcggcccgctcatatcctgagtctatgggatgttctttgaactctgccgcctttcggattttaatttacccaaatccgtgcgggtgttttttcaccccgcgccgcacagcgccgcgggaaggtcatcaatcatccacctgtcaccaaagtgacaggtgaaggaaattcaatttttcttttgcaaattttaatcttttgtttcaaaaccttttggggctgtattattttctcaatcctgaatttttatgatgatttttctgatcctgaaattaaaaattctttttgaaaatttccacaaattgttgcgggttttttcacccgcaccgcgcagcgccgcgggaaggtcatcaatcatccatctgtcaccaaaagtgacaggtgaaggaaattcaattttttcttattgagggaccgtcccaataaatgaaaaatttttatcgtctccctaacttcttttgagccattttcaaataggggagaatatgatgatacatttcctctatttcagaattgtttttagttcccgtaattatgactttaccggtccagaaaattaacgctgtcatgcttttaccccgcttgaaatttaaaccgcaaaatatttctggttcataaaatgcacgacgattttttcgaaactcgttcagttcaatttcacgtccgaatttaaaggtcgaaacaatattttcaaccgtgtgtccggtgtaagaagccccggacaccccgagcccttaattatttctataaattttttaatagcattttcacagtctatcagacttttcgtccccaaacatatcattttcccggattcccataataatgccgtggctttgatggggcttatacatttgataaccgcggcattgaattttctagggttatacttaaattcgcattcggtgatcgtcagagagtttagtttaattccggtaccgagattagcgagagcaattatatttacgattatcggtttttgcatttttgatacaatgtaccaatcaaatggtcctttcactccctttatataccccttctataaatagcaaccaaaaataaaattaaattgaaaaatgaactgtccacataaaattaagtgttgtcattactgcccctgtcattacgagatgtgtaacagatgtaaaaaacacagtcttttgcatatncgtgcatcattttttgataatttctggttatgccccaaatgtgcgaaacatgttccctatgnaaagaaagttttccaatttagctttttttatttgtatccaaatccacaatcttggtatcattcgaaagatcttaacatgctctattagcctttttcaaaaatgcaaaagttttcaagcctgaaaaaatcttaatg

SEQ ID NO: 3667 - DNA, 4951 bp, Heterodera glycines
ttataaatacaattataagataataccccttaagaattatttcaaaaaaaatttttttgttcagaaataattttgctgaagaaatggaaaattataaattgatggattatcaaacgactacttgccaaaaatttggatttacgaaaaatattacggaatttcggatcaacccggacgtggaacgccccgatgaagcgatgaaggatgcgatcgacaacatgataaaggtggctttaaagactacggaagaaaaaatgaagcgaaaagtgcggatgtttggagttgcaattacgggtgccgggcttgctttcccggtgtgggtgccgtatcgggcgtacccccagaataatgcggatgttatcatggaggagattaataagctggggcagagcggggacggggatgaaaataagaaaatgctgttgctctcggagcctattacgatgaaaattacatgcgttacaatgcccagtggagaggggccgaggaatgtccacaaatttgactttggattcaaggaacaccagcggatagggtaagtgttttaataaaataaaattaaaatagaaaaaaactaaaataaaaaaatcaataaataaatttaaaataattatttctaaaaaatttaatgaagcacaaaaaaaaaacttaaaatatttatttttaaataatttaattaggcaaaaaaaagtaaattttaggattgtgaatactgataataaattttgccttttttacgcactggcgtcgtcgatgaattatttaattatggaccgttttgaatttaatcgatttatgaaaaatattgtgagacagagggatgcagctattgagcttttacgtaattgtggaattgatggaaacgaaattagttatggtgtggagcaattgccgaatgttcagaaatattgggtgggttaaatgaaaaaatgcaaaattaataaatttttcaggatgagatttacccaggaaagtaccgggttgtggcatttgagaagtcagctgatccgcggaaatcgatccgtgttttgtggaaggcccctatgggacgagagaaggtcgtaccgatatttttggagaatggtcactgggatggtctgaagaattatgtctgctttttcaaccgtgggagaaagttctgcgttgaatgtgaatgtttttacgatcaggatgtttatcatacgatggattgccgggcgagatgttattattgcaatagagtggggggaatgccatgtgaaaaggagagtggagtgaagattgaatgcccgaagtgtcgacgttacttttacaattgggagtgttataattatcatcagggacatcagacttgcaaattatggaggcgttgcgttatctgtgacaagacttatcgatttaacccgaagaaggaacatgaatgtggtgagacttattgccagctttgtagtgtgagccatgaccccaagcgggggtgttatattatgccgatcgaggagaaggaggaaaaatatgtctacagaattgtagtttgggtaagttctacaaataaaatcaacaaaaataagtctttaactccaggattcggagacttcgcaggattctatttacaagggggaccagaaggagcatgttattaattatatttcggtgagagttacgtgtacggaatgctgtgatgacaaaaacaggatgaattgcaaaatttgtggggagaagaggatcaaggattggagcgaggcggagggacatgagccgaccaaggattttgtggagtggattttaactgcttttacgaattacgatacgtacatatttgcacataacgccggacgttttgacggtaatttcaaaatttaatttttaaatcctaaatttttaggtcattttgtttttaattacctctgccgtaccgggaagaacccgataccgcttatcaatggattgaaaatttatgaatttaaagtgcgaaactcgaagaaacattcaatgctgatatggagagactcatgcttattaatgccggtgaaactcgagtcgcttaaggcgaccttcaatttgggctgtgaggacaagccctttttcccgtattactacaataagaaagaaaattatggagtttgtttggaacatctgccaccaatggaggactattcaccggggtctatgaacaaggagaaatttgcaaaatttgaaaaatggtaagaaaagaaggacaaatcataataaaaattctttttcaggtacaacgagaacaaggggacgcccttttatttggatgaagaattgagaaattattgcagaaacgacacggagatattgctgttatcgattattgagttcaggaggatattgattaacgatattactaagggatttgacccactaccgaggagttgtacgaatgcgggggttgcgatgaatatttttaaggcaatgtttttgttgacggagcagttatcgattgtgccggagaagggatatgagcggtgtgatagagcgagtgttatggccattaagtatttggagtggcggagcaagcgtgatgagattgagatacggcatgcggggaacggacgggaggtcaaagttgggaattacaaattggatggatttattgcgaataacggagctagggacaaatgcatcgaggttatgggatgttacatacatggatgtatgagctgttatgacccggcagcggaactgattggaggaaggacggcccaggaattgaatgatgagacgcaggagagattggcggagctgcggaagactttggacgtcgaagaagtttgggtaagtttatttgacatttacatttttattgtgaatttttagggctgtcaaattgagaaggagctgaaaaaggatgaagagatgcgggacttcttcgacgacagagggaatgagaaagggccgattgatccgcggatggcttatgcgggagggaggactgggccgatgaaattgtatgcaaaatcggatgagaagaaaaaaattagtgtttatgatattgtgagtctgtatccgtctgttaattacgttacagcttacccgattggattaccgcagattattatacggaagagcgatgagattgatgttaattggacgagaccagaggatttgaagtataagggattgtataaagtgagggtcaacccgccgcgggggttacgggttccggttttgcagctgaagtgtgatgaacgattattgtttccgtctatgttggagatgtgcgtcaaaatttaagaaggagactacgagatgtaattacaaatgccctcatgatggggcacagcggagatacgtggcgacatatactagcgttgaattggtaagaatttctaagaaaaaatttaaagaaaattaggacatttttcaggcaaaggcgttggaatgcggttatactgtggacagattttatagagcgtgacactacgaagaggaggcggatgatttattcaagggatacgtgcgattatttttgaagctgaaggaggaggcgagcggttttccgaagggagttgagacggaggagcagaaggatatgtggagagaagaatataaagaaaaatatggaatcgaaattgagttgactaaagtgaagaagaatccaggattgcggtacataagcaagttgatgctaaatagcttatgggtaagaaaattaaaaaataaatatatggtcattaattttaacttttagggtaagttttcgatgagaaattgtttgaacaagaatgcggtgattgatagggcgtcggaattttataaaattgtgtgtgatcataaaattgaattatgtgatattgttgaatattcggaagaggcgattagattgatatacagggacaaggaggactttgtgatggagcacaagtcgagcaacatagtcattagtttatggtgagttcaaaaaattataaatttgtatataacctaattttaggacgacgagtatggcgaggttaaaattattggaattcatgagagaagcggagagccatggcagggagattttgtacacggacacggacagtatttttgttaggcacgatcgggatgtggagccgatcacgacggggaaatatttgggagaaatgagcgaggaatacggcggctatgagattgaagaatattgttgcggaggggcgaagcagtacgcactgaagatgagaaacaagcagacgggggagatcgaatacgttatgaagattagagggattacgttcgatgtggacaacaggaaaacattgcactacgacacattcagggagatggttctgaactatgggaaaggggaggtggacccggcattcttcgtctataagaatgattttgggtgagtttttaaaaattatttgcttcagtaataaatcaatatttaggccaacgcgggattcgaaagtggtgacgagggagaagcataaaatgtacaggccggtctgccagaaggggatcatcgatgaggagcttaatgtgatgccatttggattttgttaattttgtatttttttttgttaaataaagttgaataaaaattaaagtgatattaggactagcgggggtggaacggtctaacgtgaaggcccactcctgttagccgtaatattttataaaaaatccaaaagttcaaggggaaaatagcatctatgaccgttattctggtacataattatgcacgggagttgggggaattgtagcttgacacggtgtctcgagtagagatgctgttcgacagtaacaccgaggaaacctcggtaggcaaaaagcctgtttgaacctctaaatgcatgtcatccggtgagataaactgattgtgcctaaggtgtctcgttattagggcgtgtctttcttcaaaatttcaaattttttcttccgctgtcgtagaattctgataattcgtgaggttcgcattcgttaaaatcgcataaaatttcatgagagaattcatttttgagca

SEQ ID NO: 3668 - DNA, 1516 bp, Heterodera glycines
ttgccgtgcctgtaaaatacaatgggaatcggcgccagttaaaaagtgccttactccccattctaatctaaatcaaaatccatatttttttgcagttttttgaattttttttaaagtgtaaatcgtcacaaaattttgaaaaattattccctgaatttttacaataatattttttgaaacatttttcgtcggggaggacttatttgccactttgggtcaaatgtttcaaaaaaattggtaaatgggggttcagcgatttttcaaagttatttttaactagcaccaaaagtccaataaatttattcgtacttatatgttatctgtgtacagattttcaaaaatattttatgtttttgtctataactttttccttttgcatccaaatccaagattgttggtatcattcgaaagctcttcagatgctctattagcctttcaaaaaacctaaaaattttctagcctggacaaaattttactaagaaaaaacttcaaaatttcggctttttcgcaactttcatgtataacttttttggtaatagtctactcgcgaagcgataccttagaaatagcttcgaaacatgttaagctttcgaatgataccaacaatgttggatttggatgccaaagaaataagttatagccaaaacaaaatatttttgaatatatgtacacagataacatataagtaccatttattctttaatattcttaccgcgggcaacaataagtccaaggttacgagtttcgtcagttattcgtagtgggtcctctggatcgcgtaaaaattctgtggcattgtcaagcaccaaatttagcaattggtcgtaacccttcaaaattccggcagctaaaaatatttggttgtatgtacaaaaataattttaaaaaatagatagtttgtgttgtttaatgtaaaactaaattcaccttctcgtcctccttgaaatttgactctcacttttttgtcaataaaacgcgataaatcgacaatgctttcttttttctttttgctcgtttcgtctacagtcatgctagtgataggtaagtattttttgaattaattggatctttaaataggaattagtcaagtgatggaagtaataggtttttataacttcaggtgtggaattgcggtagaggttaggtctacatgtatgtatttaggttccttttttcatgagctactgattctaaactgaattgtgaggcgtgaggatttaaattttttttatggcgttttttattgttttaaaaaagttgtaatgtcatagcgttttgacttaacgcgctaattcaaaatttacaatgatcagtgccttttttgcattgtttattttgatgatgatcagccataactcgcttcatctccaactaaactgaacaaaattggtatctaaaaaaagattttgaaaaggagaatttttttctaagaaatataaactaatttgatacatatgaaaaaattgtgagtttttcaatttttatcaacataactcaagtcctaaactgctaagtc

SEQ ID NO: 3669 - DNA, 1445 bp, Heterodera glycines
gcaaacagtgcgtttgtcaacacattatgcggccttaattttattgtttagactgttaagcgtgaattgaacaacatatttaataagcctaaccctgagcaccacatttttggcatgccaacgcatccacgcggcaaggaagcggctgaactttggctgaaacacttccgaagggaattggaagagggacgagagaggcgaaggcaaatgttcatggtcgcaatgcgcaaacaattggacataatccgacggtaccagcaaggcaaactgcccaaagaggagttggatgcccttttggaggaggcacgacaacgggacgcacaagttgtagaacaagtcaaattttaaacaatttttgattttagcgtccagacaaagagcagtacgaagagaagattaaacaacacatggcaaaggcttatttcgaagatgttaaaaacgtacaccttttaacattgtttcaattgtaagcattcttacatcagtttcttattaattaggttcgtacctttgatgactactttcggtttcttcgaggcgttcggattccaactcctgcaagaagcccaacacctataaaaatttttgatgaatcatgcccggaaataatggattcgttccaaggtaatatatgtttcgcttgataaacataaacgaacttagggtcaattggttgtcctgtttagttccgtgttttgatagttataggtgaatccgttgaagaaattgagcaagatggatcattcacttcgttgtacatttctttggacaaatcaaaagaagtgtttggggaatccgaagctagggtaaacttgaggccattgccacaattcgaatccattggactgagaacgcgtgtggccaaatacgcggaagcaaacgaaaaatgtttattgaccaagtccggacccgaagaatttaaagaacacacaattccgattcggcgaatggaaggcatagaaaatggcattccgattatagcgaagggtcgggaaaatggcattggtatttacatttcgcttttttaacttgaataatttccaattcagatgcaaaacaggtcataaagcccgtggctggaccggcagaagcgacagacatttccacaaaacagcagcggatgccacgaatgcaagtcgccgccacccctcctacggaaaagccgaaaacacggaagcgaaagtacgaactcgactttttccttagcttctcataaaaaattcagacatgagctctctgatgaaaccgatgctgaattagaaaaatcaaatgcaaaacgtttgagaacatcatctaaacctattacaggttattttccttttttgtgttctaaaaaggagtattggttagactttaagcgaatgagttaatcgttagtctgtgcctaaagcatgaaaatttaagaaaattagcgtaagaaaatgtcaagaaaaaattcttctaat

SEQ ID NO: 3670 - DNA, 3418 bp, Heterodera glycines
  unsure (1)..(3418): unsure at all n locations
cagttgcgtcgtgcggccatcgcctcgtcgacgccgtccnccgccgtggacagtgtcgcggacaaccgcctcttcctcaagccgggcaaacgctcctccactgcggtcctccctaaacaaattctgctcaccctttggcgcgacattcattctcatcgctatgcgccagtcttcagttttccggtcagcgaggagctagtccatggctatcacactgcaatcaaaaagtaaatctattcaacaaattatcactttttctcactaattatttagacccatggatttgaaaacattgaagacgaacatcgagtcgggtgaagttaacacgctcggcaaattcagttatgcaattctcaaaatgtttgccaacgcggttatgtacaacagtaccggacattatgtgaacaattacgccaaggaaatggttgcgtacgcattgaaatgcattgaggtgagcagtcaaatccaaatcattcatctcatcaacttcttgtctatgctcaggttgttcagtttcctaccggccaatttcacgctccgccgcccagtcgccagagcaatggcagttcctccgaggggggtgcaattggcggagggggagcagcaaaatttaccattgcttgggcaacaactctgattaagccgaaaggggtggaccaaaagaaggcaaagggtcgcaatgacgaagagttgaccagcagcagcagccaggacaaggagagggaagtgagtcaatcaacctacgcaaaagccaatcgtaaatgcaagcataaaagcgacgttttcaggcagatcaacgcgatgaggaggaaacacgtcgtcttttccaacgacgtcgaatgtataacaaaaagtacacatttacgtctacaatttaatccccttctccaaatttggtgcatttcaactgctctctctccctttattcatttatttgtgctcaaattatcatactgaaatgcgacacttactaccactcattattgatgttagcaatttgtattttccattttcaaataaacttatttacatttttgggattacctttgtaacgttttatatttcaaaatttttacctactttcattaccccaaaacccattaatgcttccgatgtcaaaaacggggctatccgcggcaattgatgatgaattcgaccctgacattgatctttcacagaggtccaggtcggattgggtgagtgaacctcttaatatatcggctctaatgcagttaaccgtccaattaatgaccatcctcggtttctgaagccttaacttttttcttacttggttaatccatatatccttcgtatcaattgaaagctccaagtcccgggaatttataaatactatacaagaaaagaacaaatacttgcattaagaaaaaattgcaatgaaaaaacctgaaattcgtcatttttcgcgaatattcaacaataattttatgtctgttgcctttatcccagaatttttttatgcgtaaacttctgtggactttaagctctcgattgatacaaagaatgtaagttttgagcaagaatgaaatatgacttaagaaacaaaccgaagatagtcattgattgttgcgtaaaagtcgactggactgcattagagccaaatatgtgctttttaaatttccttttctaggttggttcatttgctggtaatccgtccacagctccgacggtttatgcgatgttcaacaacagcgtttggacttttatgcttgtttacggcgtgacaggccgatttatttccgcaaggtcccaccatccgcggaaagagacacatgggtcaccctcggttttggttttcactaatagttgtactggttgcgcgaaattagccgtgcccagttatcgcccaccctcagccgttttgtttttccctactttttttgccccttccagtgttgtaagtttactcacgatgccagccactgctgctctgtgggtttgggaggctgatcgcgactacgaacgctgggaagggtcgcgggtgttacgtgagcgccgagttccaaaatttgtgctcccgcgaacggtgcggattcgctatgttccgcttgcatttataaacttttttagattttcgattggtctgactttgattatgctcaacagatgagaaaggctcctaccggttaaggaaaaagactatttacctaatacatatttgaataaagagcattgtttcaatttctcaatcatattgcttttttgttgtaattttgtctaattttgatacctccaaaaatttgttagcctgaacaactgactgccatttaacatttgaagcagtgaatggccgcgacttctcttcaacaacagctcaagaggcttaaatcggcacccaccggggctttggcggttgagcgtgattattcttcgcttcttttcaccaaaaaagcggcggctgctttagaccgagacgagttttacaaaattggtgattttctattaagacattgttagaggcgtgggtggggatttgttctctgcaatgattattgcgagttgcgttttttaggacttgctgggctctctggcatgaaaaaaattgacaatgcattcgacacttatgcgccagaattgttttggaaggacaagaaacggttcaatagagcgatgctccagaaggatgaggcggagcagttcgaccggcggattgagacatttttgctccgtctcgccgcccatttccatcaccagtgctgtcggcaggtgctcgaatggctcatccataactatcaggttctcgacgttagaatactaacggaagatcccctttaggaatcgtaatcgatcaattagaaaagtcgctttctgtctctgcctgtcacgactaactttctaggcgtttccccatgtatattggtttgatccttccattttcagattcacacatacaatgccgaggcgcttctgctcgcttttctgccttatcacagcgtcaattccttcggtcggctcctccacattctcaaattcaactccactgcttgggattggctgacggaatatcaaagggacgcagcacctattccgatgaatattttatgtatatttacgaactcgcttccgttttatttcaaattaaatttctaaaaagttttcaaatttaataattgaaaggaaaagtcactgttaaggcagagcatgtcaagtcggtcgttcctatggactcgtttccacactgtcgaacttcgtccaaatggcaattgagcagcttgggtccacatatgccaatgacaaaatgcaaaattattttacttttttggtgtctttgttcggcattttgattgaaaactcgacagctgacggaactgttgatgaccaactccttgccagattgatgccgtttttaagcgttgcattgaagtgatgcgctttttatttattttcaatttgatttttc

SEQ ID NO: 3671 - DNA, 2215 bp, Heterodera glycines
gtgacgcctatctgtcgatgctcctcaaatcgatggacctggagggaatggacagattccaagcagaaaaagccgcgcactttctttctttgcttctggaggaagagcaatctcagcggagttgtgaaaaacgttttcaaccggaggtgctatttgaacgggcgagcctttgaaaggcacttttccttcacatttgcagttgtccggctccgagctgaagggcgctgttttgcgctatgcgaaagcgatcgaactccgtctcgggggagaaaaagaaaaatcgacgaatgtcattatgatggaaagtgctgtcgcccctttttattcaaactgatcaggaggaccttccctagtaataatgctaggggaacctttgtttttcttttaacgccaataaatttattgaccaatcccaaattctcggatgaacatttttatgtgcgtaatttggccttcgtccgccccctttggagtcgataattcattcatttgaaaatttaaatgtcgaaacataagcaattggtaaatttcagtgcatttacacggcgagtcaattttgggctccaagtagtgaacgacaaaacgacgttttagtcgtttaaaaaaaagaaacgatttaacatcgttttgttaattttaacgatgtgcataacgccaacgatgttttaacgatgtttttttaaattacgaattatagaattgaaaaggatgtaaatgaaatgcaggtgtttgcaaattatgcaatcaatctaattgaggtaatttctctaaatatctaaaaaatcattaaatgattacagatggaaaacaaatgctcgcttaaccgcgttcttattgagatggtcaaaatagaaaatttatggagtgaaaaatcttcatccgacaattattttatacaagcactggcaaaaagtggcttggaagcatttaggcgcaaaatgtgtgaagttttttggcaaaaaaatcctacaattgttcaatgtgcggcatttttggaccctgcggtcaatggattattgagtcaaatttgccattcgaattctaattggggaacccaaacaatggttatgagtcgggatttttgaaattttaaatgtataagaatattaagatatttgatgtaattgtcagcgccgctaaagagcgctttccacaatgcacacaaattgccagaaattttgaactttcaccgagtttgtcatgctttcaacagactcctaaaagttgtatcgaagcagaaatgattttttacagaaatctttgcgagtcccttggcgggaaaaagataaatctgcttgatttttggaaagaaaattcaaaaaaacttcactttttgtcttctttggctatggagtttttgtcaattcccgcatcatccacatcttgtgaacgaatttttagccgtttttcaccgctggtttatgattatcgtcgtaatcgctttgaccctttcacaatttcacgccttatttccctacaatcattgtttcgcgatacttaatttatttttaaaaaaatatcgttaaaacatcgtttggcgttgtgaacatcgttataattaataaacgactttttcgtcgtttgaatttataacgacgttttttcgttaaaaaagtcgttttgtcgttcactagttccggaatcgctggtaggttcgaatccatcacaatgcaaacaattttaaggcatttaatgaaataatttaatttaaaattctaaggcaagaacatttttaagatttttctttcgtattgttttataaaaccaaaaacaaatttgggcaatcaatggtaaggttttgtggtttcttcgagaaataaatttaaaaatttaaataacacagggctcgtatcgtccatgctccgtttccaaggacgggtatgccgatttgcaaggacataatgggggaaattcatgaaatccaaggacatttaaaatttttattatatgcaatgaaaatggttaatatttattcaaatggcttgtatttttcaccggaatagattttttccaaaattttttgttttcactacggtgggtcggggcgggaattcccggtcacggtttttcccaaaattcccggtcccataccactttaattttcactgatcattttcctaatttgcgacgccttttttctgctttaaaaacgctttttttgcggcgcgctttttccaaaaattttgtggcataaggggcgggggggggggggggg

SEQ ID NO: 3672 - DNA, 1238 bp, Heterodera glycines
  unsure (1)..(1238): unsure at all n locations
gcatacaagaaaggtttgcattcatttttaaatattttaaacttttaaaaaaaagtaataataaatttaataaattcaaattttataataatttaaccctttattatggttttttcttcatttttatttcttattgttttttgcatatttttcaggtgtttgtcaatgtgcgggtcgcctgaagttgagacaaaacgttatgtgccgaggcctttcatgaatcagaattgtagcggtgaaatttccaaagtgataattaccaattaactaatgacttaattatttaataaaaatcatttaaaaacataaatatttattttttggattattttttaggttttgtcctgcgcaatgccacaggtcgacgacagcgattgttgcattgaaatgcgggtacttttcgcttcattttaaactatcagatttcaggttgagtgtttagttgccttctcagtgcctttatttgtgcgattttcgtgtgcctccgacaaatcttttgccgccaatttgcttaaatcacatttcctcagttgaagtaagaaggaaaaacagaataaacattcaattaacaaaaaaaaatattttaaacaaattttataaaaagttaaaagtaaaattattataaatataaaaaataaaaataatatataattctttatttataccttgtttatgatatattaatcagtgaataaaattattcattttagcagtgccgcctttttggcactcaaaaacggccaagttcagtacgcaatttgaaagtggcggcagaagttggcacagtgtcctcctcctccattctgttgcgctgggacactgccgatcgtgccgacatttactacgtttactggcgcggccgaaacgcggcggaatggagcaaccgatcggcacggaacacgacgctaatgaggattaatgtggacgcggcaatggtcgatgaggtgcattaaaacaaaatttggcttactatgaaaaaaaggtcaccggaccggtgaaaaattaggacattgaaaattggtccagtgtctacggatcggattttttttggaaatttttcaaaaattcatgaaaattaatgtcaattagttgtagggcaagtttaaatctaaggatttgatctataaatacatttcacctgctcatggtctttttgcatattaaggtgnngtgtgtgggtgccaacttttacggactttgggcagcgcgtgcgcttatttgaggacacattaactaac

SEQ ID NO: 3673 - DNA, 10381 bp, Heterodera glycines
  unsure (1)..(10381): unsure at all n locations
cgtgtatgtatatgatgtgtattttttgggctggtcactaaaacgctaaaatccttctatagaaatccgattattaatctattattaataattctatttataaaatgtgaacccttcccttcccccctggcgatngctcgagaaatgcatacaaaaagcgagagaagtaagcataaacacgagaaaattgaaattaaattaactttattaaacgagtatcgaatccattttcaatgcttttctgacaaaatataccatattcttaagaacaatttaataataagcagaaggacatatttatacaaacttgtaaatttaaaataatcatattttattttctttttttttaatttcggtttttgcttttttaattccaaaatgagtcactcacttttatcgggcttcaccttctctcccccccccccccttccatcacaaaatacggggctggcttcttctggtgctgcaatatgcaaattgtttttattgtacaacacatcgcattttcttttcttggcttttcctcattttctgcacatttgtgtcgacaaatagcacaaaattttccattttctgtcgatctcattccgctaaaaattatttactattgtaattacccaattaactgtttaattatgtcatgcgaaagtataaatgtctctttccttctctcagggtcatttgagcttaccaaacagtgttgttattgttcacattctctaataaaaatgcatttttatgaccaaaaagttttgactcaattaaatttttttcgaaaacagacacaaagaaaattataaacataaattaattcatttttattattatataattgtgttatttcttgttttcctctatgtttaatttcttttttgcattgtcttctcacatttaatgtataaatttttaaaaaatataaaaattgaaacattattgcaatacacatgtgaatgttataaattgtacaatataaataacaaagaatatagagaatatttttatattttttttgactcgattattaattggattaattaatttattttctatgcgtttgtaaagcggaatcccaattaataaaatattaattattcgagccctaagactggggtccaaacgaattttattgggacttccggtccaggtcccgtttttggattaaaggacccgaaaagccgcggaaaacgggttcttgtcctgttatttccgttccggtcccaccaacgctgtaaaatgcataaagcgattaaagttttttgttcattttagccaaactcaatttattatttattaaaaaataagtttttctgtaaaaataacaaaataaacgacaataaataattaaaatacacaagcccagaagaagcagcagctgaagagaattggtgttagaaagtgttgtgaaataattgtgaggccgaagaaaaacaaataaaattctgttaaaattttcctttttatcgaagtttgcctttgttttttaattgttttagtttggaatattaccaaataatggaggacgggcactttttgcagttttattcagcaacattttggaaagtggcggcttttgctgctgcattactttgatgtgtcgtgtacttaataattctaaactttgtttaaattttttgttaatgtttttttaaatttttttaaaagttttcgaaaagggaaatttttaaaattaattttaatttgttattttacaaattcactttttctatggggatattctctaaattccgaatttttatgctccgattccttcacattcttggacgcaaaattgcttgacacgagactaattggtcttccatttactgcaatttgtgggtctaaattaatattttacgtatggattaggatgattttaattaattttctttttagattattttaatatttatttttgtgtctttttactttcttttctcaccctccattttgacattgttaatttgtcccaaattgttctcgtcaaattgcattctgttcattctttccttagttccattttctttctcctcttcatttggttttgttatgttttggatgtccaaatttggcaaaatcggtggcaaatggtccgctaaaataaacaaaacaaaaaattatatcaaaaaagttaatttaatcgactaaaatttaattgtccaactcttgcctacaattttaaacacatgctttttgcatattataccatttatttgtattttaaaaggttaattagtagggattgatgcatttaaaacacacaaacaaataaatttaaatttttcgaagattttacaaataagaatatttaaaaatcaaattaaattttaatgatgaatttttgagagaatttttcaattgaattgaggaaggttttctgaaatttttcggttcggttaagaacaaaaatacgaaatatgcacaaataagcattaaaagtggaaacccttagcaataggattaatatagacttagttattaattgtaattttattttttaattaatgtttattaattattggttttcatactgtatgcgttttgctctgttattgttttttcatttgaactgacaacagtttgtggcacgggtgtccttattgttactggagttgttgttggcgatataaatgctaatagaatctcaatttaaatgaatcgccaataaatgctccaccgtttgccttgacattgccattttggtccatttgtgttaatgacattaatgtcgtcgattttgccgttccgttgttgcctgtggcattctccgtcggcgccatttcttgcacaattaccgaacgtacattaactatcttcatcacaccaaacaataaaaaagtttaattttatcaaagttttaatagtttcggcccatccgtttgcacttcttttttcttaccggcatattcgacggttcatttgctgggacatatggcggcggtgtcggaagttcagcagcagacgccgtttgaagttggcgggttgttaatgtgaaaagagtgccattgacagcagctgttggtgtacttgttgatgacgttgttaaatcaatgtctgcaaattaagcgaaatatttatttataactgtttatattttggaccactaattgttgttgttgttgttgttgttgttgtttgaatcagttgaactggtgaagtgacaatttggtcaatttgctgtgcagcagtggtgccatttttcgtcccattttgcgatggcatttctgttgttgttattgccttgcccccttctgctgttggcgttgtggagagagtcgtggccgatgaggaggaaaaggccggtgccgatgctttcaatctcgctttttattttccataccattttttatttttaaatatattttattttttatttccttttacttttgattatttccatcggcatttgttgtttttgttgctgtgttccctccgtgctattactgctcgtcactgttgctgttggtgttgttgtacttattgtcgtcgtcgttgtggtcgaagtgcttgttgaagttgatgatgtaatgctgatgttgcttatgcccagctaaattgtcatattttaatttagctttccaccaatttttgttcatcggatttgttcttattattgtttatctctcaccacagtttgtgctgtcgccgtgctgttccgcccatctccatcctttgctacattttcgtcgccattgtccaaaagtgtttttgtcaatttttccgttaccgtaatcgctgccaattccttgctgattactgtaattgtctctcttttgggttattaattgaacaattttcttctgatcactcgccttccttcaacattttgagctgatcagctcgacttgtttccttttgctgttgatcagcagcagttggaatgctttcgtcaatcgcttgcaaaggctttcgcaacaaattcgtcttccaaaagtcgagtttgttcgaaattttgccaagtctctccttcaaattttccaaactttcgtccactgatgaccgttgcttctccgccactttgtcgttgaaaccgataagttttggtgggctgttaaacacgccgaaattggcattcctcgcaaagaacggcttaaacagctgaaaaaatgtttttttaataacttcattattttgaccaaaaaattatttttttttaaccagcgatgccttctttcattttgaaaaacctcggttcgatcactaggataagatcatagaaaagcatcaaaaaaattaaagacgaaaaggaaaagcaaaaatcagcggttaaaggattaaaataaacgatgaccgcacaggtttaaataacagaaaaattacggttgatttttttttgaaaaaattggacggaatgatcaaaaaaaaacttatgagggtgtttaattttaatacataaaattctattctctttcaacatcggcattcgtcttacccgtaacggcacttttttctgtgcgctttgctgcctattaattggacccaaaatgcttttgtctgctcctttttcgcttcgctcgcattctttcgcgcatcccttaacggacaatgaaaattgcttttggcacttcataactggcacattattcggtgaaagtaattccaaaataattcttgataaatttacacagcagcagcagcaccggcgcgggcactgtttgccgcagttggcgccgcacggtccgccgcccatggcgcctttgccgtaatgcttttcccattggcctcccttttttgttccatccgattcctcctcctcctcctcttcatcctgctgttgttgttcctcctcttcctcctcactttttcttttctcttcttcttcctcctcttcttccgccctttaaataaataaaatttaaacattttaatgggtccgtaaaatgaaactttgttcgcaggcatcaaaaaatgactgcctgaaataaatccttattcagagtttttacttattaatacattaaatggcacataaaatatttttgcggtccggcaaaaatcggtttcaaatcttggggttttcaatcccagatcgcaaaatgatcactgaatagctgctgataagttatgatttcactcgaaatattcctttttaattaatttctgaaatattaccaattattttaataatgatttaaatattctattatgtttaactctgcttttttcttaattatattctgtaaatacatcctataataagaaatgctaaagtttttggcctcgggtggcaatcgaacccactcgttcacacattccatgtgcaactctaccattgagctaccaaggcacacccgcccattctttttttaatcatatcaacccccttataatgtaatcaacgccccaccaatacacaaataccgtataatattcttctgccctttgcttgtgatcattgaaattttgttttcgagtttgccaatgttgtcacactgttggcactctccgtcaccgcattccgatgccatcgctctctttgactgcgtttggtggacaaaaaaagtgccaattggcactaaaattgcttttgttgctgccgcaataatttttggtgatgccgcggcatttttgagctgcggcccatccgctgactcttgagcttcctcattgaattctgatttttttagtgtcgttataaaatgtttatttaatttttatttatatgtaatttatgttttcgaccttcagatgtttttccattattatcagcataaactttgcaaaaaggtcgccagaaaggatttgcttgtgcagcatttcttctgtagttgatcgtctgcattttgtagaatttgttttgcacgtcaaagtttggtctttaatttgtgtataattagtcaatcaatttaaaattaaatattattatagctaaataccttgaattaaaattgttaatgcaacaacataagtgtccatttttgcttaataaaagtcgtaaaaaatattttgaaaattataaataaaaaataaataaactgacctgctgcagaataaaaatgaatttccaattttcttaatttatctaattaattgacttgacttttttattcatttaatttattaccacatttattattatgagtgcaaaacgtaatgatatcgctaataggccgaatattatccctctgtttttataatacatttacttcccttattaacaaaattgttaatatatttctaattaaaagttgttcggaatgcgcggcgaatgatgaagcgaaatgcgcttccgacagacggaacaaattagcagcccattagcatgacttagtttactttccccgttttttggtccctaaatttgctatacaaatatttgaaagtgaaaatagaacggaaactagttaaataggttcaccaatatttacataaacattatggaagtgaaaaagaaacaaaatattaaaattaaaggggctaaatttatgcatttgaaatgtttacatttctaatgcataatttatgtatacaaaatgatttctgaaccttaaaattttgtttgtttttttcaaggcaaatgacagtctagacagacacttcctttcacggataacaaaaaatatatgcaatggaatagtttgtataataatattgatattatattaaaatggcacttttaggaaacgcgctgacagccattttggctcatttaggaaacgcgcatgggtggcactgtttaggaaacgcgtcagcacgcccccattgaagggttataccccaaaactatttttatcataattatttttaactattttaaagaaattaccaaattggaaacgtaacaccggcaatcggtctaatccgatgcacatttgcatcgccaatgcgaaaggacttgcggataagataactaattgaatgtaatagcaatgtttaagtgtgactgtaatgatgccgaaaagaaagatgaaaaatttaacaaaatatccggcaaagaggaaaatgacgaagaaagcgtacaaagcgatcagaatgttgcattgggagtggatggttctgatcagcaaattgatataaaaattaaatgattttatattaggatccggtcaattaaaaaacccaaaaaaatttgcgattttattaatttatgttaatgaaatattaaattataaaacctacttttggtgatgcaatgagggaaatgttttgctttccatttaattttacctgctgctgatagttgaatatgtttacataatttaagaacggattataatttgtttgatgaaaaatggatttattaagataaagctgaaaaagtgatcagagttcgggaccggattttcaatttttgcttacaccataaacattcaaaaattgtttcagtttatttgcttgaaaattaaaaaaaattattcagtgatttcattagaatcttttttcatgttaatttataaatttatgtgttttcgaaagtttttgggaaacgcactacgtttaccggctcccggacaatcggacagtggacattccgacaaatggacaatcctacagtgaggatttgtttgatgctcgttggtctcgactcgagaaaggtcttctcggttcgtggtttttctagctcggtctcggtgttcgagactcgagactaaagatttaattttttcacattagtaaaatgagatacattgaattaaattaattcgacattttaataaaatgattaggcattctgctttttgttcctattggcttgtcggcatccaattaaatgctcaaaacagcaaaatgaatgattttggcgatttggtcccaatttatgggcacaattccactgatcccgcggctttaaaagaatttgtgatgtgttcattttattcaaggacagaaaagttgaacaaattgtaaaagttgagatttcaattaataataaaatattgaaataatttagaatgcgaaaattgcaattcgaagaaatcaaaggaaaataattcaccaattaaagaaagatgtatttgtttaattagttattttgttcatgctaattagttttaaatgtttgttttacttttgttaaaaattaatgcaaaaatttcatttttatttggaaagcgaaaaaatactttttaaatgaaatgatgttttcagtgcactttgacttttgtgttatgtgcaaatttgtaaagttgaaaaaagatttcacaattaaaaaagtggattctcaaaaagtcagtcttataattttcttaaattcctctgaatttcaacgacggcaaattcctttgatttgctgagttcgtgccgaaaccgtcataatctgatgaacatgaatggtatttctcgatttttcgtttccaattttcaattgtttgctaatgatttcgcgcaattttgacgaagcccacaaaagcaacctgaaaatgaaaaaattaattaaaaatttggtctttggtgttttgttaccaggctgggatgaccaccgtggaaaggtcatttacccatgggttctggttaaaatttgcgaaaaaaagaatgtcattttgggccgatgagacattaaaccattcttggacataggaaaagcgattgttgtgctcgtcaacaaaatttgttgcagttatgcagacaaaaaactgaaacatataaattataaaattgctcaatatttccatcttttggcattaattaatgtgaccataaataacgccatgagcagttggccaaagaatgtggccaccgtgtaaatggtcattttacattcatttgccgcattttggccattttgttggtaattgctgcgcaatttgtaggccaaaagtgtggccacattcagaaaaaggcaaacgatgccaaaaagaacggcagaccaagcggcgatttcgctgctgttcaactcctaaaaggacaattttagtaaaatataattaaaactattaattaaaataatacattttccgtcttatggtcgtccagagtaaaggtggcattgtcattttgaacatggatgtacatgtccaacccaaaaattggggcggtgaaaggcagcggaaagatgaaagagaaagcgacaacaaagggcaagccgacacgccacaactttaattaaatgggaatttaaaacaaatttaaaataggttaacaccttttcatatttcaacgggaaaagaatggcgcttaatcgatttaacagcaaaaaagcggtcaacaaattctccacatgaaaaacgtaataaccaataaaaaacagaaatgccagcaaaagccgcggaaatttgaggtaaatgggaaggaaaaggccaatcttgccaaaacgatgggccaaaaatgcaacgaagtaattgatcagactctgaaaaagagattaatttatgtaaataaagccgtccgtaactttaattgcaatgattaatttttaattattttcctactagaatagcacggatgataatgaggatgaaaaaaggggacgaaaagtgtttgaagttcgcgacgatgaccagcaacagcgagcagtacagcactgcagacggaatgccaatggccaaagcgaagagaaaggggcacaaattcgaattggccaacatggccattgcggaaaagaacggcgcggaggcggaggagcccattaggggagagagtgtggaagtgatgtaacagggataaaagaatgactgaaaataattaattaataattaggtatacatattattttttaattattgttttggcattttgtctgttcagtcggcggcaattcaatgccataatttgtgaaataattttatttaacttacgccgattttttttcagtaaaccggcggcttatttaattattagagagagagagagtgcttttacgcacttagaaacgccaaatatgcgttttccaagatattaactaaaatcccccgcaaaaacaaaataaaataaaagaaaatttgctttaaaaattgtcaaaatggggattcaaaaattctcatacaatggaatatccatattctagccttttcacaaaaaatgtaaaaagcacctccaaaatggttttttttaaatcaaaaaataatttttatttaccaaaatttattcttaaaatttgtgttgttccccgaccttcgaacggggagagaaaagtcggagatcgggcaggaaacaaacacccacgttggggagaaaattttcataaaatttttaaaaatttctcgaaaacaaaaaatattagaaactcatttaaaatagggtcgcatgggtccggatatttaggcaataaactgtttcaggatccaagtttttaaccgggtccatctggtcctgaaaaatgattaataacttattcaaaaataaatgcatattccacgnaaagagtttgtaattttaatttattaaataaaaatattttcgaaagttggatataaaatcaattttattttttaaaaaacgtagaaga

SEQ ID NO: 3674 - DNA, 4315 bp, Heterodera glycines
tttattgagtaaaaatcttgatggaagttagttgaatttgtgaattttggtaccatgaagtgccaataatagtcgattccaattagaatttgaggacatgcattagcgatcgggatttttattccaagtacatcaacagtttctttattaaccatttttgtaacatcagtaattttttccactgtttgtagtgttatgtactctatttcaccttttaatgttttaatgccaactttgactagtcttgatttaattatttttggcttattttgattgaaagtggaaattgctaataatttttcctcaattgtacttaattgaagagtttgaacacattcttcggttatataacttttttgtgacccattatcaaataaaattatttccttttttattttaggcttgtctggattgatgacattgacttcagtagtcataagtaattcttcttcctcataattatagaaatttttatcataatccattgtcatgaatgtctgtgtctcttcatgattttcgtaattttgagccatattcactttggttttttgctctttcgctttgtactgagtttgttttcgggtacagaggagagtattatgtttgtatttacaattaaaattgcattctttacttgcatggttttctctttcgcaaaagcgacaaaatattttattttgggttctagtttgtgttggatttgatttaaactgtgccaggcgtactgggtttgatttcgttgtaagtgcagaagtatatggaaaaggagaggaagatgtgttctgttgattccgtgggtttggtttcatttgattgtgtgggaaatttggatagaattgtctctgtactccgttttggggtggtctattagaggggaaattccggatttggcgattcgattcttccattctttctatgtcttcacgtgcttgggtatgatcgttcataaattccattatttcttttgttgaataaattttgaatttttccctcaatttaagtctaatgttataggggagtttcgtttcgattgattgtttgatttgagggtgatttatgtcttccccttgtgatttcatttgtaaaattattcggtcaattaacaaaataaatcgtcttaattcaattgtggattcagtgggtcttttgaggttgcgtaattcgctatgaagattttctctgattaattgggggtttccgtaccttgattttagtaattttattacgatagtataatttttatttgtaaggggatacggtgacactattctgtacggttcatcatgtaagagccctctaaggtatttgagtttttgtatattttctaaatttgggtcattgtccactgaggatttgaagtcatcccagaaactgggccattgggagaatttgccattaaaatgcgtaagcgtttgaggtggaagctttattcttgatcggtaattgacaaatggtatacgatcatggtgtatttggtcattcaaggaaagttctggcgattcgtcttcattgtcactttcatattccttttcttcttcttgttcttctacttcgtcttcattttcatgttcataatcatttgattcatcttccgggtctgagtctgaagatgattttgctttaagtaattttaatctcctttttacctccaaatttacgtcttttaatgtatcgagaatttcatctatttctttaatggttttaaggtagtcgtgtttttcacgaaagattttttgaactttccattcattattccattcttccttgttcatttttctcattaaattttgccaccttttatttaaggcttttaatttttcaaaatttggctctattttttggataatttcctttgttttattgaatatccgcatgcattctccgggattattttgatcatattcgaatttgttttcctcaatttttgttttgatcgtttctatttccctttttaatacgcgattaaggaggggtattttgctacgaagcgtaccggacatagtttgtattttaaaattttaaaataattaactaagtatccttttatggttatttagtggataatcagaaaaatgagaattttaattaggtatttatcacaagttaataaatattattataattttaatgatcacagaattaacaattgttacgaaatttaaaaaaaatatatataatcacagaatttttttgtttttgttaattatttgctccttttttttgtaaatttctttcagtatattctctgtatgtttcgggcgaagtttcgttaatttgtatttcggtttgtgtttttaaattttataagttcagtcagtgtagtgcttttcgccacttgtttctttttcgtgttggctttggtcgtcggagtaattgaattaggagtcgctctgtccacttaattatttaaattagtgatgggtttgctgtagggtttattatgacttttaattatgtttggctttttatggtgtcctttttcggttttttgattgggtttggtgatccgtgtgtgtgtgtgtgttttttttttaaattgggtttgtcaacccttgattttgtatgggcttggtgacccttatacttccggatgacgagcagttgcgcaacggtgaatttgacgttttgacgtggcaatcaggtgcagaccggacaggcagcacagtaagacgaatgggcacagcaggacaaacgggcagagcggcaggcacggcaggacaaatgggcacagcggagtggacaggcacaacagggcgaacgagcacagcgggacgcacggcaggacaaatgggcacagcgggaaaggcacggtcccgggtcgtggcaccaattcttgtcgtggcgacaaaaaatttgcgtcgaactctgcggggtgaaggggacgggaaggggatgaaatgggcgaggcgcgcagagtagccggtcgggggaacgtagggggtcgggaccgatcggagagcgatgagtcgtgccggttttcgtccaggcaaatagaccaagttgggcacaattttaataagagtatgtttattgtgtcgacctcaaacttgggtaattaaaccgtcccaatcgggacggtgagggaaacgaaaaatgggggacaaacatgataatgtgaacgggaaaaagggggcacaaaaacggtgacagtaaataaatcacaaatggaaaaatgtggcaaaatcaaaaggggtcagaacggcgaaacggcgatgggaaaatgaagggcattcgggcaacggctggtccaaaaggggccacacaatggcaaaggaaagggagggcactcgagcaggcgcggacagggagggcactcgcacagacagagagcagcgaaggccgggtgcagtgaaaggcggtgggcgggtgccgggaaacttcggagggaactgtttgtctcgaatctgaaatttccggaaaagtccacccctttaaatacgatttttttgcaccaaagtacgctacaatttctcattttaattaaaatatgtttttgtgtgttatccgtttggatttgccattttcccattaattgtttgcttttccgttttccctttacaattccaatttctttaatatattaattattaataatttgtttacgaacaatccttaacagaattcgcaatttaatattaattaattttcgttcctttcattcctgaggaaatgcacttttccttttcaaacaattttccgttattcatttcaaaaggtttttttcatttttatgtaattatattttcgatagttttttataatattatttttccaaaataaatgtaaaaatattttttattatttatgttttatttttccccattttattttctattgttttttatttttcctcttttttattttgggttttatcttaggatttcgcgttgtcgcgacaattccataaattcatgaaccaaataaataatttaaaattattttttagaaaaattacccttgtgttgggtactaaaatttgtattccgaaatagaggctttttaaataaatatatggaaaaaccaggggaacaattccataaattcatgaaccaaataaataatttaaaattattttttagaaaaattacccttgtgttgggtactaaaatttgtattccgaaatagaggctttttaaataaatatatggaaaacccagaggaacaattccataaattcatgaaccaaataaataatttaaaattattttttagaaaaattacccttgtgttgggtactaaaatttttattccgaaatagaggctttttaaataaatatatggaaaaaccagaggaacaattccataaattcatgaa

SEQ ID NO: 3675 - DNA, 2792 bp, Heterodera glycines
tgtttggctgatgtgtttttggtaaaattatgatgtcctcctaagcactttcttcaaacccgagcatgccttacctaccttagtcggcgaatcattagctgctcattttctaatatttttagaaatctcctcttcattttagaaaaaagcactattttcgtgcctttttcagactgaattcatgacaaaatccgattaaaattctctcaattacatccaaaaccaattgcatctatattaactgctgcaaagaccaacctgcgtatgaattctgataaaattatgacgatcaactaaacagcaatttaaacccgagcatattcacttattgcatccaccggtgtataatagctgctcattttcaaatatttttagaaacctcttcttgcatttgtgaaaatgctatatactcgtgcattttgaaaactgaatcccagtcaaatcccaacgaaatttcactcaaatacacacaaaacgaatttattattaatcgagattatgcactgcaacggtggttattttctgtcatataaaatcacaaaagttttaaagttttctcgacgacgctgctgaagggaaaaatataataaactcaccagagctgatatcgaaaataatcaaatcaaatcgtttctccgttttgagaaagcatgttgtttggctgatgtgtttttggtaaaattatgatgacccactaaacactttcttcaaacccgagcatgccttacctacagtagtcggcgaatcattagctgctcattttctaatatttttagaaatctcctcttcattttagaaaaagcactattttcgtgcctttttcagactgaattcatgacaaaatccgattaaaattctctcaattacatccaaaaccaattgcatctatattaactgctgcaaagaccaacctgcgtatgaattctgataaaattatgacgatcaactaaacagcaatttaaacccgagcatattcacttattgcatccaccggtgtataatagctgctcattttctaatatttttagaaacctcttcttgcatttgtgaaaatgctatatactcgtgcattttgaaaactgaatcccagtcaaatcccaacgaaatttcactcaaatacacacaaaacgaatttattattaatcgagattatgcactgcaacggtggttattttctgtcatataaaatcacaaaagttttaaagttttctcgacgacgctgctgaagggaaaaatataataaactcaccagagctgatatcgaaaataatcaaatcaaatcgtttctccgttttgagaaagcatgttgtttggctgatgtgtttttggtaaaattatgatgacccactaaacactttcttcaaacccgagcatgccttacctacagtagtcggcgaatcattagctgctcattttctaatatttttagaaatctcctcttcattttagaaaaagcactattttcgtgcctttttcagactgaattcacgacaaaatccgattaaaattctctcaattacatccaaaaccaattgcatctatattaactgctgcaaagaccaacctgcgtatgaattctgataaaattatgacgatcaactaaacagcaatttaaacccgagcatattcacttattgcatccaccggtgtataatagctgctcattttctaatatttttagaaacctcttcttgcatttgtgaaaatgctatatactcgtgcattttgaaaactgaatcccagtcaaatcccaacgaaatttcactcaaatacacacaaaacgaatttattattaatcgagattatgcactgcaacggtggttattttctgtcatataaaatcacaaaagttttaaagttttctcgacgacgctgctgaagggaaaaatataataaactcaccagagctgatatcgaaaataatcaaatcaaatcgtttctccgttttgagaaagcatgttgtttggctgatgtgtttttggtaaaattatgatgacccactaaacactttcttcaaacccgagcatgccttacctacagtagtcggcgaattattagctgctcattttctaatatttttagaaatctcctcttcattttagaaaaagcactattttcgtgcctttttcagactgaattcatgacaaaatccgattaaaattctctcaattacatccaaaaccaattgcatctatattaactgctgcaaagaccaacctgcgtatgaattctgataaaattatgacgatcaaataaacagcaatttaaacccgagcatattcacttattgcatccaccggtgtataatagctgctcatgtcgggaccaaacagaggcaaattcggcccggcaaaaattttggcaaaatagaaattgggacaaacagtagacaagcaggggaatgatgttttattccgactgaaccgatttcaataacaattccacgacttaaatagggtgtcattcgctgattaatacatttttgtgtgagaaatgaataagaattaatgtaaacaaacaaatcttttttgaatagaacgacgaagagggggaacatttccaattaaattaaggtttttcccatttttaatgaaattgcatcatgcttataaaatttatcatttccattttatttctcgtgacgtgagtcgcgacactccccacagcaaagttgtcggggggttcagttgctgcaagtctgcctgtatgttgttgttttatttcttatgcctcattccgggttgtctgtgctgagaaaggcgggcggttgattttggttaatcgtaaaatct

SEQ ID NO: 3676 - DNA, 1338 bp, Heterodera glycines
  unsure (1)..(1338): unsure at all n locations
ttaaacccgagcatattcactattgcatccaccggtgtataatagctgctcattttctaatattnttagaaacctcttcttgcatttgtgaaaatgctatatactcgtgcattttgaaaactgaatcccagttcaaatcccaacgaaatttcactcaaatacacacaaaacgaatttattattaatcgagattatgcactgcaacggtggttattttctgtcatataaaatcacaaaagttttaaagttttctcgacgacgctgctgaagggaaaaatataataaactcaccagagctgatatcgaaaataatcaaatcaaatcgtttctccgttttgagaaagcatgttgtttggctgatgtgtttttggtaaaattatgatgacccactgtcgcaactcgcgccttctctctctcttttcaccctttggactgaataatgggacaagcgcgaattggaaagattgctttttcccagattttccttccctgcccttcccttccaaattttttaactccacttattattcaaattcaaccaagagaataacacaacaactttatttgacgatttcctctcaaaatatagcgatgatgggagcaaaaaagggaacggaattcaaaaaagattggcacataatcatactgaacacaggaaaaaaaagtcacataaaaagggagggggacggggaaaagctgatcgttcggcgataagagaaattcatctttgcggggcgaaaggcgatgagaaagcgaaaaacggctggaggggaggaaatctgaggattacgttgggaggaaaaatagggacattaggctggggttgtggggcaatggcgtgaaattgtccggcatgtacgggttgtgaaataacaggggggcggggggaaacagacattttttccaaattgctttcgcataatgcgacactttgatggatcgtatgtctaaaaaaagccaaattgctatataaaataatttcaaaataaattatataattgttaaagtacttcaaataattgtttgaaagaattataaaatgctatatatataaaataaatcaaaattaagttcaaatttaaagaaaaaaaagtgagaataattgttgtataatttttttaaatattaatgaaaattattttaaagagcataaattaaaaatcaaatttgaattgttttgtatgaataatataaacccatagaaacagtttttgaaaaagttagcttaaaaagcatgttcttaagaaaaatatacttatcggaacnatatcaatatgttttttaatcctttaaatattttatagaatctaattatacaatacaaaagtaaaacatttt

SEQ ID NO: 3677 - DNA, 4289 bp, Heterodera glycines
  unsure (1)..(4289): unsure at all n locations
acatgattcgaatttaagaatcgtgaacaaaacgttcgttggatttgatgatttaagaaccgaaacacgatttctaattaatgacgcgcaaacgaaatttcgacgaattcagaaaattcaagaaacagaatccgatttcgaatttaagaagtgggaacttatttgttagtgccaaaaaatttccgggagacaaaaattcatgtccaataaaatttgaagcgaatcggctgcatctcggtgatgtgtttacgggagatcactcacatcctcaagtgcctttgcttcttttttggttttttcatctgctgctctctgctgaaatcaaaaacaattcattcaatgcgttggatggaaaacaattcgactaaaaattcaccgcttcgggaatgagtgttttgacgtttcgcgtcatccgcgacgctttgcccgacatttttgtattgaagacaataaggaattcgtagaataagaaaatgaatgcgtgaattgtaggaagaatgtgaaaaatggtgaaaaacaactccttttatacacatttttgtatcaatttaccgactttccaatttctataattttcaaaaattctataaaagactgaatcattttgaaaaaagcaacattttatttgtttaaaaatctatcaaaaaaattttcgacttatttctttagtcaaaaaagtgttttatgaattttttttaattaacaggctttaaaaaattttctcagataaaaacctttttttttgtgtattaagtttaattaatcaataaagaaaaagccatttaaagattcaattaaaaatggataaaaaacgaaatttaacaaaaaaccaaaattctaaaaggtaaaaaaggcgatttgcttcaagtcgactccaaccgaatgcaaccacttcatgacgacgagtcgtcagatccaaaagccacccccaggcaacacttgaccacaagcatggccaagatgcgttgtatgttgtatcgtaattaaagcgtaatatagatgcatattatgtaaataattgttttttgataaaattatttacataatataaatctatattacactttaattacaatacaacatacaacagacagtgcgcgcaccgccggcggatctgaagcgggaaacggcgtcaacgagttcaccgcgtacgcgcgcaagcgaaccaatgagcttatgtataatgaataaaattttcggtttatttttgtgatgggatgtaaagaggggaagggaacattcatgtcattcattaattaagccccacgcgctctcgcttttctctcatttcttttaccttttctactgcactattttcttacaccgtctgtctggcaaagagaacgctcattaattaagcgtttttctctcgcttttctctcatttcttcccttatctattgtactattttctttcactgtctgtctgacaatgacaagaaaaaaacattaagcggggccaggccgttttcgtacgggccgttttcgtacgaacacatgtttttggactataacttttttctttgccaaccaaatccaacattgttggtatcattcgatagccctatgtatcctctattagcctgcaaaatttcgaaaaatttcgttaaggttcaaaaaaagttcgagccaaaaaatttggaaaatttggttttttgaattctcatctgtctgctggtacgagaagttcaaggcgttataatttttttctttattaaataaattcaacaaaattggtatcatttattaaaaagctgtgaatgattagaagtttgcaattttcaagttttaatttattattattttgtgtcaacaaaactgtcatttttgaatgttgtgcaattcgaattctgatcattttttaatgtaaatgatgattgacgaaaattcggctttttaaatctgaaaggattaaattatgcattatttggcaaatgataaaatgattaaaaaaacaaaattcttaattcaattttaaaatattaataataattaataataatcgttcattaattaattaaaaattgggaataattcacaattacttttcgtttgtttgttcatttatcagtcaattcagtgatcgattatttcatttcagttccaacttccagcattccatgacctcaaattgatttatttctaaaatatttttgaaaatttttgttcatacgcatcggaaaaatgccgttgttttcacgccaaattatttggttttctctgctgaaaatgttgtgccatccaaaaaggtaatgaagcaaagccaaatttatgcgagaaaattttgcgaaaaaatagcttggctttttgaatttctctgagcatttaactgtcataacgaatgacagtttcactgactgatctgaggccggtatttgatcaaaaagattgagaaaatgatcggcggactttttaacacaaatttgttcgaactgatggaattcggatcgccatgaaatttacaaattactaataagttaaggctattttttaactggaaagctttatcgttcagttgctgatcattctaatcagagctgatcagtgatcactcttctatcggtgatttaaaataaatttcagatattttcgttctctgtttatggtggtttttctgcttggcgtccatctgttcgcactttgtgcagccattcacaacattcgcaccgcattgcccgtgctggcgggttggaatttgggggcttgggtcttaaattccgcgacaattttttcgggaaatttggaattttctccccgatttctgacatttctctccccgaggattggagaggaccttagtatatataaaatcgttcgaggtccaaagatttccaagtacagtaaaaatttttcggggtggggcgaaagccccgaaaattgtcaaaaaaacactcctcgaggcgacccattcgtcaaattgtgtgaaatgcagtatttatgtaatacagtacttttcatcggtcatactgtgactgcctacaaattgtttcttcgccaacgacttgagccctttcttgtgcgaccatgtttcagtgctgtgccaactttgcacccatcaattatacactgtattcaaatgtacttatcttttacaaaattttgctgatacagtatccattgttgttacaattctttcagtaccgtacccacagcaataattgtgcttttcgtcgtttggctgatcatcgattcaaacactaaccgaattcgacttcgatcattatttggcttcctttctctgatcactttttgctatttttcatccgcgcatcgtttaagagtgatttttttttattttggcgttttgttttgatcaaaaatgcgaacagaaattaagtctcttctcatttttcaaatcaaagaaattcagagaaaatataaattttcaaaacaaaaacgaataatttaataattaaaataatatttttatatggaagagaaatgccaaaaattttttttgtaaaaaaactaagaatttcttaaaaaattctagtttatggccttgggtaacaagttttctatgccgaaaagacctctgtcccttctcggcagataaaatggcgtcctgtcatcagcggtatactgctccaactcgcgctcggctttctcatcctccggtggtctcccggttctgatgggttccgctgggtttcggaaaaagtaaatgttggcaaaatttttctgaaaattttaattaattttaataaatttcagatgctcaccttgctcaatttcagttacaatggtaccaattttgtttatggttttgcagcaactcctcccccaatttgtgggcttcgccaagtgtttatgttcactgtacggcatttttttagcgcaaaatcaaatttgggcaatcttaattatatgtacagtaatgacagacagcgctttttgccacaaataggaatttataaatattgggaccacagtaaatccggggattaattggttactgatttcacgcatggtgccatttttagaatgatccctaattaacggaatcataacggaattttagttcttttttagtttccattaatttagcttttaattatttccttccagtaattaggtcttattgatagaatttttaactatgccaaaggcagggtagaaaatgccaaaaaaaaaattctgaaatccgaattttgcatgtcaaaaaagttcagtcatagaggataggtaattcaaacacctaaaaaatctggaaatcattcatcaaatttggaaaattcagaanttcccatcaaaatanaatttttaaggcacttcaatcatcatttattt

SEQ ID NO: 3678 - DNA, 2441 bp, Heterodera glycines
  unsure (1)..(2441): unsure at all n locations
taaaaanatctggaaatcattcatcaaaatttggaatttctctccactcgcaatcaaaataaaatttttaaggcacttcaaatcttcatttattttggtgccattgtggtaaatttttgctgtttaaattgtttatttttttgtgaaattcattgcctaaggcacttctttatcactttggcattgttcaagcagtgctcagcacattttcacgtgttctgcagacgaccattggcaccacagcggctgaaagtttgaacgcgattgcctgcatttttcttggccaagtgtgttggcaaactattttaaaaacaaaaatactgtagtatctataatatcaaatcccatccctgatccaaaaaaaaaattgacgaaattgccaaaatttcggatttttaaaatcccgacagaatgtcggccatcgatttatggcattttactcgctaaggaaatttctccagacagaatctgccattctgattgagccgtccattatcacaatgaccgcgtccgaaattcattgcatgatgaccgccggctttgcatgcattgcgggcgctttattctccgcttatatcgcacttggggtacacaattaaatattaattgatccgttaattacattattaataggtcaaggggaagcatcgatttttgttttatattttatgattaaaaaaaaaactaaaattatatctattgaaaagctctaactttctgttcatatacgtgttatttttcagtttttaccacgaaattcttaaaaaaaagtataaaaatttatatgtgaattataacgtatttcctctaatattgtcccctccaacaaagcccaaaaatgggaggttgaaaaacccccgaggcctctattaaatatcttattaattttatttaacaaaattctgggccatggattttgcgtttttcagggcttaatgactcggcacgaaaatcgaaaatatggcaaatgtcatttaaattaattaaaataattttcaaatttcaaagaattgtccaatccatctgttgtccgccactttgatgaattctgcaatttcgttgggcatctccaaattggtctatcccgaggtggaacattcacagcataaggaggccgaagtgcgtgtgtgggtttggcacaaaatgtgccactgatttgaaaattagggttaatcgccgatccgatgcgggggttgaaaatttttattttctcgacttttatgaaaactttactccccgatgaaggtgttgcccaccaacatttttgtctttaatttctcgagccattcctgacaaattttgttgtcttcctcgatccccaactttgctctccgagagtcagagcttatcccgtttgaattttaaatcggaatgccaaggatttcttgtaatcacggaatttatttcaaaaaaaaatcaaaataatattttatttaattcagaagatgaaatttgccgagcgagacaatgaggagacaattttggagtgcattacagcatcctcaattcgtacggtaacacagtgtcattcatttcaaatacagtaatcgccccccccctatcctgctgactccgcccggttcagtcccattttgcaattgccattggtgccaatttggtcacttacattgccctgttggcatttttgaattcgactattggttggcttggctcaatggttggaatagcggaactctcattcaatgtatgtattatattggactgtaatgtactgtactgtatttttcaaaataattggtcgagaattgtggatttaaaatttttatgagagtcgagactgaggaaaaatgccattttctattaaatatatttttcatttatatttcaatatttttcagaaaatcctcggcttttgcttcttcccattggcctgggccatgggcgtctctgacgcacaaaacactgaggtaaaactggacctgatcaatgctttatgtaatcataaaaagctgatcgacactgaaatttcatgcttctttgaccttcggggaagaaattccccccaaaaaaaaaaattgaaaaattttctatcgattttccatttttgtattaattgcttaaaatggtataagagcaccattaaaaattgatgttaaaaagaattatgctaatatgtctttctgctggttaaaactcatttttaggctattggaatctttttttataaaacagaaaaaaaatgaaaatttattatttcaatagtcgtcgaaaataaatttttttgaaaaataattttaatgagagcacattaaataataaaaaataaaaattcatgtgctaaggtaatgttggacgaaacgatgaaagtggctgaactgatgggcatcaaaacggcactgaacgaattcattgcttaccaacgattggctcaaatggtgaccaacggcacacttaatggggtaattaatgcacagtaaaaa

SEQ ID NO: 3679 - DNA, 1591 bp, Heterodera glycines
  unsure (1)..(1591): unsure at all n locations
ttttgagcgttatatgcccaaagaaagaaaagtgtttttgccaagttaagttgagcatttctaaattatgcaaaaaatttaatttccgaaatttttttttgaaaattcataaatcaaaaaaaaaaaaaattaaaaataagactgactctattttttaaaacaaaaaataataattttttaaatataaaaatttcgcacatataaaagaaaacaccaataaaatatatatttattcaattttaaaaaaccgctttattttttgaaaaaactttttaaaagccctttctataatgttaataaaaaattttcaacaaaaatttccccaacaatttcaggttgcatttcgggcatttgtttccggtatttgtaccagctttttgaccacttgtgttgccggtagatgggggaagaaacaggattcaaaaaacaaaaaaaaaatttcaaaatgccataggaatgttggtggacgtgccaatggcatgtagcaattcggtgccgcacggaggagacgaaaaatgccttaatttggacacattgattgatcagcaattttaacggtagggatcagagattatcaaatgctgagcaaagagatagtcgatgaacagaagtgatcaattggtgatcagtttgcaattggaattaaagtctctttttaaaaatgtaaaacaagccagaattaattatcacatgatctcactaattatcggattaatttaaaacctattttaatttgggttatattttaaataaaaggataaaatgccgtccgataaaccaatgccagacattttatcggcggattttaagacttacgaaatttacgcaattccgccaatattttgtttgaatcatcagataatgccaacaatctaccaaaaattcgctaggatagtaatgacattttttatatgtaaaattattttttgagatttaatgagaatccattaaattttctataaattactgtaatgattaatcatcacaaaaatgtcgatacagtaacttggtcaaagcattcgctttattctttgattttaaaatttgccaatacatttggccaagaaaaatggaggcaaactcaaaactttacaccgctgttatgccaatggtcaactgcagaaaataaaaaaaaacatttttaagccattataaatatgaaatgggcaatttaaataataaaataatttattcggctaattaaatattaaaaatgttattttattttctgattcctaaattaaaaaaaaattatcttttttttttttgcaaatttacgcaaacgaactttcaaatttgaatcacattttgtttttttcctcttcaatggataattgaaggcatttaacattaattgcggcgattgcatttcccactatttgtttcagcaaattaggcattcctaagttggctgcttgcactttgtgtgtggggtgaatgatccatccatcacccctcgggggaccgaccgtttgaatcatcgccccctcggggaccgaccgtttcgcacataatcgccgggggtcaaatggggcggaaattcagtgaaaatttcaaattttttttgtaaaaattgttcgnttaatcaccc

SEQ ID NO: 3680 - DNA, 4691 bp, Heterodera glycines
  unsure (1)..(4691): unsure at all n locations
catttcatttcgactttgtgtgctttttataatttttatttcgttttgagcccttgttaattttcaattctaaccccgaacccggactcgaataaaaaattttaaacaaaattcacattatgcaccaaaataggtcaaaatgctcgaaacaaaatttgctttgtttatcggcacggatagaattgagaaacaagcagacaaaaattattttgaaaaaaaaatttcatcttaccatcacgtttacttttactgatttagagcatataatttttgttttgtcccttttatacatattcacattttatttatcgcattgttaaacataaatctattgatttcagaagataataaagttttattgtcattagagaatggtggcggtgcaacagcttctggaacagaagggcgtcgtcaatggtatcaggtgaatgcacttttctggctatttaaatgaccaattctttccctctctcgcttaattatgcaaagttcgttcagggatgctttggtcttcgcggctggtgccagcaaatcatcagaagttcaccatggacgttgtgcgagtgaggataaaatgcgtgttgcggtttgttaaagtaattgagattaagcttttaaacaaatttatttcagatgagggacagcggttcagtcatcacatgctctatatgcctttatccaatttacaacgacgaatccgtctttttcctgtcatgtggccattgttatcactcacaatgcctttcgaactggatcgttaaatctgtgcctccgcagcgtagctgccctctctgtcgtggcacgttgactgcacttgaagtgctcgcgctttacagctaccagggccgtgcctcagcgaagaatgattgtttaccggcattagcaaaaagtacaatgcaatgagtttatattgtcgtgtacccactgtttttatgcaattgttgtaaaatacgttagtcctcatcgttgccaaatgatctcttagaaattaaacctcacttcatcactgtctgtcctttcaatattgttgttgtcttcgcccatttataaacatttatttatcaaaatataaattttaattaatgggaatataacaaatgaaaaaaaacataaatgttttgaaactctatccgtggtcactgccaatcgttgccccttctcccgaccaccgatgcgtccatcgtcaggcacacactttcgtagttcggtacccgaacaccgtcacgccgcgcgagtgataccgaagactccgttttgagtcgcgatttcgtcaaaccgcgccttgcactcgtccctcacggcgcagttgggccaattgcacatacgcaaaaatttgagtcgtttttcgttgacaaaaatccgaaaagaaaataaatatttacgtaaccaaaaaatctcgttggtccactcactcggtttctgtaagtaatttcgtcctgtttgatggtcgaactggactttgtgcccttcaaaatgtgtttaatgccagcgaaccttaaaatgaaagtaaattaattgaggacatccaaacaatgcttcgcacatggtcccgtaattcttctgcacttcgttagcatctgccgattggaattgcatccaaagccaatcccagcaaaagcgtaagtcatccgaagcgaattgatctctctcaatggccttcttcgaatattcgagcagtgcttttttggaacaaataatgactgaatgaatgcctttcactcacttgccaatgcgttcagtgaatttccgtagccgtagccggcgagcacccgtcgtttgaacagtgtttcagtgtcaatgtcagaagtgcagttgggtttggccaacaatttctcgccgttttcaaagttcagctgcggccccgccgaaatgcaaaagtcaccggaaggaccgatgacggaattgacgtcatcacgaagctaaacacaacagaaaactagtgaaaaaaataagaagcaagacatactttaattatggcaattcgtttcgtggaggcaatcgaatgggcaaaagccattggcttttcttggacaggtaaaagtgccaaccgatcactgatggtcgggtgccagtcgaaggaggtcaaagacgacattccgggcagctgaattcaaagaatgatttacaacaataagttaaatcaaaaaacaatccaaaccgagtaaaaatgaactccgtatgagtgaccatcaatgtcgagtcccttccgttgtgatgggtccaattgactgtaaatgttcgacgatgggtcggcagcgccagtcaaatttttttgacggtcagaaaaggcggaggatgaaatggaaaaattgaaaagattgccacaatctttggccaaagctgtcagatggaaaagacggcggttgtgccacgccaatttgtttaacactttggaatttgactaaaagggcgaaaaatgcaatgaaagaacagaataactctaaataatccaaaaaccattacttcatggctgtcgcttccccatcttttgtttatattagccgactcccattattcaataaaaatattatttaaaatgcatttaaagacaaaacaacacccatttacttacacaagcttcaatttcgtgcaatggcgcagagcccaaagaacgccgatcgtaaacaaaaaccaaattgtgagcaaaacaagcaaaactaaattgaaaatggatgactgagtgaatgaattcatttttcggaaccgaaagccaaagttgggctcactgcaaaggcccatcaacggattttggacactcaaagtgctgtggaaattgccgtgctcgcgaatgtccgcaattcgaattccgcgacttgcgttgatcagcagcaaatttgggtcgtctctaaaaagagcaaaccaattggaggagaaaattggaactagaagcaggggaggaacctgaaccaacagacactgagcactttttcggcaaaattagcctcgaaaattgacattggcacttctcgcacattgcgcgtcgtccgattcaaatcgtacacaacgacggcatgatcagtaccacgattcctaaacatggaattaaacgaatattttaacttgggaaaaggacgtgtttcctgatgatgagatcacaaattataaaatggaaaatggtgatttcgtcagtcgcgttaccctacttggccacatcccccccatccccaactgtacatcgccccatttctcccaactctgaattcacagtttgcatttacctttcataggctgcacagagtcgtgacgaatcattaaaattccaatccaaacaattgatgcctttctgcgcctcccgaatgtcttcgcctcgcaaataccttaaaattagagcttttgctcgccaaatgcattgaatttgcaccaactttacgcccggttgtgtgttagcggaaacgacgcttatccgaccgctggtgaagccaatggccagccgattgtccctggtgtggtccaaggagaaggtacggaccaattcctgcaaaaataacggatggttgaagaccggttggataagttcttctccttacctgttcctgccgctgcaaaaggggggaacaagacgaaaccaaagggtcgacagaaaaagcggaagggccggccaaatgagcagcggaaccaccggggggcttgtcattcacacgaaacagcgaaaaggagtcggagtcgagcagaaacaatttggaggagggacagtcgtcggaagggccattgagccatttgatggtcggaagcatcaaaaacggaagctacgaaaatacgaggatacataaaattctgaaatggaaaagtaactgacaattattggtaaaaaccaaaaaaaggaattggaaaatacataaataagatttatttataaaagatgaattatgaagaagcgatgataaaggaatctttctttgtcatcgtcgtttctggctggaaattgtcaaaaaagccggcacaagcatcgaccatcagcgattggcacgtcggaggccattcggccaacacgcgggccgggttaccgccaacgatggaaaagctaaaaacaattaatttgtgcttaagttggtgaatctgtgatcctttcccgaatgtgttgccagaattccgcatcaatttataaaaagaataaacgaataattgttattttaattatcgaatatttattaaatttataaattttacggggggacgacggtgtcgggcattagcacactgtcaggctgaataaagcagcagtctttgaccacacagttctgtccaacgatgctgttctgaccgatgtgcacaaaactgccgacgtaagcggcaacgaccacacagccctgaagaaatgaaaaggggaaaataaaataggtactaaatgggggtggggagttgaaaagaagaccctcctcgacaaacaattggtaaaaacccttcagaatgatgtcccaacggaaaaataaataaaaatttctttgcatttaattactcatttaatgtgttaccctctcaatgaaaacgtaatcaccaaaatggacgggaaaatacgtaaagcctaaaatggaaaaataatcagaaatatgtaagacgaaggaattcatttgcccattacctttgctgaaatatttgtagggcggacgaatgatcgaaccctcgccaattatgcaatatttgcccattcggatgtaagctgaaaacgcanaatgaggacggcattccgacta

SEQ ID NO: 3681 - DNA, 3774 bp, Heterodera glycines
  unsure (1)..(3774): unsure at all n locations
tgtcatctttgatccgaaagtctcttcacgtccctctgatggcgtctcgggaaatccttggaaagtaattaatttatatgtaatggtcattggtcggtcgtttcctttctttgctcactttgaacattgtcgagccaccggaaagaacctaaaaaacgatagtaagtgtatggctttaacatttgcatgtgtaacagttgtccactgctcacaatgttctcgtaaagccctctgcgcacatcgatcggacactgttggatcacctggtcaaccacttccgaaatggacattttgtagtcagagctgacgaactgaagatgaattctgtttatcgtccgtcctattccgcggtgataattcgtgcaaaaaccaaacctcgggatggaagaatatttccgggcccataaatcgctcgtaaccgacatcgaccgcaaaaggctttttggtgatattgttcactccgttatatgctttgttcagccatttctccggctccgagtcgtatttgacaaattccttgtgaatgtccggacaaacgtaacaaaattgttcctaatggaaaaagcaaaattattatatttaatattattataattcgaataattattccatgttatctttcacaaaaatagactatttttgcacaaaatctctaaaaatacttgcaaaatttcaattttccaggaaacatctatcagaaatgccatatgctttttgccattttttttttaaaagtgtggcctacaaatcagataccacaagcaaaaaaagtcacacgccttggtacatctcttgcacatgacgcccagcatttgaacgaataaataatgaatacaaatcgcaattaccttaattgcctttgcaacttcgtacgactgctcactgggaacattcacttcacgatccctcagcatcttaaattaaacattctgaccagattgcatatgaacacgagtcgaatacctgctgcaaaaagtacgtaatgtcgcgtccggcgatgggaatgtgcttaatgcaggaaccgatgacatagccatcacacaccgggatgcaatgggtgacgccgtctccactgtccaccacctcaaaaacaaattaacaaatttcagggggggggggattcacaaggccagtcagagaacggtggttgaactcgcgggtttgccaagaagcggccaaggcgagcagagcctggacagcgatgtaaaggccgggcacattgaacgactcgaacattatctcggcagtgaattcgcggttctccggcgtattcagcggtggttctgtctgaaattttagcaattaaagaggaaatgatggatgggaatacggacgaaccaacagaaagtaatggtcttcaggctcggctcgcaaatatttgaaaatgcaatgctcccaaaaacgttccattaggtcccaatcgtcgacaattccatgtcgaattggatactgagaaaagcataatatactttgggaatagacaataaaatgagaaaaacagaaccttaacaaaataattcgcagccaaaggagacaacgcctcgtcaccgatgaaaaagtccaagtccgggatttttccgccgnacacttttcaaaatattcgcatctttgacagcgatagccgacggaatgataaactgtggctccgaatttcctgcatagccaagctttgtgtaccttaaaagaaaaataaaaaacgcaaaaagcagtaattcttaattacccggtgccacaatcaattacagcagctggcaaattggcatgcatcaatcagtcaatcaatctggacaagagccaaaacagtaaaggctgtgaattttaatttattgtaaatatattactgtcgatggtatgaccccacctcttttttgaaaaaaataaacttatgtataaataaatcactgaagatataattgggaacttgacttttctgaaaattctaaaaacatgttcctaggggtcttttgagaacagtttggagactttgactctgccttttttaatttttggatcaagtcacagaattgtatccatgcgagcattgattttggttgattttttactatttcatttttttgaactttttttttgaatatttttcgatgttcgaccaaaaattcgatttcgggttctgatgtacggaattatgaacgccagattcttaatcagcgatgctgaaacccccggaagctatgctattttacatgaattaaggcaaaaaaattatgtctggtaaagtgcattagtaccaaaaaatgtgctgatcaggaaattaatttctgattttgaaaaaatgttttgtctacgatttttcatcaagtataataaaaataatccgcagccaagcggattcgaacccaaacccccacctcataagaacccagagatcaattattaaatttcaaaaaatcagagaaacgaaaaagttgacttctccaaacattcaacaactcattcgaaagctcttttttttagctctacaatacttgtgcatgtgtttcttacatctgactttaccgttgcagcaaaacgtatattagacacttcgtaaaaatttaagcgttttcgtatcaaaaatttaagccaccaaaaacaatataatgtaaaaaaatacataaaaatcaaagaatcatttcgctttctgagaactgctcgtacttcgtccagcatctgcggacccgggatgagcagaagagggagcttttggctgaattttctttagataaaactcattttgaataaaaattcaattcacataaattcctctgccgagacaaattgctttgaccaatttcacagtttcttcttgtgaataacttggtgcctcgcgtctgtccaccacgtgcaatctgaaaaatcgaaattttaaatctaaaatatttttgaaaagctggcaaactttgtgaaatcagccaactttccacaaagcatgtcaatgtgcgagttcaatgttttgatctaaaaagtaaaggatcgcattaaaatgagtgaaaaatgcgctgattttgcctgtttgtgaatgtctcccttcgaccggtcgcgttcgatgttcagctcgtcttcctccacctccggctttagcttcgttctcagcaaaatcggaacgatattgtggccaaagtttgagagtcgtccctccgttaaatgctaaaacgttggtcagttaataaagttggtttaatgcttaatgcgatgattcacttaaccgtcaaattcgggtcgagttcaagtgaaacattcttcggcacaaattgtgtcattttcatcagtttaacattgtcatcgaaattgttatggcccggctttctcatcagttgttgcagcgacgcaaacattccggcaagggaacagaatttctgtaccatgtcggcccattgcacgtgctcttgcagttcgagggacatcagcaagtcgtggattgtttctcggatttgcaataatttgccctcagtttcttccatcaaagctcgaatccgtaaattggcaatgtcctgttggtccatattaattatctaaagaagaaaagtctaaaagctaacaaaaaaaaattttcgagaacgactattttggtttttttttatttaaataatttttgtaacattcaaggtaaatttaaaaaataaattttagaattaacgttacgcgaatatttcgtgaccggcaatgccaaaatgaattttaaaataaagaaaattgctcaatgggactgaaaaaaggcaaataataaacactgagaattgctaatattttcttattttctattttcggttgcca

SEQ ID NO: 3682 - DNA, 1645 bp, Heterodera glycines
  unsure (1)..(1645): unsure at all n locations
attccttacaaagcccccctccaccccccccccccctcctctcttctctctctctttaatatgtttgctctttcgtcatcttttgaaggcccacttttcatttatggtcagtctttggcatatttcatgggaacgtgccaacggcacgcgggcgacgaatggcaaagggaaaaggccaaagggagggggaggggaggggacaacattcttctcttcttccctttcttttgcattttgtactccgttctcatcaatatttgatgtcatcaccctaaaggacgactcaaactttgcccactctcttcggcattgcgttttgtttgtcctttttaattcttcaaattctcaaaattcgcccttcgccaatgtttccaaacacaaattccttgtcaaattctccccattcggattctttcaatagaaattcaacctcaaaaaggtgggaggaaacaattgcttgggtcactcacggaaagcgattgtcacggcgaattctaaatccgtcaaaggatttttcggacggaggttgccccggggtgccgatgggttcacccagctttctttgatcactttagcgcttgttgcggagattatcgctcaacatttgcctcgttatgtgttatctttgaattcttttccccaagttcattcgttggctttgaagaaatacaattgggagactttggaaaggttagacagagagagaaggggggatttgcctaacaatgaaattttaaaaattcaaacgaagtttatttttctcgacgcaaccccacctttttgaaactaatttcagttgtcatttgctatttaaggaccgttttacgccatttgggcatccatatctccacagagcatatcgaatctttggcaaatgccgaagagggaaccatccaaaatttccttcccattcttcgatcccaaattgacgatgccatttccaaacggcactttcgaccctcttccaccagcagcagagggccaagtcggtgctgctccaggggtaaccggcaaataaagtgtcaaattcgcatgcttaatgaataggaggaagtcaactccatcttgaccaaattggcacatcggaaaggcaaagagagcagacgaacggcacagacaaaacggaaggaaacggagaagggaatggtcggccgaaagtgttggaagaattggacaaagaccaattggtggaagttagtgattgattggatgcaattagagaagggaaaggcacaaattaagagactctatgccaaagtacgcgaacaagaagcacaattgaggaagaaggacgagcaaatcgaggcattgagtcgcaaggtggagaaactggtggaattggtctgcgaggaaagtgtggtgagagaacggcgagtagggcgggacaaagttaattgggttaattagtgataattaagaaaaataccaacggataactgatcaattatggacataatgtggtgctatgtgttgatctaatatcttccagccttttttcatctttctttttcctcgtccattagaaggcattgataagaacaacagaaaaaagccttttgtttgggagcgatcggaagattaaaaacagtcgatttagcctagatanattatttttttaaaccttanaaaaatgcccaaatttaac

SEQ ID NO: 3683 - DNA, 1661 bp, Heterodera glycines
  unsure (1)..(1661): unsure at all n locations
ttcttcgccactgtttgcntggcgtgtcgccgccgttttgtccatccaactacatccgcctctgtcattccgatcccttggttcatccgaacagcaaaataagcgcgtctaaatagtacagtatgagctattgtcgtcattcattggcacagtatcccccccccaacggcccaccagtgggagtgccctgtgccgataaacactgccccggtccctggccaccgatgcgaatccgctgatccatcgcgcggatcgccaaatggcttcgagtcgctgttggaattcgctaagccgtgccatttggtcattgaacattcgcgtgtcgtcttcaagcagacattggcgttgttcatattgggtgatcttaggaaaggaaaagccgtggaaagagaaggaaagggacaaacagtgagaaaatggtcgagaaagatggacagggagcagtaggaggagaggaagtcgggttggtaagtggcgaggtttactgtgggaatgggaggggtacggtaaaaaacttaaaacaaaggagagaaatgttgaatttatatttttatgagataattactctctttgctttgtggtgactcactcatttggaagaccggcaccggcacagaaacgcaaccgcggaaagttgcgacggccgagccgttgtccgctccctttgcacaggcattcacttgacacacttcctccgcacgcggcatcaccaaaatgagcgagacgtacttgttgagttggacgagacgatgccgaaaaagacgcgtgccgaggatttggtctgagtccaattccaaatggttgaccaactgaactgcaaatgttggcatccgttggtttgccaacgacaaactctgctcgacgccttgctcagctgctcgtagaaactccgctgctccggcagagctttttccataaccaatggcactccgttttcatcgtccgcctccgccagcgacttgagaagggcccattcttcgcgggtgacgtgcgaattcgaacggacgtcttaaaagggaaattatctaattggggagacaattaaagggcaattagtaaaaaaggttgattattatacttgcaaatgggagggaggagatgaggttgtcgggcaccagcacatggatagagttgagcgaggagtgcaggcggaggtaagcgacgtaaaggccgggctccagcggaaccaacgaacattcgtagaagttgagcagtgggagtaattcgcgtgagaggaacttcaagaaagttacaattgtcagcgcaacacagcccaaccgccggtgtccatcacctcaagcgcgggacacgcctgacgacggcggaaaagcttctccatgcgcatccatcgcatggccaagccttgcacctcgtcgctttggccttcggggacgagtcggacggtgaccagcaaagtcgtgccgggttgagaaacgagcggcacgtggtggacacggccaatgtctgaacacaaaacgcagtcagcgaacgcgggggtggagagaatttggggaagcgaaggcaaagagacgcgcctttcaccccgagggcattgtgcatggccaaggcagcgtcaagcagacgcgagcggagttgaaggttggcggaagaggcgacggagcagccgagcgattcctgcaggtgaggcagctgttcccagc

SEQ ID NO: 3684 - DNA, 7487 bp, Heterodera glycines
  unsure (1)..(7487): unsure at all n locations
acttgggaggaatggcggatattcgggagaagaaaatgaaacatttgaaataattggacaaagtgttgatttgttgacttattaatgaacgaatgataaataaacatttgcgaaattggaaatttttgggggggggggacgccaattaatgcataaaacactaatttattgtttttaattacccaattaatttgtttcccaataatttaaaaaaagaactggttaaagctttttgttttgtcggtttgaaatcgaattgagactgtggcaaagttatttagccgataggcggctcttggagctgtaaccacgcaatggcacaccattttcgaaaattccaattcctcccaatttcaaatttgaatccattttttccatatttttccaaaaattttatttttttcacattatttgtccatttttcacttttttcacatgtccattttttcacattttttgtccattttttcaccccctccgattgaacacttcgttcagcgtttgcattccgaattcgttctgcacttttttgaattgtgctctcatgaacacattttcctttagcatttccttcaatcgttcgttccgttccaaaagcgacgcctccaaaagtgcgatccttcagaattattttgtgtgctttttgtgttttaattgtcctccttttcctaccgatgttcgcttttgtccaacttttgtctcaattgtccattttcttgctttaatttcacattgtccaaattcaatgaacaaaaattctcaattttctgctgagccgccgccattcgaacgcgaaactgttgaaaagaatgagaagcaatttgcattttaaaactcaaaaacaaattctgagcacttcgccaatgtcgaaacattggcaggggtcgaagcgaagcaattggcggagagaaccgacggcggcggaagaggaggagggcgaattgtggcgaaaagagtgccgaaattgggggagagggcgcagctgaagaagcgaagaatggaagaagaacaaccgacgggaaaatcaatttgattttattaatcgtacctcatccgttttaatcggagaagcggcgaaatgcttttggtggtggccaaattcgccggcagagagagatggcaccaataaaaggctaaaatcggacagtccccacaacacactccctgccaatgttttcctcgcttactcttcctcctccccctgctgccgtttcggcttttcctgtgccattttcggctttgaatttgccgtgccattcgcttcatctgtcccttcgttttccgtcgtttctttcacttcgatttccacggcgacttccattaaccctcaaaatcgtaaattgttcttcgaattgtgtgtccctctggtgacaccttcaaaagtgcagaaggaattcccattggaagtgaatttgcgcgagtgttcgcccattccgtggccactcaaattgagaaaagcggcagaaattcaaacattgacaaatgccacttacattctccgctgcattcgttcggcatttcgactttggtacggcgcactgagcaaacgccggtcggatttaaacatggcgggaggaaagtgctgctgatggtgggacatgtgaaaaaaggcagtcaaaagattggcatcgatttactcaattaattatgtaattaatctttaaatatcctcggcattaatcacataattaaattattaatattttgttgataaattaattaattacagaaagtattctcttattattttgggtttctacctctaattggattgattaattataattagttaattaagtaaatgacaataaatgcgaatgtttcgtttcgtttccttcgatttgcgtagtttcgcgtcaattggaaaaagtcaataggaagaagagaaaagcaaaatgtgggcaaagaaaggaaagcgaagaagaaaatgacagcaaaaagcccccacaatttattttaatttattttattttaattttatcaattctttttcggtttgtttatccacggcaattctttttgatttccaatgagcgacgaattcgttgtggccaaattcgattacgaagcccaagaagaaagggtaaaaccaaaaactcaaataaattgggcattattttgatttttttggtctttttggtcaggaactttctgtgactaaaaatgaaaggcttaaattgctggacgacactaatccatggtggaaagtgagaaggaattcgacattcgaatttttaaaataatttttaaaaaacaggcgatgaacgcccgcggccaaattggctttgtcccaagcaattatatgcaaaaagagtcaattggtgagagaaggaaacggacaaaatcacttgaggaaatgaaaagttaaggcgagaaggacaaggagaaccttcgctcggcaaatcatttgagcaacggacatggaaaggttaattagtagccaattaaccctaattaattaattagtgtcccattgaatccgtccatgcgttttcctttatttctgttttccattcttcccctcccctttcagaggctccattccgtcgccgtcgttctgttcgattacgccccccaaagggttcgttttttccaaatttgaattcgcttggccaaattggcccatttgccatttgtccgtttaaggacgatgagttggcactgagaaggggcgtccgactgcgcgtgttggacaaatcggcggatgggtggtggaagggcgaggaggagggggccggggcccgccggggatggttcccctcaaattacgtgagggaacagccggcggacgacgaattgccggaactcagcgaaaacggaacgccaaaaatcaacggaattggcacaacggcggaggcaccgcaaacgcagcacagtccggacagagttttggaggtatcggcgggaaaaacaaatggaaaagcgcgggacggacagtgcaaaaacaaagggcaaattcggggcaatttcgaacaaatttccattcattttaatttgtaaaaaatttgaacatattttaacaatacgaaggaatttggccagaattaaaaaaccctccatttccataatggcttttaattttacattattttattaggattttatataagttctgtcaactttatcgaaaatttcatttaaaaattcataataaattcaaataataaaacaaatttaatcaaactttgcctgattattcccttatattagcaccatcttttcaccaattgattaggcttttcactttggcatcacaaagttatggcctttgatgaaattaaattcccatttattgaatgaattccctccaatcatcttaattgcactaatattcccaattgtttcctaatctttgcgccgatttgcttaataatgccgtgccttttcagattgtcctctgtctttactctttcgaagcacagaaccctcaggagctttcctttgtgaagcacgaacggttggacattctcgagcaccccgtggatgtgagccgattaatgggccactaattaattaatttatttattatggcaattaggatcccgagtggtggatggccaggaaccaatatggacagacaggtcggtctctgtctgctggtggccgttaattcgcttccccccagggctcgtccccaccaattacatcgaagtggtcgaccaaaaccccaacaggggcgccttcgactcccccggcgtaagtgccgcgcctccgtccgtgccctcctcttccctttcgcccgtccctccctcccctcggccaaactcttacattgacagttccgactggtggttttttttactagatttttgttaattagttaatgcattaagggaccaactgactgggccctacgcgcgacagccgtggcaagtgaaaacggagggagggaaacggcacatttagcaaaggcatagcccaggggtttaagccgactccccccgaattccgtccattctctgcatttgggcgtggcttttacctctcggcacgcccattctctaatggcgaaaaagtgcaggtattacggtcacataacacgggaacagtcggacactctgctgaaaacgcgcggcgttgagggcgattttttggttcgaaaaaatagaatgtttggcatttcttcgaaattttaatttttaggtgcgcgacagcgaatcgaagcccggagatttttccatttcgctgaaagactcggccaaaaacaaacacttttgggtgcaattcgacgccgcgagcgcccaatttataattggcaatcgccgattcgaatccatggaaaaattaatattgtgagcaaacggaaagccaaactgtggaaatttatttgaaattcactcttaggaattatatgagttcgccgatattcagcgacggaattgtgaaccttttcctgcggaaacctttaccaaaataaacgacggaacagaaaagtgagggggaaaaacagctgaccaaaagagcagcgaatgaaccgccaaagaaaagggacaaaaggccaaagaattcattttcatttttttgattttcaaattaaaaaccaaaaactcatccgtttgaatgtataaaataacagacaagacaaaacatggtaacactgcttaattgtgtaattagggagcactttcgttaatagttgcttgcctttctcggaattgcgagagcatttgggtgaaaattggaaattttgctccttcattaatatttgtatacaaagcaacagaacatttgacattttaaagctgataaattaattatgttgtgagtacatccacttataatcaattagcgattggcaaatggcccgagggaatgaaattgcgactgatttctgagtaaaatgactatcttttgtaagtatcgtactttttacaacaatacagtattcgtgcgtcgttcgtttttttacccgttacgcttttctcaagaacatttctccctcactgttctgtcctttttggttttctctcgtccaacttttctttgcttcttcgccttcggcgctttcctcgtccaaaatgaccgcgtccaaatcgacgccctaagacaattcaaatttcgaattttaaactgtttctttttactttcgtgtccactagccacatccacgagacgaataaattggcacttcccaaaagtgaaacggtcaaataggcactggcaccccaatgctcgttgaagaaaaccaactgacaaatggggggagtcataaatatgaattcaatcagagcaaaattaattaaaatttataaataatttaaccgaatttgtctaattcttttaatattttcaatttttaattcatttaaatttctttaaaatttgaactaatacaattataaataattaaataaaattagtaattgttaattaattggcaatgttaacaaaacaaacaaaaagagaaaagaaataaaaaaacaaaaagccaaccacaggcgcaaaaaatccgccgactcgcgcgatgcaactgcaactgccaagggcggaagagcgcaacagagtgggcattgactcaaccgccgacaaaacgttggcatcccaagtgaactcgaggaaaatgacgccgaagagattgatgaaaagaatccatgggccctggggccaaattttgggcaattaattaaaaatatagcaaaacatagggaaagcaaagagagagagagagtgccaaattacaacgaacgcatgggatggcaccagcaaattgccatcaattggcacaccgagtcgatgcccactcagaaagcaattggcaaaactgtgaaagtgacaatcgcccgaggggaaatgaaaagcgtggcaaaggccggtggagggaaggtacagaagcaaaacggacgcacaaagcaacaaaagaacttccaagggttttagcatgatcagtttgattttgaattgccagtgactcaccgccggtgcgatcaaagcaccgaattgggcgaccagcgaaaaactcgccatggccgaggcacgcaaaacggtgggcatcaactcggtgccggagagatagcacgcatcccaagtgaactggatgaaaacgttgcccagctggttcatcaccagcaccgtcgcttgaccctttttagcatatgggaagaaggaatggaataatgggggggggggggggagagagagggaaattaatgggcaaatggcgaatgtattgttggaaacacggcattacacgtcgatcgattggtttgaaaatggcacttttctctctcaaaatgactcacttcatattttagcagcaccagaacggtcagaacaatgaaacagaaaatgacgatcatttgggcaaaatggtggagatttcgtcgagaaaactttggcatgtaagtgtccaaagccaaaagcatctgaaaatagaagaaaaaggaatgggtgatcagaaaagggacaaaatgacgacggacggacggaccaatttggaaatgatcactgggatggagagaagcaactgattgaggaacagatcaccactgaggttggaactgttcaagtcgacggagtaggaggacattgaggaggtgaacctgaacaatggggagacagacagacaaagtgaccgatcgacggccaaactgaccacatcatccaaaggacgagcagacgcgagaaaagcgaccgatcgctgacgagggacctaagaaaagtgacgagaggaattagccaaaacgagcacaaaaggaccagaagttggccttcctctccggaatgggcgccttcttctccaccggcgcgtgctcaacgcccgcgagacgcgcgatttgcttttcactgcgaagcatctcatcaagtcgattctgactgtgaagccaaatgggcgactccggcagaagaaaggccatgatcagaaggccggggaccgacgcaatggcacaaacgatgctggcagaacgccaatcggggaaaagaaagcacagagaagtgaggatcagacgagagatgcccttggggagagaaatgtcatgggaaagaaaggaaacgattggcatttttagtgctcgaaggcacgaaacggaagaaaaacgctaggccttttttcccaagtgccaacccaattgcagaaagtgcgaaggatcatccgatgttccggcggcattatttccattgtgaatgtggccacgacgaccaaagagccgcccataagcaaagagacgatgaatcggccaaacaaaagccattgccaattgggcgacagagcagagagtgccaacgagagaaggccaaagaagaaagtgatcagaccttgacggtgcgaatcaatcgaaatcgatcggaattgngcacacaaacactcaccgattggctttcggccataagtgtcggagagaggggccaaaaggacagtgccgagcaaaacaccgaagaattttgatctgatgtgaatgccacgacccacatcacttcatattgtgccaccactcacttggctgtacaatgcctttgtgtaggcgccggtgccgcaaatcattggaaat

SEQ ID NO: 3685 - DNA, 2261 bp, Heterodera glycines
ttttagggatgagctgataaaatgaaatgactactgctcagtgataaggaccaatcgattgtccctttttattgggttgaatttctgttcccccgggggataatccaggggcaaacactcgaaatcagcgattggcgtgggaatgggcgccgatcagagccgattgggcaaaatgtgacgagggaatggccaaaaaaggcacagtaacagcttaattttaatgtttacaggcaacgtttatttgttgtattttgtgtaactgttaaaacacagaattattattaattaaactccaaaatatggcaatttataaaatgccaaaattggcggcttacaccgaattttggtgtcaattaaaatcacacagattaataaatgtttgtttaaatgatgacattctgtgacattcgtagtccaaccgatctgctgatcagctgctgatcgttgttttgatcacattttgtcgcctctgtccgaatttttttttatttacccaatttgcgaacaattaattaattaattattaacgagtaaattttaaacaaataccacacgcatgtgttttcatacaataaaattatttaaaaaatggcgacgaaacttgaaatattcgacataataatctttgtttgatttgtttaacttttatttatttttacaattcatttttaaaagtaattttgactatttgttttgctaattaatagtcaaaaaatgaattggcttttcaaaaataaattaatagttttaaatttaaattttcttcattcgatttcatttttataaattcataatgtgtcaaatttatccagttaatttatcagttaattcttttctcatcacagatgtgcaaatagacacttttttaattgatgattttattaatcggtaccaaacttaattaatgaattgtccgtttttccttctccgtcacttttttgctgctgactttccccaattttcgcctttcctttcctatggtttcatctccgtttcttcctcaggcactttcattttttctttgccttttgtccttttccaatgctcaaaactccttaatgggttacggttatggaggagggaacggtcaaaatatgggatacggtggaggatacggtggaggatacggtggaggatacggtggaggatacggtggcggtggctataatcagtgtccgcttggccaaacggcggacggaagtcagtgaatggggcaaaaagagtgggggaattagatgggaaagcctacgcctaattaacccttaattgggctgatgactcactgtcattaaaatctcttatgaaagatttaaaaaatgtgataaccttcaaaccgttcactcattttcagcttgtgatggcctcaaattcttttgcatggatcccaaagagaactgttacaacggcatttgttgtgagtgcttccccttccctccctttggccccatttaaccgctttttcctttttaggccaaccttcccaaaaccccggcttttacggctgtccgttgggcactttcgccgatggcacttgcagcggcagcctcaaattttggtgcgccgacccacgagaaacatgcgtaaatggaatttgttgtaagtaattatcacccatttatccgatgatttttggattcaaatttttttaaaaaggtcagcaagggagcagcagcagcagcaacacaaatccgtatggaggttacggtacgggaggaacatcgccttacgggaacataccgaacggatacggtatcggcaccggaatgaacggatatggtatgggaacaatgccctacggaatgaacggctacggtatgggaacaatgaacggctacggtatgggaacaatgaacggctacggtatgggaacaatgaacggctatggtacgggaacaatgccctacggaatgaacggctacggtatgggaacaatgaacggctatggtacgggaacaatgccctacggaatgaacggctacggtatggaaacaatgaacggctatggtacgggaacaatgccctacggaatgaacggctacggtatgggaggcgggtgagtcgtttttaaagggttttgggcggggcgccaacaacctcttataaattcggactgaattcgagcattttaccgtttccagttacgggatgacctctccctattcctcttcgcctctgtcgtccttttcttcgctgggcgcaaatggcctcgggggttcgtcatcgtattcggcgctgctcgcccaatattaccgtagtctgat

SEQ ID NO: 3686 - DNA, 5747 bp, Heterodera glycines
gttgtccgctaaaatgtacgtatcataattggtacatgccgttaaaatacactccacaaaatccttcgttgggtcatgtccctctgcctcgctccaatccttggtcctctcctccccacaaattttacaattcgtcctatgtttgtcgtcacagcattccgtacacgtaactctcaccgaaatataattgattacatgctccttctgatcccccttgtaaattgtatcctgcgatgtttccgaatcctgaaaatcaatatctattttgttaacgtgttgttttattaaatcttacccaaactacaattctgtagacatctttttcctcattttcctcgatcggcataatataacaaccccgcttggggtcatggctcacactacaaagctggcaataagtctctccgcattcatgatccttcttcgggttaaataaatatgtcttgtcacagatcacgcaacgcctccataatttgcaagtctgatgtccctgatgataattgtagcacccccaattgtaaaaatagcgatggcacttcgggcactcaatcttcactccactctccttttcacacggcattcctccaactctattgcagtaataacatctcgcccggcactcaaaagtatgataaacatcctgatcgtaaaaacattcacattcaacgcagaacttcctcccacggttgaaaaagcagacgtatttctttagaccatcccagtgattattctccaaaaatatcggcactacattttcgcgtcccatcggtcccttccacaaaactcggatcgatttccgcggatccgcagacttctcaaatgccaccacccggtatttaccggggtaaatctcatcctgaaaaatttattaattttccgttttctcaatttttaaagcccacccaataattctgaacattcggcaagtgttccacaccatagctatattcgttaatatcaattccacaattacgtaaaagctcaatagctgcatccctctgtctcacaatatttttcataaatcgattaaatgcaaaacggtccataattaaataattcatcgacgacgtcagtgcgtaaaaaaggcaaaatttatcagtattcacaatcctaaaatttactttattatatttttttttgcataattaaattatttaaaaataaatattttaagtttatttttattttttacatcttctttattcttttttttcatttttttctttaaatttttttttgtttcattaaattttttaaaaataattattttaaatttattttttactttctttatttttaattttattctgtttttttgtttcattaaattattattttttcatttttttctttaaaaaaaaaatttttttttgcttcattaaattttttagaaataattattttaaatttatttattgattttttctatttttttattttatttttattaattggaaaaatcttaccctatccgctggtgttccttgaatccaaagtcaaatttgtggacattcctcggcccctctccactgggcatggtcacgcaagtaatttttatagtaatcggttccgataataaaagcattttcttattttcatccccgtccccgctctgccccagcttattaatctcctccatgataacatccgcattgttctgggggtacgcccgatacggcacccacaccgggaaagcaagcccggcacccgtaattgccactccaaacatccgcacttttcgcttcattttttcttccgtagtcttaaaagccacctttatcatgtcgtcgatcgcttccctcattgcttcatcagggcgtcccccgtccgggttgacacgaaattccgtaatgttcttcgtaaatccaaattttttcgcaagttgtcgattggtaatccagcaatttataattttccatttcttcagtaaaattgttcctaaaatttatttattttttaattggtagaaaacgattacgttgtctcttaatattttctttaatattttattaacgcttacccgattgaacggaaatcccattttttggtcgacggtccgcattgaacagagcttccgttgcgttttgaaggcattttaaaacaaaaaccgcgaaattgatgcagtaaaattaaagagtgaagagagattagaaaagaaaaagacgggaatttaatagaagatttaattaatttaattaaaatagagcggagtgaattaaaattagagcgcgaagagagtttaatgaaatccaactatttagttgaatgattttcaatttgggccgggtgtgcgaaataggcaaaaagggggaggggtctagtcacgtgactgtctgggtttgccttaatttaagggggtcatcaatcatttcggtagacagctgtcacattttattcaaaaaccgtgcaaaaatcggttggatattccttatttcgaaagtcatcaatcatttttttttttttgtgacaggtttgcaaaattaggggccatattgcgaaatatttggaaaaaactaaaagtcacgtgcacattacgaataatggggggaaattgcgaaataagagaccaatcaatcacattttattgacagttgacctaatttagaaggccatattgcgaaataactgaacaaaaagtcacgtgcgtattgcgaaataatggaagagaaataaaaacccatcaatcacctgacaggtgacctacttttggaaaagttttttctttattttcgattttacttttaaattggattttattgtccaattcaataattatttatggctttctgccaatatcaattaattcacttccaaattccattatcgattacatttcgcggcggcggcatcgcggcgcggggcgggtggagaggaaatgcaaaaaaaaccacgcactgttttggcacattttcaaaaatgaatttttaatttcaggatcagaaaaagcatcacaaaaaaaaatctcaggattgcgaataatgtaatgtctaagtagtttggatttagcctttagaaattaggattaaatttgcaaaagaaaaaaattgaatttccttcacctgtcacttttggtgacaggaggatgattgatgaccttcccgcggcgctgcgcggtgcggggtgaaaaaacacccgcacggatttgggtaaattaaaatccacaaggcggcagagttcaaagaatatcccataggctcaggatgtgagcgggcggcaacttcaaagtggtccaataggttttggttttgaaacacccccctcccctcctgggttttgatggggcggcaacttcaaagggctgcgcccctcccatagggtttggttcttggcggcagcttcagatgtagtccaataggcacgggtttgtgagccggcggcaccttcaaaagaaaacacccctcccgtaggtttgggtttgtgagcgggcggcaccttcaaaagaaaacacccctcccgtaggtttgggtttgtgagcgggcggcaccttcaaaagaaaacacccctcccgtaggtttgggtttgtgcggtaaacacccgctcggaacccgctcgcttttgacgctatatactactctcgtgtcgggaaatttagcagccttaatgtgtccagcactttgtttgcagcgaatccggcacccattttggatttgcaacgacgtttggatggacattttcccatcgtttgcccatgcccaactcggcctcaaattggcacttctttcgccacgtttcaatgcgttggtggactaacatttcgatggcaaaagcgaattgacaatttggaaaacaatcgaaattcgcaaggacaaaggaccagaaccgaaactttatgtaaagatggatgacaaatttgtgccatttccatggcccgacgaccgttgttgcgcagcaaaattcgctttaaatgccttcatattgagtaattaaaaatctgagctatggcaataaaagcattcattccctttttgcagttacatcgatcactccgtcatcgcttttcttcgttcaaatcaccaaattttcgacaaaagaggcaccaatttagacttgtggattccatcaccacacaccacggatggccagcggatttgggatatttttgttcgcgaaatctggccaatttttttggaaaatattcatcacttgggcttttcccatggtgatcatttggacaatgtcctgctccctcccggaccacacctccttgaaattgttgacccaattggtgttcccttgttcgttgtgatcaaagcaatgcaatcgcttgggttggccatcttttctcggagagtgcaaccatttggacaatgcttggccagccgttgcatttggcacatcaaaatcatcaattgcatcaggcaacaaatcaacggaattgattgaaaccaactgattgagatcagtgaaaattgtcggcgaagtgcgacgaagcaaatggtccaaatgatcaccattgtaaaagtccaaatggtgaatgtttgtcgaaaaaatgggccaaatttcactaacaaaaacatcccaaattggctggccatccgtgttgtgtggtgatggaatccacaaatataaataggtgcctcttttgtcgaaaatttgctgattggaacgaagaaaagcaatgacttggaattttttttgccaaattttctgacactgaattgtcggtttttcaacgtacactgaatcgtcgtcactgaatcgtcgtcactgaatcgtcttaacactgaatcgtcgtcactgaatcgtcggcactgaatcgtcggcactgaatcgtcggcactgaatcgatatgcaccgtccgggtataagggctttttatattcaaaatttaaaaagtttcgttctcgtacatataaatatttaaaaaatcagcaaaatttttataaaacttgaaaattaatgtcatattttgcacttgacattttcaagtttaagaaacgcgaaaaaattcgggatctacataattatcacaccgacaaataaaaaatgagtcctttgaatcgaaaaatttcagagtgatataaaaattttcaagttatttttttctgtaatgtccaatttcacgtctaattttcatggaactcgtcccaatacaccatctaacaaaaattaagacaaaataattatcttagctaatactaaggagcccgaaatttgtatagctttctttcttccgatttgttagttcaaaaatttcagaggaatttgttttactgcaccatatgatcctcctgacgcagtcgtctgtgaacgcagtactttattttattttaatgctttttatttaacccccatttgatttttaattaaacaattcaaaatatttcaaaaaaggtctttggttctttcaaaaaagcatttttaattcaatggcaggtggaatcttcttttaccattgctcaaaagggttttattgcgctaattggcgtcgacaaatgttttcttcgttctgtggatgggattgtgtgcctaatggccactcaatcgaatgcgcgaatggccatttttgtccgaccggccattcgtgctccgctgacggacgccaatgcattccaaatggggcgcaggaatgtggacctaatggggggtgtggaaatggccaaacatgtgagaacggtctttgtgtgccaaaagtgagtgtttttgcttgatttatgacaatttttcataaatctgaattagagttggatttatatcccaattttcaaaaagttaaaaaaagtcttgcaagaaatcgtcctcgaaaa

SEQ ID NO: 3687 - DNA, 1991 bp, Heterodera glycines
ccccccccccccccccggttgagtgatatgctgctgatcttaacattttgggaacggacaattgattaagataattaattatttttgtcccagcactgtctgtagagtttttgaacgaattttgagtagcaaaattttagaatttctgaacaatataagattttttgataaagaacaatttgggtttctgaaaaataggtcgactacaacccaaatattaaaaacgatggacgatatatataattctatacaaatgaatcagcaaattgacatcatctatattgattttgtcaaggtttttaaaaaatcggagttttaacgttaaaattggcgaagaattgtcagacagtttcagaatattttcaggagtgccccagggaagtgtcttagggccattactctttttaatttttataaatgatctgccgtcctttattgcaaatgaagcggcatcagttggcataaaaatgtatgccgatgatgttaaattatattatgcacatgaaaacgatgaccattcaaatcagttggataaagcaattgaggctttggaaaaatggtcaaaaattaatgggttagaaatttcaactgaaaaatgttttgttttatatttagggaaaaataatatgaaaaaagaatattttattaactcaaaaaagatttctgagtcggataatgttcgtgacttgggcattataattgactcgaaacttaatttttcagaacacataagcaaaattgtacgaaacgcatatcttagaagctttcagattttgagtgttgaaaagcagggaaataaagactctaacagcagattataagacttttgtacgacctcaattagaatattctaccgaagtttggaaccctaatttaaaaaaaagatatagacaaaattgagcgggtacaaaaatttttcacaagaaaagtttttcgaaaatgtggatttgtgcccaaattctttattataaaatatgcttcgcgattgtcaaaatttttccttatttaatgcccaaattctaaaatccttcattaattctcttaagaattgagataaaaccctaaatttggtctcagagattcgaccagtttggtcaaccccgacccaatgacccccgacatttcaccattccgacaagaggaggcaatcccctaattttgtaaaattgcacattttggtaccatttctgttaagaaaatctctcccacatttttgggtcagcatttcgctcatttttgggataaaaatataaaaaatggggtgggaagagataaaaaatccaattcagccggggtttacgggagtcccgctcccggaaggtctcggactcccggctcccgttcccgtgaattttcacccaaatacgggagtaaaaatacccaatgcaagaataattttttattgaaaatctgctaaattattttttaccgggctctaatgtagatcatctggaaacagtgtgggttggtacctttgacacaatttaccacagttgcatatttttgttttgattgagcttttgggtaaaaattatttattttccgttgatttgggctcggaatttcgatttccagtgttacttttccttttatacatattagtaaaataattcaattatatcttatgtaatcaaaatcgacagtttttttttgtttatatattccccgattatctttctgaatttgggcatcttaaaacctaacgcagttttttttctcataccaataaaatttatccttcataattttgttttaaatttcttcattattttgcaaattaattcaatggtttttggtttaaattcttggtaaaatttgatcggtcatctcaagggccatgggttgacattttttattgaagcgggtgcactaattttgccctccaccccccccccccccgccgtttaccccgccgtatcagcagttcactccccgtttcagctccccccgagttaattaaaaaaatttattaacttttttgtaaaatacac

SEQ ID NO: 3688 - DNA, 2115 bp, Heterodera glycines
  unsure (1)..(2115): unsure at all n locations
gacgttgttggtcaccttgttgcgcaacttctccttttaagtagtgtaataatccaaccattttttactgaaaaatttcggttttcctttttggtacncactccnaagagctacctccccncaaatttccagaaaatttcgctaaatgccggggggcgggaggcatcccccaagctcgtaatcctgggatagtccctgtgaatcacatggtccaactgctaccttcaatcgcactcgttgatggctgttccaaatgctgacgcaattcatccgttctttgctgaactgcttgctgtccgaccgcctgctgctgctgctgttcatggacattctttcgggcatctgtgttcatcagttttgacttggtcccactcgccacaaatttgctttcaaggtgttcagcagccttctgctgctgctcttggttatcatgcccaactgcattttcgactttgaacgcgcttggggccgctgcttggtgctgttgctgatcagcgacagcattttggaaattctgctgaaaagtgccaaatcatgaaactcttaagtgtgttcgagaaatgccgatgataaccgctttttattctgacttgttggtgctcagccgttttggcttccccaattttttgtgcccgctgatgcagttggtctttgctgtacttcggcaatgtatcgccgcccgtcgcacggtgatctttggccgcaacatcgccgaggttctcagaccggagctgttggtcatgtgcaaagacctgttaaaatttaaaaaattcagaaaaaaattattttgggattattaacaacctgaatttcgaataaacagatgacagcgaaaagcaatggaattttcattttttaaatttcgagtttggttttaagctgaaataagtgacaattaaattttttatataggcatattgaaaaattaatcgtaattagaaagctaaaacaacacagaggaaaatttttcggaaaaaatagtcgttgccatattttaaaatgctaactgatgagtgagtgctttaatgcatggatgagtgaggtttacccatcggtcggggagggggagactttgtgattggacagcaataaaatctcattttgcgactgtgagaaaatggggtgaggaatggcatattttgcgctgtgcgagtcccatttataaggaaggctgtgcgcgcggcactttcttcgtccgcccatctccgcccgctgaaaagaggtcggtccacagtacaaaggtcatcttgcgcaccaatctttgcgcacaacacacacaacaaacctgatgacgattcttctcaacggccttttgccatccccccgggcgacctccgcatcaaattcggagcagaattgctcctcgctcgccatcctgtctttaattcattccccactctctcaccctcttcaccgtatgccactcactcgcttggcggacggaatattcaaattttgggcatttatggcgcgttgtgccggcggcgcccccgccgcgacgcccattcatttacgacgaccccgtccaattcaccgcgcgatgaatatggggggcaagagatggattggtcaaatttggtgatacgcacataacaaattaaattttcagtgaaattggatgggttattggattttgaaaacttcaaatttgggcatttttaatggcatatgaaaaaaatttaaatttattttattctttttttgtttttttttgggtttctgtttgttgaccttgacaaatcttcatctaaatgccatttttggtcctctcttatccgcgcgacccatctccgcttgatgtgagtgaggaacaaaattgacatgaggcgccaattttcattaattattgttattaatgaaatgtgagcaaaaattgccgaaaatgaatgaccctgacccatgtaaattattcgggaaaaatctgagagaatatatttaatgcattgaaaagatttaattgccgatcaaacgaattcaaagcggcacttaaactgattgaatttttaacaatttgaaaaaaattatgctaaaattttaattcttttaattttaatttaaaaaagcagaatcggaaatgaacattgtttacatgaacgtacatgcaaacattacaca

SEQ ID NO: 3689 - DNA, 2360 bp, Heterodera glycines
tttaataagataagaaaattcaaaatcataaactaatttgaagtagaagcagaaattaattttaagaacaatttttgtcatttttggagaaaattggcatattttgcacaactttttggcattttttagttcaaaaagtctcctgtttcgcacctattttggcacttttttggggttttcgtttatatttttggctattttccgatttcgttctttggttaaattcttgattgtgccatttttgtttgctccgcctctttcccttattacctccggcatttgccaccgcctcgctgcctccgtcgtcatctgtagttgacatggcggctcgttcgcgtgccaaagactgctcacggcgcgctttgacagccgcaagaagggatggcgttgtgcgtttccgtgctggccttcgcgtcacataacgcgtaccatccggacgtcgtttgatcttgatggatttttttttatccggcatttaagggttgccgcccgaattccgacatttttcttgtcccgagctctaaccaaaatttttttggccgtcttgccaaatccccatctcgatttttctcgtcctggaaccagaaccggaaaattttggcagtcatgactctataattacggtcccgacttttttctcgtccccgatcaacgtttacggcattcatggacttacccgtaaaacggataacgtatggatttcagtaatttactgtactttggttcaacctaccacccattccagctcaggctgttgtcgatgttgaccactgatttgcttggacgggctgccacgacgcttttcccgttgctgctgctgcttcagttgtggttggtgttgttgctgcttgttgtgcccaaatgcgactgctgtttttgttggtctgaaagcaaacagctcggccaactcggtgccccgtggccaatcgggacgtggcaaattttgtgccaactttgaacattgcacccgagttgcgatgcctgagcagacagatgatgttggtaaattgtcctaaaaatgcttgaaattagtctcgtcgtaatcttggtccttggcaatccatcctcagatattttttgcgattttaaaatgatttaatcacaaattgttttatgcgaattcaaatgttaaaataaattaaatcaattttggctaaaaattccaattttcccattttggcacccctgaatgatgtttttgctgatggccaattaaaaacacatcctcggcagtcattcgtttatccgctcgatgatggctcattgttttagtgttatcagcgatgggccggtacagttgttgtgcttgttgttgtgttctgtggagacttgttccagcatactgtaattgaggtttttgctgttctgccgacagtatttttccaactttctgaagctgatgctgttgttgttgttgcttgtgcgcttgttgatgctctttcgttgccggtattgaatactgtatcggcatctgtcttggaatggtttaatacgatacaaaattttacttgaattaaagcaatgccaaactttttttccacgatttttaataaattttcagcaaaaattggtatgtggattttcggaaaaactttcgattttttgcaaaattttaatggctagttcttaagccgttaatatcttcagaatcagtgctagatcgttttttaaaagtgccatttccaaatgacgatttttagttagaaagtctataaatttgatggatttataaaaacgctcaaagttggagcgggtttttattgagattcgagcaacattttctataaatagtgcctgttgttgttgccgccttagtgaaccagtttgagggttcgtctgtgcttcaaattgcttttcattttgtcccgttgctgatgacgcaccattcttatttttcggattataccgtagtgtggtggtgtctttggggtactgtggaatttgtaactgtggatttacatatggaatattatgattggaatattgttgtagtttctgctgttgatacgattgtactggttgcacattatactgctgctgctgttgttgttgttgttggacctaataaaataggctactatggtacccaatcattaatattctatgatttaatatttacatagattttattttatttcttttaatgattattactttttgtggtttttgggcagcatttgcattcagtacaaattgctgttgtttttctgcaggttggttttttgttctgttctgtgccactaattgtaaatttgatgtagattgaggctgaaccttatttttttttaaatttatttggttttttttcagtaattttttgttattttttaaatttattcacttttttttttctttatttt

SEQ ID NO: 3690 - DNA, 2393 bp, Heterodera glycines
cggcttactgtattcactgtagaacattgttttttagtgtggctggcggtgatcttggccagtgtcaacgcccgtgttatatgccgatgttgtggttgttgttgtgcccggtgacaactgcggctgctgctgatgttcatccaccgacgagctggtgacaggcgctggaactgtatcagctgctgatggtagatggggtactgtaacaaagagatatagcgcgactcagaccacgtgggtaaattgcaacccggttaatgggtcgcaaaaaatttttcttttaaattggagatggatttctaccaaacagggatgttcctggacgtcccgaatcccatcccgaaaattttatccttcctgaccctaatcccgacatttttgttgacttgaattatatcccgagcaaaatctcggtcccgagtctaacctgccaatgggataacgtccttctttttttgtgtaaatatacgtggcaatgaaaaggtcgtcggcctccgattggcggttggtgtcggcatttgcggcatagaatgaggaggcttaaatgaaaattaggaatcgggtaaaaatattaaaattaatttttaattactttctcagattgtacgcaaatattccgaactcgttcgctaaggccttcttcgtgcatgcctttcacataagaatcggagtctacggagtgcaaatctcgagatgacattcccgaatcctgataataatttatatgattatattgaatggtttaaaatattttaaaattattgtttaaaattaattaaaggtttaagtaatcaaatgaattaaatatttgtaagctcattgcttaaaattaattaaccgttgaactaatcaatagatgaattaataaattatggattaaaaacaattaacacacctcattgttatcgtgaagtaattattgatttcaaaacaattaacgcacctcattaatatccttaattgttttgtgccgactaaatatttccctgcgacgctgcatttttcactttttctttattttttaatgtttatatgctagaaaataataattttacaaataataatttttaagcgattatcatttaaaatattgagatgaaatgttttggaaaaatgttttagtgctgacaaaaggtgtccttttcctaagtgcatcatcattccaccggttgtcagatcaattcagccgattgcctgcagcaggaagcggctgtcaccaattttactccagcagcaggcaaaatgctgctgctattttggcaatcaatttttgctagcaaaacaatcaccagcagtaacaacaacaaaaacacccactcaaaaaatgaggccaagattgatcataattcgaactcaaattaatttaaaaaaaaaacctaagggtcaaagttttctaagcaattttgtcctgaattttaaaaagcacaaaaaaataattaaaattaaatagtttaattttgttaatataattaacattggttaatattatttcattcttttcatctgtaatgatataaatttaatgaaattttaatccaaaaaatctctgattatttaacactttttaaaaaaataaataaaatttgttaatgaattaaaataaatatgattgcgttgtttttatctgtaatgatttattttattttatttttgaattttaatttaaaaatcctttttaacgctttttataaaaataaatttaatttaaaaaaaacaaatttattttttgacctttttctttatcaatttcttgcaaaaaatcattttgtgaaatccattcgccaattctcttcttttcttttcttgattcattagagaaccgaaaatagcagccaaccgatcgtccgatccgatcgtcgtttgtctttgtcaccaccaccacatcgtcctgctcagtctgtcctcgttttgtcatgatccatgtgtccgcaaagtttgcgcaccaccagcaccaccgcctggaactcttctattcttggggccaagccaagcgggggagggggcaacaaataaaacactgttttaccccaccgcgatcgcgatcacaatgaggtccgatcgcgggcattatcggtcatttgtgtgggctggtgatgaacagacagcagacagatcccgtcagtcctccgacacacaatttgtggatctccaatctccccccaccatcccctccacaaacaaatgcgtgcctcgatcagcattttcccccatcttcctcccacatcctcctccgatcacaatcctttccgattcggggagggcgaggatttgctgggacgcgatccctgattaaggagagctcaaatcagtaaatgggtgctcttcacctgaagacatttgtgatcaacggccggggaaatggtgaatgaatgtgtcctttttgcgggaccggg

SEQ ID NO: 3691 - DNA, 1927 bp, Heterodera glycines
  unsure (1)..(1927): unsure at all n locations
gggaaatggtgaatgaatgtgtccttttgcgggaccggggagaagcgggggatcagttagggtgatcggaagcaaatagaaaattgaagaaggtcaagatgggtccgatatgaaattcnatgaaagatgatcattcattgcgtagagagagagatgtgtgcttttgctaattttgaaagcttcgagagcctttggttcagcaactaaatccccccaccgccgcttcccactgtcccaatcaaagtcctgcgcaggagagagaccagacccgtactgctcttactcggaagctttttgtcccattattgagagcgtttttgggggggggggtcatgggagaagagctctccgcggtctcctcgagagtcttgaggccatgggtcactactattatatgtgtgtgctctacccctttcccaactcccgcgcagcagaaccaagaagccgtcgccgagctcactggttactgatcagatatatcgcaaaaatcgccgagcccactgatcagtgatcactgatcccgtatatcacacaaagcaattaagcagaaaaaaggaaattttgtcaagaatttgtgtgcttgtgattgattgtgcctacaacaataatcatcatttcctaaaaattgatgtcactaatgctattacgtcttcttcttgttttgctaatgtttgctgttgaagcaggtaaaatttcaaaaaaaaaaaatatgcaaaatttcaaaaaaaaattatgaaaattttcttaaaaatcaaaaaaatttcagcccatcaacaacaactcggtacaccagtaatcggcggcatatgtaagctggacacaccagacgtgcacataggcggcaagcaaacacaattctttctacgctgtgagccgaacacggattcggcacagggcgaaggcgtttgggtggtgaagagtcggcatgccggttcaacagctgccaagtaagttttttatgtatgatcagcagcagggataggacttacacatataccatatttcctaaaatgcaacccctctaaattagagccccccccccccctctgaaatatagccacccttttgagggggatttgaaaataaaccccatggggcttaatttttagatatatttttacatataaatattttcacctcaaattaaaacgactttttagcacataaaaaaataaaaatcttattttatctttttaatttaaaaaaattatccactttttagcaaatattttggcatgtattttttggatttttagcatttgtgcactaccgtggcttaaaaatgatagaaaactgtgattagctttctgagtatcagcaattggttaagaattttgcgacgttatagaatacctgccgctgctgttgtcagccaacaagaaattgagcaaggcgaacaaaattcacaaaaaattgcagcaacaaaacaaatttcaagctatgtgtgcggtccgtttaaattaaaaattattttataaataaaaatttaaaaatatatatatataattataattattaaaattattttgagcgaaattaaaataatttcataatattccatgtgtaaaataaactaaaaaaaaatcgcatttattccaataataaatcctgtcaaattaaaacacttttccactgctatccttgaattgtggtgtcctttttcaaggacctcatgaaaaaataattattttttttttgcagaccttgtttcggatgctgtcgagcatggctactgtagtaccagtgaaaattgcttgcaacctgtgtataccgaccgtactgcatttctccaatgcgatccgacgtatagaagttttgacattattttatttatttttgataatagggctaagatttcgcaaaagccccaattttttttaatttacggattttttttgataggcacattttttgtaaatttaaaatt

SEQ ID NO: 3692 - DNA, 2453 bp, Heterodera glycines
  unsure (1)..(2453): unsure at all n locations
atgcctgcannggtcataggcacanttttttgtaaatttaaaatttatttatttccccctcagggtcgtcgatggacgaaaaagcattgccaatccgtcttcaactttgactttgaacgacaggcttgcattgcgcacaccgcaaaaatgtcgcaccattttcggcaatttcccagtgagatttgccaaaatttgcaccaatatatatatatatatatatatatatatatatatatatatatatatatatatatatatttatgaacattgcacaccaatgttgtttgttttaaatatgaagaagcactttgcacacttcaaaatgcaaaaatgcacgtgtttttaatgggtgttgtttggagtgccaccggttaaatgcgagtgccaaaaagagtgaatgccaaaacctggactgggaagtttcgtaaaaaaagccttcttggcggctatcgttttataaacgccgcctaggctggcttttgttacgaaacaaaaaagcacaaaaaaaatctttctttttttaaatttaaatgaatgagtggcactcatcaaattaactttttaacctttatgaatgataagagtgataaaaaatgtttaaaaatgtttaaaaaaatcctataaaatgtgagagagaactgcaactgcagcacaagtgctgccacattcacagcgcggcggcggcatcgtctgtacctttgcccaatgttcggttgctgacccatgcaatgtgggcagctgcaacaacggcaagttttttaagaggaaattctgattttatactgagaataaattttctggagtcgagactgagaaaaattaaagtaggggttgttgctccctgaccctcgggcagagaaaagtcacgaatcggcggggaggaaattccccgacaaaagtttgtcggggatgggtggagaaatgaaaattttaaaaaaatgttagggcgagcgacaccttcgttggggaggaaattttcatgaaaagttgagaaaaatattaccaggaatttttctaaaagaaaaatgaagaaacttatttaaaacatgtcagacaaattaaaatttcttagaaaataaaaatttaagttttaagcgtgaatgatataaggaacaaacttagaaaatccaacatacagtatgttcgtttttacaggttttggaaatatttcgtaattaattaatgggaaaaagtcatgaattaaaaatattttgaatattttataatgaaatttataggatgaatattccaaaataatcgaatcctcttcctattagtgtccctgcaaaaatttggttcgtttttgacaaattttagaaaaagtatgggggatatggggaattaaaattttcaaaaaacaaattaattgatggaaaaatgtccaaaattcatatttcaggattagctaatcctctccctaatgtttcactggtacattttccgggagccattatatttagagccccaatctatataagttatccataaataattatatttaaattcattttattttttctgtaggatattgttgtactgccgctgttggttcaatgcctaaaggtaaataaaatttgaaaaaaaaaattaaattattttttttaaatagcggttttaccaatttcaaccaacaaaacaatctcaagcggcaacagtaataacattgccaagttggttgtttatcaaaaaaatacatttactttttattattgttttttatataatagcgtagaattttagcgtttttataatttttataattgtaaagtttttagaattaaaaaaatagtgtttagaccgttatctccaccatcatcaacaattgctgtctcagcttctgaaacagttccaccaatcccttctattctcgtgattgaactgaacaacaacaacaatcacaacgatgatgtcattgaatatgaccaattacgcctaaacgacattccatccactttaattgggcacatttcatcacattcgcaaccaatgccaacaatttttggtgattttttttgaaatttggctttttctacctcattaacagttgaaaatcggtaaaaccaaaattttcagattttggttatctttttttttgaatctactatctctaagcaaatttattttttacttaaaatttttatttgtacttcaaaattaatttggaatgtccaattttatggtgtccaaatttccaatgtccaattttccggcacccatttcactgtgatcacagcctatcacaccattattttttgcgcagatcactgctcctccggcttccactcgcccatccgttgtggcggcacaagcggcggcgagtgccccgtcggactgatctgtgaatttgccacccgcttctgttgtccatttccgcccaaaaaacagaaacgcaaaagcaccagcactaatagtggtggaattggtggtgttgttggcaccaccgccacaggcaa

SEQ ID NO: 3693 - DNA, 5430 bp, Heterodera glycines
aaatcagaaattcacaaaatccattccaattgccaaacgcgaaccaaatcccataccaaaacgaacaaattcgttattttggtaaaaggaatttccaaaattcgtgttctcttttcaaacccattccaaattttgcaccaaaatcccagggtttcgtctttcctatcttaatttgggttgatcattgtgccattgcttttcaatcccttaaaaaatcaaggatgaaaaacaccaaattccaagtcgcaaagacaaacggcctctaccggttcggagagctgataaacgaggctatggaagaagtgaaagccaaaaatattttgggttttcaacaattggaaaaattaaaaatggaaatttttgcaatttttttttgcggtgtgtaaaattttatttgtgggccataactctttcctcaaccgattaatatttcttaaatttaccatatataaaattttttggaattccataattgtttttcaagggtttactatacggaaacggaaatttacatgtaaatgaaattattttttaatcaattatttacgattaaaaacaagataaattgcaattaatttgataatttctactttatgaaaattttttttataaattacataatatatatatatatctatctataataaatataagctgaaaacaaaaatcatttgatttttttgactcaaaaaaatggaaattaattttgtgattattttcatcttatttctaatcgtactaattgacggaattgatgaagatttgtttaatgatttgtggaaaaatcttaagccatcgacctcaaaaaacatcaaaaaaccgatatttggagaaattaatgcgataaaggaagaaaaagttgttaaaaatgaaaatgatgaacaaggaaatgccaatcaaattgaaatggaagacataaagccaaaattattacaaaatattaaaaaggaaaaaacattggaagaacaaaataataatttaaaaataaaaattaaaatgccaaaaattgaaatggacaaattaggcgaagaatcatttgaaaatgagtttaatgaggaagctgatcagaatgtttcgtctgctgatcacaacgattctgttgatcaagcgtattataatattatggtaattcaacaatcctgtaaaaaataatttaaaaattcaatggttctaagttttgcatttctaaaaattttaatgatttaattaggagtctgaaacaagaaatgaaatgaaaattttgaataaatttaatttaatgaaaacggaattgcgaaaagaaagtgtttataaaaatttgacaaatactcaatttgaaggcgaaattgcgaaaaggttgggcacaaatcgaaacaaaatttataaattgaagaaaaaattgggacaattaagagagagaatggaagaaagtgaagaaacaaaaatggaactgaccagaaaatttgataaaatgagaaaagaaaaaatttgtgggtttaaatatgacgagaagaaaatatcagtaattgaatgtgaaattgccaaaaagttgggcacaaatcgaaacaaaatttaccaatggaagaggaaatttggtaaaaaaaacaataacaaattcactttatacttactgtctcattaaggtataataacgaaatttttatttacaaacgaagaaaaaatagaaaaacttgagcaatttgaaaaagtgaaaaaagaatttataaaaaaattcaatttgaaaacaacaaataaaattgaaacaaaaattgcaataaaattgggcgttttgtggcaaacaatttttaaatggaagagaaaattcggtttaaccactcgtaatattttaattatttatatttaaaaaaaattaaattgcttttattttaaggaaagtccaaaatttattcggatgctgaaaaattggaatatgtgaaaagaagtaaagaaatcgcagaaagaaactcaatgttaagtgagagaaaaattgccgaaaaattgggcatttcaaatgacaatttaagacgatggaaaatgaaattcggcactaaatcgatccgttagcattggacaaaaataattttattcagtgacaattgggtcaatttgacaatgtagagaaaatcagagtactacagtatttccttgtttctttttttttgtaatttctctcactttcgcgtactatctcttcatttttagctgatcaaacgcaactgcgtttacctcgctttataaaattcgttttttttaaatttttataaaaaaatacatctattggcttttaaaaaagattatatttattttaactttttctactaattttgaaaagtaaaaaatttcgtccattcttgagccttgagccagccgcctatcttaaggtgtgcaaattttttaacagaagcccaacaaaaagcattcttcggatcggttttccgttagaaaaacaaaaaaaacgaattgttaattcgttaaattttgcggtctttagggattgtttttatattttaataaacattcagtctgagagaaaatagtctggaaactgatccccgggatcaactgtgccccaagggccagtcatatttttagttttcaatttgtcaaacattatttttagcgcgcgtacccaaacccagacaattcgttcccaaaattttctgaaaatgggcgccgcaaaactaaaataaaatggcgtaccgatcgatttcaaccccttggaaagaatcccgtcccgtaaatttcattttttttaaatgtgcgatccgcaattcgattttgcgcaatttggacttgggttcaatttaaaaaatttttagagggataagattttttgattcttcaatcatcttatctaattacttcgtttttatagaattccataaaaaattgaatcatacttttaaatataaatttatcgattttaagaaaatttaaaattttttaatattctcgggaaatttagcgaaaaaaagattttttgggaaaatttccggtttttgggatcaaaaaggtcaattcatatgttgggggccgttctaataaaggttttttgaaaaatgccaaaatatggacataaaatatgggtgaaaatgccaaaatatggacaaacatggaaatatggacataaatcgcgaaatatggaaaaatatggatatataaatccatcctagaagcttcaaaccaagctagaaacatgttttccgtgcgtttcaggcctcccacagtccaagaaaagaatatggatttccatataattccgagccctacttattataaaaggcgtaatgatggtaaattcatgtacaaaatggtattaatgctgcggttgtagaatgaacgacaagaaatgaaaatggtgtcaaaaatactaaactatgacgaagcggcaaataccttgaaggaaggtactgtagttaatagaattttattatttaaattaaaattctctaataaattaatttttttatttagtttcatttattaataaatcgagttttgtttattcatttcgattttgatggttataatatttttatcccatcccttagcaattttcttttcaattcaaaaagttctgagaatatacatacatacatatctctaatattttcggcattttttgggtttatgtgaaatctttttactcaaattaatgtttaattaattgaaaaagagcgaaattaatattatgttgataaattaccaaattatgttaaatataaacatacaaattactaaaaattgaccctaaattatattaaccacattatcttaatctgcacattgtctatttcaggatttattctgtaaaagaggacttaggtgtccaaaattccgacggtgccattatcaaattttctgatgcccaatttaatttaattttttatttaatataaatcgaggatcaataaacttttccttggccgattatatttcatttaatttcaatatatttatttttttggaattccataaattattttttaacatttacaaacacggaaagggaaattaaaaatttttaaaatcaactatttaccattaaatataatagattgcaattgattgagatttttcaaaaataaatagagattttgcatatattccacttataatataacaaatataagcagaaaaaacaaaatttattattttttttttgcatcaaaaaatgccgcaaattaattttgtgattattttattcatatttttattcgtgctaattgatggaattgatgaagatttatttgatgatttatggaaaaaccaaaagccatcgacctcaaaaaacttcaaaaaacaaaaattcggagaaataaatgcaataaaggaagaaataattgttaaagatgaaaagtatgaacaacaaaatgccaataaaatagaaatagaagacacaaagccaaaagaattgcaaaagattaaaaaggaaaaaacattggtggaacaaaataataatttaaatagaaaaataaaaatgccaaaaattgaaatggaacaattggaagaagaatcatatgaaaatgagtttgatgagcaagctgatcagaatgtttcgtctactgatcagagcaactctggaaatgatgaggattacaataatatggtaatataatagacaaaacaatatcattccttgaaaaaaatgttgaaaattcgctgaattctaaaaaatttttctcttaaaaaggatttctttagaatacagaagaaataaatgaaatgcaaattgtgaacgagtttaatttgaggaataataaattgagaaaagaaaatgtttataataaaaggacaaatactcaatttgaatgtgaaattgccaaaaagtttgacacaaatccggacacaatttataaattgaagaaggaattgggacaaaaaagagtgaaaacggaggaaagtgaagaaacaaaaatggaattgatcagaaaatttgataaaatgagaaaagaaaaaatttgtgggtttaaatatgacgagaagaaaagatcagtaattgaacgtgaaattgctaatgaattgggaattaagcggaataaaatttacaatttgaagaaggaatttggtaaaaaaaacaataacaaattcactttatacttactgtctcattaaggtataataaagaaatttttatttacaaacgaagaaaaaatggaaaaacttgagcaatttgaaagaataaaagaagaatttaaaaaaaaattcaatttgaaaacaacaaagaaaattgaaataaaaatcgcaataaaattggatgttgtgtgggaaacaatttttaaatggaagagaaaattcggtttcagcattcgtaaatttttaatttataaaatttaaaaaattgctttttaggagaaaaaaaacgttactcggatgctgaaaaattggaatatgtgaaaagaagtgagaaaatgaaaataagaaatccaatgataagtgagagaaaaattg

SEQ ID NO: 3694 - DNA, 3975 bp, Heterodera glycines
acagaagaaataaatgaaatgcaaattgtgaacgagtttaatttgaggaataatgaattaagaaaagaaaatgtttataataaaaggacaaatactcaatttgaacgtgaaattgcaaaaaagcttgacacaaatcgaaacaaaatttataaattgaagaaaaaattgggacaaaaaagagtgaaaacggaggaaagtgaagaaacaaaaatggaattgatcagaaaatttgataaaatgagaaaagaaaaaatttgtgggtttaattatgacaataataaaagatcagtaattgaacgtgaaattgctaatgaattgggaactaatcggaagaaactttacaaatggaagagagaatttggtaatagattaatgccataattggatttaatcattgtctcatttaaggcataaaaaagaaattttcattttcaaaagaactaaaaatagaaaaaataaaactaattgaaaaattgaaagaagaatttactaaaaaattcaatttaaaaatgactaataaaattgaaacaaaaattgcaataaaattgggcgttgtgttggaaacaattcgtagatggaagagaaaatttggtttcagcattcgtaaatttttaatttataaaattttaaaaattgcttttttaggagaaaaaaaacgttactcggatgctgaaaaattggaatatgtgaaaagaagtgagaaaatgaaaacaagaaacccaataataagtgagagaaaaattgccgaaaaatttggtatcgacagactgagcttaagacgatggacgaagaaattgggcaccaaatcgattcattagctttagctgtaatttggaaaattaatgggcttatgtagaaaaacatgtacaagaaattttaaggagtttgccaatgtcaaaaaaaatatgaaaattttctcaaaaaatgggtgtcactcaagccgcctagggatttgttccaaaatatccccggttttaagccatttttctggttctcagaccactctgaaggagtgttctgattatcgcagcgcaactgacttttctgtttagcataaaaagctactcttacatgaattttttcagattttttgtggtttctaggaaatttgtgagttatcaaaaaagagtaattggaacacccatttttttttggaaaaattcataatttttttttggcatttccaatctccgtaaattttcgtgttcacaacagccttgttttatcgatacaagtgtcgctacagatttactgttgttataatcttcttcatacaagtgaaatttatgcggttatgctttgcgattcaactgctgatattccccctgcgagaattattgtttatccgaaaaccgaataaaaaaattaacagatttatacccactagataaatgtgtagagccaatgacatatcattactgtgttatgtggtagaataccaaaaaagatgattatcacatttacaattgttattaacattagaagaacatttcaaatggcatactacaaaaaaatagaaaaatttttatccaagcttttattcccgaacaaaatgatgatccagatttgcatgaaattgttccaatgtatgatgatgtgcacggtccatgtaatgaaatataaaatcgcaaaatatggaccaaaaatcgcgaaatatggacaaaaaatggccaaaatatggacataaattttccaaattgagggtgtaagttttcaaaatttcttcgtattctctattgtaaagaataactttcaaaactgtctaaatatggtattaaaaattattttggaacaaaaaatacgataaagctaaaatttattaattccgccccccctgggcagagagatgcgcattcacataggagagaggagagaattagagaaaaagagtaaaaaaatatgcacgaaaaaacaaagaaaagcgacacccgtgctcagttggaacacgagggcttggcgaatgggcatgcgtggcacccgtgagcagttcgaatgtccctgaaaaattccgccacaaatttggccccaaatccccacacccctcgtcccctctcctcccccttccgcatccgttatttcagatttttcatattcaatttcaattcccctacgctaccacttttcatcctttcttctatgcagttgaaaacggcgttagttgctgccccctcccccaaattccgctcagtaattggccactaaattttccggtaatttgattccgaatgtattttttcaggtaattcgtgtccaaccgatgcctcaaccgttgccgctgagagacatgccgcaaattcaccatccaccgcgaaatgtgacatcaatttggatcaaattatggttgctttttctcagtctctgggtgtttcttcaaggaattcatgttcggcaaattcaacgtgaatacgccgtaccacaatttgccgatccgccgccaaacgtgccgtatcatccaccagaaaacgttccggtaatgttgggtcttgtttttcttgcgtttctcatatttccggatgctttttcaggcaattcaaccaatgcaacgaccgcggcagctgagagacgtgccactatacgaccacccgccgccaaacgtgccgtatcatccaccagaaaacgttccggtaatgttgggtcttgtttttttcgtgcgtttctcatatttccggatgctttttcaggcaattcaaccagtgcaacgaccgcggcagctgagagacgtgccactattcggccacccgctgccaaacggaccggtaatttcataccctgtcttacacctaacaccgaaacatcttttcttaagcaaatgcatgccaaccccccgagagtgatggaagcgatccgacggctgggcgagtggagaggaagaccaacggacccaagacgtccgcctcaatgaatgaatggaattccaatttgataaaatttgttgtttgttaattttttgaattgataagggttaaatcccattacctaaattgtttaaaaattattaaaattttaagaaattagatgctaaaccttaccatagacaaagattatgaaaaaacgaaaagaaatgacgaaattttcggaatgtttcttctttttgttatttatggactttactttttgtgttttattttcgcattaataaggtgttgttgaaacggttaattcttcatttattataccccattttgttgaaaattcgccaccattatgccctgcccactccccgccgaactgatcaaggaaataattgatgctcttccccctccaaaaacacatcggcttctgctcgtaaattttgtttaggcatcctttgttaaatgtcggttctattccatgatgagaagattgtttcgctcagatcatttattactaccaatggcccaaagaacaggaatttatttatttttcgatatttttattccccacacaactcaccaaagatataaaatttaaataaatttataaattttattttttaatttgataatttttaattgatatttctgataattaaacaaaattgtatttttcccaagaaattggcctgcaaagagtatgaaaaatgtgaaaactgtggggataacttgtaacatttgtgcgggagaagagagggaatgcgagatttgtgaagggccaaggatgatcacctggtccgtagcggatggttttgagccaatgagtgagtttatcgtttggataatgggttttcaacgatttgaaacggtcgcttttgcgcattatgctgggaggttcgattctcacattgtcttgtccgagctaacaaagaaggaaattgcgacggagttgatgatggctgatttgaaatttatcaaataaaggcgagaagagtgtactttcgggatttttggatgcttcgtcagaataggttggctgaccttccaaaaacgttggggttaaacattacggaaaaattgcatattgcccaccaaatacaataagaatgagaactttgggagg

SEQ ID NO: 3695 - DNA, 4037 bp, Heterodera glycines
tggaagtctcctctctggactttccattaatttttcaaggttatgtgaacgacaattgcagttcactaaacctgatgaatggtcaggtatgcaatcagtgcatgcctgaacaccaagactgcaattgaaatcaattgcttcttgccgacttttacagttaaagtcaattgttaatggctctctggttagagccatgttgttcccgtcgaaaacaaaatctgagtttaagacgggagcgggcggaaaagttactccgatcggagtaaggctgatgttgttccatttcagtgttcttcctggatagaggaacacctgagttgacttgggtttttcgcccaaggtttccaggcgaattattgcataaacaataaattcccaggaattgcagcccatgatttcatagactgtcttggacttttcctgagcataccaacgataaaaaaggcatgcactgccgcctaagaggcatttattgccccaaaaggctgtgctgtccaggcaaaatgaattgcctggaaaatcgttggcatcttttagctcaggaatggaagtattgtggcgaacttcgctacaatacttcccttcacaggagcccatcttagggcaccttttaccggctaatacattaattgcgtatgaacgttgccaggctttagtgaagctttggcattccaaagctaaagccttaagcacaacgtttattgagccaaggagaacaccttcctctgttttcagaagaagtgtgtttgtttggccaactggcagtaacgtcagcattgctgagttttcgacaatgcatctcatgcttgtcgcatttttaatgcatttttccgatttggccatgactgctatggtctctgctccagtcaaatcctgaagagagttagccataaggacaacaaacgccattgttctgtaaacacggcgtgatgtccaattttgagaagctgttgcccttggcctcctctctttcggaagccgatttgggccaactaagtaaattattggcctgataaattgaattatcagccaaatgaccatataaaatcctgaaaacaggacctttaatatggaaaaagccataaagctaatgcttatgagtgataagcaaagtccccctgctaacattgatgaaatcaatgggtaacaggttggattcgctaactgttcaatgcaaaaatagcattcgatgagttcgcactcatcaactgctggacataaaatgtcctttttgaacatgtgtttcgaatccatccaaaaatgaccttcacattggaagtcatttaggaggatttcctttggtagctcgtaagtgagcttctttacattcgcatgaatgtaacagttctctgcacagcagagctcaactttattgatttcttttggaatctttgctttaacgcccttgttaaagcaaagaagtttgcattcattgcagtgattggttggataggctccaaccaacgcaaacatagcaaaaaggatggaaagacagttcagaactgtccccatcttcgatggtttaatgtggcttcgacataagctggtcataactgagaatttttcttcccaaagtccttttgaagcaatttttgcacaattggacaaggcgttcataaacgccaccggcccaaggacttatttgtgggatgaatcgccacttaattttattaagtgcgaaaaattcctgcgtgttttgatctgccctttctggagtggtcaaatgctcaatagttttttgagccaatttaaatgaagtggcattgtcactccaaattaaatcaggcttccctctccgacttatgaaacgtcggagaacattgaggaatgattcggccgttgtgtcaagcatggcctccagatgaaccgctcgtgttacgaggcaagtcataaggagtatccatgccttgactttctctccggccaaccgcgtttcggttggaccgagaaagtcaatgccgactgctttgaaaggagcctgacggcatacacgctcgttaggcaaaggaggcatttttggcaaggcaaactggtatgcttgcatccttttgcaccgaaggcatcccttcagtgcttttttcaccttagttcttgctcgaggtgtccaatactcgagtaaaaactcagtcagggtgccttccaccccaaaatgatgccttctctggtggcattttaaaataattaagtctcggatggaggattgtcctccgagaatgattgggtggctaaaaccaaaaggttggtcacaccttcccaacctggttttaagccttaaatcccctcgctatccttaagagaaggatagcttaggaagtcttcagcacttttaatatgatccatgcggatcagaaggttctctgctaggagaacatcttctgctgaaaatagtcccttttcggacacttttgcgatttcttttcgacggatctcgaaaagcttggaaggatattccttctgaatcaatttcagacggagaaatcttaacacaaagagagtcacttggacaatctttgtccaagagctgaattttttggggtcaatcagaggactgtcaatcagttcctctgttctggtattaacgaagaacactttctcttcgttatccagagacccttcctccagattttctggaggatcttttattttaaattacatttctttaggccattggtcatggtcttccttaagccaggaagggccattccaccagagagacttatccttaagttctcctggttttgcgcctcgggttgctatgtccgccggattttcggctgttcggacaaaatgaaaagcacattcattgagagtacgaatttccttaactcgtctctcaatgaatttcggttgtgcttcttttgaagcaacccaacttagagcgatttgtgaatcgccccaaagatggagattagaaattggtcgccgaatttgatcggcgataaatttaagaccccttatccctattagaatggccatgagttccattctaggaattgttaatgcttttgaggcatttataggtttgagtctatttttggagaaaataagccaaactgaaatttggttaccttctgccgctcttagataaattgcggctgcaaatgtgtggatcgaagcatccacaaaagcatgtaattgaagggatgggttcccttgtagcattgatctccgtgggattctaatggtctgatccttccaattttcttggaaggattcccattgagtttgttctttctcagaaagaacatcatcccagcccttcttttcttcccaaagagtttggaagaaaagcttcaggggctgaatgcacggccccattagaccgagagggtcaaataatgaggcaaggaagcttagaacaagacggcgtgttgccaccttttctaagccattagttgggaactcaaagacaatttcgtctttgtctgtgtccaaatgagccctaggacttttaccttaggcttgttcaggcgatcctcctcaggaatcgccttcattacctccggggaatttgtaacaaattcccttaaattaaaaagtccttctttaaggattgctttggactctgcatatttatgcaaagcctcttctgcggattcacactcaaggagtgtgttatccacatataaggattgggccaattctttggccactggagattcatactcctcaaatggtgctgcaaagtcgcagccaaaatgaagggggaactgatcactccgaatgccacacggcaaaatcggtaagtgatcaaatttgttggtgccagtggtttactggcgtccttcacccagaggaatttggtgacttctctgtcctccggttccaaagcaatttgcaaaaatgcagcttggatgtcggagaggagagggaattttgggcatcggaaacgcataagcattccgacaaggtccggtaggattaccgggcctctatacaaacaggcattgagactgtttgttcctctggtgtgagcactggcgtcgtaaacgacgcgcaatttcttgccattggccaagaactccatgaatgaggga

SEQ ID NO: 3696 - DNA, 4090 bp, Heterodera glycines
ggtctctaatggtagcatcatatgcctccattaaatctggagaattacgaagcttaccaaaagtagacattagtcttgttaaggccatgcgataattggaagggaggtcgggaacctcctccttccatggccatttaacagagtaccgtccgtccttttctcgacgaatggacttgttaaatagacccattgctgtttggtcatcattttcatttggatcgtctttgattcccaaagactccaaattaaagaaatattcaatttctttaacggtaggcatttgcccttgattggactcatcaatgaccatcattgatagttccgggttcggaatttccggcccaaagtcggactctccgtttaccaaagggcccaaggttgttgaattacaaacaacccgggagaaacttccttcgcttggaagaattgccagaaatgtctggcacctataagtatttcgggctcttcccgagaaaagctcaaagcgtgtgccgcgtccttgcctaccaatgggaattcttcagaattccactctgccattttaaatgatgtggaaattctttccgtcctattgagaaggatatcttcccactttccatccgtccttttgatttggatggagtatacgggagaatggaaccttattggtccagttctctctccaccaaagccataaacttccaattcttcagaagacactttgggtggcttaagcctctcgatgagagggtcggaaatataggtagcttgactcgctgggtcaaagagaaatggaactttcatccaaactcttctattgtttttggttctgaccagtatttttctggtcattagatatgcgtgaggctttttcgccactacgcttgccatcacattagtagtgatggataagccttccatatctggaaaaacttctgaatctggcacattttcatgtgtttgctcacacatagtcaaatgactttgagaggattttgtcacctctttttttatctgattatttgatgggccccgagaggttccctctcgagacctctccccgtaacacaccataaagtggtgtctttccccacatttaccgcacctacttaaggacgtacaattttgggaattatgacccgtaatgagacagtttatacaccggtcttggtccgtaaggcgcttccttcgagcccccggagtggtgtatttcgtgcaccgactcggtgcatgcccctttgcttcacaaagggagcataagcgatttgaccccctatctgaaataggggtttgatatttgttaatggccgagaaggaacgattcggttgaggagacatcctcctcaccggttcgtttcgttccattggcctccactgccgttcttgccggaacggctgggagaaacggaacggtgttcctctcccttggttagctcttcccccatttgaatgtgggggaaaattccggggtttttcctcacctcgaaaaacctgagtacatctctgtacttcttctttcacttcaacgattgaagtgatagctcttcggagctctgtgcaattaaaggcacctcctgccctcatttccttctccaccacttgggtgagaaggtgataaggcagtttggacttaatagtggaggccatgaacttattttgttcattttctccatagtccaacaactgatggcaaatccgttcaatggactctgagaattgtctcagagactgaacggattctgctggtttgggaaggtggagtaactccgcttggagggactccaccattcgttttttcatccccaaaccgctttttcagaatttcaactacccttggataattttcatctgatggcggatacaagtcaattgctctccgagcaattgacttctctgggaggcatcccagcaaataaatatgctttttaaagtcttcaatctgaagactttcaacggaagtctcaaagagcttccaaaataaaggccaatctcggggttcccccgagaacttgggcaatgttattggcggaagcgtcacatcatgacgctgatgcacaagttgttgctgctgcacaacttgtgctggctggtttggctggggaattgcatctcccagctctgagaggcctaaggccccttcaatggtgtcgacaagccctcgggcttggtcgacccaatgcatgaaggctttgccttctggcttaaagtccctataattttgctcttcctcctgaagagctggtccctttattctcaggaaaatggcttcccattttccattgtatttctccaaaagagaaatgattttgcagagattttgtctctctgcaattaagtctgcacggacactttggtccgccagctctttgcccaagttttcttgggctgtctcaatgtacatcttgagacgcaccaccattggtgcaatggagatgcgcaagagctcactcattgctcttacgcttgatgaaaacacaataaacccctttgggttgtgtgtttgatccaagcgctcaggccgcgctttggattggtttggttggagggtaggcttacgactggaagccgacccctacggggctccaatttgtgggcaaaaagccacaaaaatttgcacttcccggcagaaggggaagcagactctcccggcagaagggcggagttttttaagcaaagcgaatttctgtccaaaagacagaaactcacagagtccaaagggacaaattaaaggaggaaattcctctcctttactgaagggacaatttgaaaggaggaaaatgcttctcctttccttttgaaagccttttctttgacccaacgtgggtcaatggcttagtgatctgtatgaaagggctcctgagcgtcccttttacagatagagaaaagactaagactctttcttaatctttattcaaatattcacaattacaatttaatgcaaatgcttggacagaaaactgtccggctgacttaatcaaaaattgatcagtgaagaaaatggagaatgggccgggcttttataccctcacaatcgatgggggcggggccaggcccgtgaagaaatgtgcacaagcaaagggaaaaaattccctcaaaaatgatgactcataacaaaaattaagagaggaaaagagatgagtcataaaaaagaggagcgagcgaagggagaaattgatcaacgaaaaggatcaaaaaataaatgaaaatttccaagaaatttgtgtcgcttttggcgacattcggcttgtaaagtacgaaagcacattcgcgaaaattttcggtttaacgcctttatccgtccccctactttggatgtttgacactaaaaatccctattcttgaattttcgtccctaaaataagtttggcccctgggcatttcgccccctatttcggcattttttggaaaaatttcttaccaaaaacgcaggggtacataccctcccccacacccacgcacacacaagacccctctgcacccgaaattttatggaaaattagtatttttgcgaaatttcggttttccttgttcgtaccccctcctaggtttaccccaacaaaatttcccagaaaatttgcgaaattttcgaatatctacaaaaagtacccattttttggtgaaattctgttcaaaaatcgagtgaaaatgcacaaaacattttcttagcccaaattgctcagcacatctgaggtcgaggcggagaagtttctgcaacagtatttggagagttggggaaagattggtgcactttttgccccgccgggcaattccgacggatgggagacaagcggggagcagcagcgcaaagctgtcaaagcagtgtttacggtaggaaatggaatggagttgaagggctattgaatttaaagggctctaggaaaatccgacacaggaaaatccgacacaagcggaaaatccgacaccggcggaagagccgacactggaaaatccgacactaacattaaattttaaaaataatttttgattctatgagttaatatttaaaatacatataataaagttacagtactgaagttatttaaaataaatattcttattgccataatctattctatctaggtgggctatatgaatattttttgtatgccct

SEQ ID NO: 3697 - DNA, 6394 bp, Heterodera glycines
agtcaaattttcccaattttacccacagattttcactgagattttttatttttaggttaaatttaacaaaaatttaataattgttttgatcaaatgccaaaaattgaattttttcataaaatagcaaaaaaaggtaattattaatcatgcagcccaaaataataataaacggaagcattcgtttaaaaatttaaagttacaaaaatattcattcttaggggtggaactttcgcattttgcgccaaaaagcgaaatgcgaaataacgaaaaacgccatgcgaataatgcaaaatgcgaaaagcgaaacctcggcccatccctgcttcacaagtgtatatctttaaagattgattaacaaatttaatcggataaaattaccaacaattttacggtagttcgacactaccgtattttaacatgtgttcgtgccaaaaattttagaccctgcaaaaattctgaccatattacgaagtacaaaactcaaaaactggctccttttttgaattctggactcaaattcgaacaataatgaaaaatttaatttcagaaattcacatatttcagatctgtataaagccatttaaatgtgattgattctgcttgttttaatcaagtttagtacgaaagtgtggaaattgggaaaagttgaattttcgactaattttggcagttcgacttcgggattcgaaattggtcgaatgaatgaaaatttctaaaatattctaaattagaagaatcaggccttcccattaaagtcaaatcaccgggcccaataaagttgaaaaattgccttatctacttacaaaagagaaaaaacagttaataattccgcgcgataaattagggttttgaaatcaaattgacactcaaaaattttcaaaatttaaaaaagtttgcatttctgttggtttgaaaagtgtaaatcttctgaagaacctgaaataagaaatgcgaaaatgttcaaaaattaatcgcatttttttcaatctttctctgatatttagagttgagctggaccgggaccgggaccggggcgggaaatcccggttttttcaggtcccggtcccggtttttggaaaaacagaaatcccggtcccggttttgccagtcccggtcccggcgggactaaataagcactggtaagaatggggtctgggtgagaaaagagaagggaattggtgagggatcagaaatttttgataaaaataaattaaattatttattttcatttatagtatgtgttcatatgcataagtggtcaagaggctaaacctttttactttcattatttgaatcttcggttcaattccctgagggacagaaaattttttttatattttctttaccattattttaattgaatttaattaataaaaaatattttaatttaaaattattatgtttttcatttttaatagcctaaaaacccataaattaaccaaatatttggtcattttttgacaaattctgttaacaaatctcactcaaaatttcaaaatttttccggcggcgcctatcggcaccgccggaccccgcccctcccaatgttccaaaaaagttttttgaaaaaacattgccacaaaaacagcgatctaaaagcaaaaatatttaaaagattgttaatttatttaaaaaaatacagaattttgggactcagaaaattccaagaacccccccccccctctgaaaacaaaatttttaaaattttcctcgaactcgtcccccaaaacgtaaatacaaattgaaggtgtcaaaaggtgtcagaaccttagaaaattgtttacaagcataatttcgatcatttcttacatttgaaagattctttagcatttcaaaatcgggcattttcaaatccggaaagtcaatatgagccaaactcagtggacgttgttgttcagtaattcgattaatcatgaaaaggctgctgttccaccgggttgtaacatcctgaaccgacgattaaaattaagtataacaatctaattaataagacctgtatcagcccatttttgggagctccgattaattcctgttgtctttgaaaaacgttttgaaagtttttggatcggttgaaaaatgccaccaaatccctgcaaaggtgtagctgttctttgacttctccaactcttttagtccgatgttcaagggcgtccgtcagtgcctttaaattaaaagaaaaattatacaatttaatcatcttttgttaccaattgaattttgtgacaaaaacagtcaaaatgttcgtagccaagttcttcaacggcacaaatcatagacgaggctgcatcgcgaagaaaaatgtgaatttggtttggttcaattccaaaatttgtaagaatgtcattgagtcgtaaactaatgttgtgaccggtgtgggactctggcatcggctgagtggttaaaatacgccattttcggttaaaatccgagtcaatgaaatgaacggtcaaacttaaattaggttaaaataatgtttagatgggttcttttacctcaaaaaacttttctttttgcgcacattttgccaattgtcagtagtgaatgacaaaaattttgctgtgcaaatttcttcctttacaatgctgaatttgtttcggtattcttcttctaataattgtgtcataaattcgcgagatttcaaccggtaactaataatggtttattagttcattaaaagagaaaaaatttaccttggacacgctcttcaaaaatctgtcattccatttttttccggaaacaaaattggctcacacgaaaggcaaatgaaacgcaaaattaatgagtcaattttttgggatttagggtgtgaattggaccatttttccttcgaacggaaatgttcaatgttcatttgttttaatggttgctgggaagaagattcctcattgaatactgaagcacttcttttttggctaattttttgctcttttgcggaagcatacattttgtgatacctgaaaataacttagaaataaaagaaaatttaaagactttttgtgttgtttcaaatgcttgtccattcctgtagtgtttcccattttgcgtgagatttgaactccacaaattcggcattttgcggttttgtcgcccttattgaattggtaataacgcaaaaatgaagcggagggttcagtcagttgaagctttgaaaggttgttttcattttcatcaataaacacttcttcgctttgctcattttcagccggaaaattatcagaaatttccggatccattactctaaaaaagttcaaaattaaggactacaaatataatatgtatatgaaacgaataaaatatttcatctttattttaaaattggcataatgtcaatattaaattcatattcataagctcatttttttattatgaaaagcccaatcattaggggtgtaaaaaagtctcggtctcgagtctcgaaaatcgagaccgagactttaaaacccgagaccgagaccaaaaaaccccgagacttttctcgagtcgagactcgagaccgagactctcgagcatcactagtgaacagcacgtcccaccattcgtcggatcttttgtggcggatggcgacagcagttgcgttgcgtggcaatgaacgaattgtccaggatgggattattcccagtcaaaaccatttaccatgttgcattggcaacatttgtttggcaacatttgttccatggccattgttcggggcagtggcattctcttttaacacgtcttctcggcgtaagcttaattagtttttttatgtaaaggattttatttaaaattttagcgacattgtctttgtcggggcattgatgagcgtctttgaggccaaggaagtaagtattccttcaacccatttcttccgcagaagaattcgctctaaatgattttcaatttattgaaaatataatataaaacctacgcagcccgacactcatggaaagcatttcattaagctttcctaaatttattaaattatgagatttcgaattgagtttgatatggatataaatttgggatttacactgtccgggtgtccttgcatcgcgcaatcccacaattgagccttaacgtataatttacgttaaaaaatcatttgatttaatacgatattaaaaataaaaattttcttcttatgtgtatattcatttgttatattctagcacttaaaattgtttaaagttaataatctaaattaactccaaatcaggaattaaggataagcattaaaaattttagtattcgcggaggcggactataaaatttcagaacaaggaacttaggaatgaatttcaaaaaatcatttaaataaatattttttcaaaattagtctaattaacagaaagtgttattggcaatattccaataaataattgcatctcaaattgttcagaaatttagaaccggaataaaggccctaaaatgcttcagaatacggttagccaaattttggattttatttttaaaattttcaatgatctcctcattagaatgcctatgatttcaatcagtttttattatcccaatttacatagagcggataagcggcggtcttttcatcgtgtgtcatcttaatgaaattcattaatcaaatttcctaattaaaaaaaaattacttcctgggcccacagaaactcatggtctgcagcgtaacatttgtggactttagttccattggcggaaacaggtgaaaacaggtgaaaataggtgaaatttcacctaaaaatatataggggcgtgtatttaatggggcatattagagaatgtctcaactagtatcaataaaaagtgccaaaggaaaattttgtgatggttatcgctattacaaacataaaacgaccaagttcaaactttggtggaaatgtgaacttaattcacatgggtgccagggctggggttttgaaaaggaagggttttttacaatgacgcgccgacacaatcatcatcctgacactatattgattgaaatcgaagaggacataaaatatcataatttttctgcgggggcaaaatgttttttgggtgacaacaagaattagttgatgatgctaagaaaaatgcgagactccaaactgaatttggagatgaatttattgtttgtaaactataaataggatcaagaaaaaaaataccaattaaataaaaatgaattctgaaaaatcagaaaaagctaattccatattattggaagctgcaaaaaaagagacagaaagagcatgacgggatgtagctgcgctaacggatgaagtaagcgattttgccaaatcttctcgcgaaacacttaatcgtgcaataaaatctagagaaaaggctccttacgctaatagtattcgagaattatatcttaaaatgtccgattcaatttgggaaatcttcacaatcctggacaaaatcaatttggagtcagaaaaggcctacgtggcgtgagttcgagagatgtaaaacttttgaccaggcaacaaagctcgaggaacaatcgcaaaattcattaatggaagcccgaagattacatttcgagtcccggagggtgcagagccaaatgttaaattatgaaaataggctccaaacaattgtttgggagcatatgggtatataagaacaaaaaataatgatataacaaaatggaaaattgtgccataattgagacatattgtcataaagacttaaaatttggctttaaaaaacacaaaaccaagttttattttgtcaatccattttttgttaatgctgagcaaaattttaaactaatactcgcatcaatagtcgaaaaaatttataaaaatgaacaaggaaaattcaaaagcattctgaagctttcctttggttttgaatcattttattgccctcttagatgccctagcgaaaacacagccgaggctttgttccaacatgtcctattaaaagaagaattatattcgtttttctatcctttggatgatgtcataacactagaagtaactataatcccagatgtcgacaatagaccaagaaattaattttataaaaaacaaaattacaagaaattggaaaatcacaggaaagattgttaaacgttcacatttgttagcaatttttgcaaataaactttttaaacgggtgaaaaatttctacatagcggcatttagcgcgccagacattgaaaatttatatttttcattcttagaaatgcttgaaaaaattcaaaaattaccagggcttattatgcatgaatatataaaccaagccttagctatgcaaaaattagaaattggcctcaaagaaataaatatatttaaatgtcaagaagcagagaatatgtcagataccaattttaagaagatagatgaattccaaaaacaagtgaaaaattatcgatttgacataaaaatgaggtcggaaaaatacgattgacagctattaagcatttgtt

SEQ ID NO: 3698 - DNA, 3142 bp, Heterodera glycines
tcagaattacaatgcaaaaaagtgactatttaagaaactcaaaattttcattaccgatatataattttgccttcaaacattagtttatgctatttatttttgatttaacattttttcccattaagaaatgtcaatgcaacaaaatcaagggtccgatgttgttttgccaatgtgggcggtaccggattttgatgaaacggaccaaatgccgcagcggcaaaaacaaaaaaaatcccaacgttgaaggagtttcggcaccaatggaaggaacgaagacttctgtgggagagggaggaagcagaaaaaaacgaccccatcagttggaacgagcggacaaaggaatcgaagaaaatgttcgaggagagatgggcgaaatcggcagctgcgggtggcagcagcaacaacaaacaacaaacaatcgaacgatgcccaatatacttgggactgggaccaattgaaaaaacaagaaagagaaaaattggaaggcggggggttgtggtaaaataaaatgggcccctctccacctttctcaacatcccgtaccattgtgccaatttttgatgtgttaaataaaaataaataaatttaaattttttttgacttgtttgtgtttattgagttttggcgatttcggattttttggctatttttttttggatttttatgattttttgcgatttctgattttttttggttattttaggaatttttgcgaattctatttttggcattttttaccaatttatcattaatttttatgataagcagaatatgtatagtccttaacttaataataccatgatgggtggaattactaattagcaaattttgatcattatggaaattctgaacgatccttcaaatatatttaatatttttttcttaatgattttaaaattgaaattaagagtattttacctttataaattttttataggcataaggaatgtgtaattatgctcgtaaaaattttttggcaaagttctaatcatattttttcgaagaaatgaccaataaattttcctcaaattatttttattcaatgccgatattttttcaaaaaatttgaacaaatatcacaattatcgtcacatttggctcttaattttctcacaacttcctttttcattttgtctgactttgttgtggctcctctttcccgagattgagtcacacgtcgatgctgtgagggcttggcgagcattttcgcgttcctcaggtctttcgattcctagtcgtttatatgcccgtcgtacatgttcctgagtttgcttttgtattgcccacgtgcttttttgagaaggggcagaacgttccgatttgtcactatcgagttgctaaatgggagaagagtgttaccctgaaaattttatttgtatttatttatattacatccaaaagactcctcatcggggttgcttcgaccggaaattgctcctcttccgtgatttgaagcaacggactttcggaaatgtctgagaaagcactttgatggtatggcggttctttaaagaaaataagattacctattttgataatttaataagcaaagaacgaatttgtctaaaaaacagggtaataaccggaaaaattttggggtaataggattaataaaaagtttttcagttttttatttgggggtctggtgtattttatatgctccgccaaaaatttttttgagaattttaagcaaattttgaacttcaaaaacagaccatttttcctagaaaattatttaaaattatttttaaatgtcatgggaacttaaaatgaaacgagaaaattgaattcccctaggtccctcccccacatatgtaccaatgtgtgttgctgtaccacttgtaccgggcaacagatcgtcgtttacaggttgaaattgaaacatattcaatggcactggacgcaaaatctgttgttgttgttgagcttgtggagattgtgtttgttgtcgttcttgttgttgctgttgttgttgttgttgtgtttgttgatggtgttgtcgttgttgttgtggtggtggtgtttgtgtttgtcgttgttgatgatgttgttgttgttgttgttgtggtggtggtggtgtttgtgtttgtcgttgttgatgatgttgttgtggtggtggtgtttgtgtttgtcgttgttgatgagttgttgttgttgttgttgtggtggtggtgttgctgcgttcccagtgtcaacaatctcgaaaccttggcgcgtattgttcaacacaattgttctaaatataaattttatcttacggaacttataaaaaatagtaattaattacatttgccgggctcgagaaatgtccaacatgttatgaaccagcgccagagcataaattgttgccaggaggtttcccaacaaaaagcccgactaaattaagattaaaaatcaattgtttcttgcccattatttacatgttcccaaacgtcttcatcaaggaggaagacatttgccccacgcgttgtgatcacatttcttccaacttgcttgaaggtaattatataccatttgcgctcttccctacagacggcacattatttgatgtcgtacaaagaagcagacaacacttcgaaatttttttcggccgaatccgccttatcgaattctgtctgctcttcgtgctcatggcagcactaaatataaaataataagaatacaaaaccgcggataagcggtgtgataactccgcctttcggcaatgtaaagcggagaccgcctttcggcggtgaaatgcggggaccgcctgatcggcggtgtggagggggaccgcttatcagcggtgaaggaggtgaccgcctgatcggcggtgtggagggtgaccgcttatcagcggtgaaggaggtgaccgcctgatcggcggtgtggagggggaccgcttatcagcggtgaaggaggtgaccgcctgatcggcggtgtggagggtgaccgcttatcagcggtgaaggaggtgaccgcctgatcggcggtgtggagggggaccgcttatcagcggtgaaggaggtgaccgcctgatcggcggtgtggagggggaccgcttatcagcggtgaaggaggtgaccgcctgatcggcggtgtggagggggaccgcttatcagcggtgaagaaggtgaccgcctgatcggcggtgtggaggggg

SEQ ID NO: 3699 - DNA, 2932 bp, Heterodera glycines
gcagctgtctgataggccgctaataaattttatggataagccatatttttgtttgttgtattttaggctttaatggaatgcaacggaaaatgagcacaatggaatgttttgaggatgaggaccaagaagtgcatttaatgttgggcgacgaatgtgcgaatgaaacaccgaaattagccaacggcacatacaattacccaagagtttgtccaaaatgataattatccttataatgaattaatagccgtgaaaaattggggtgggaagagaagtggtcgaaccgctggggtcactttggtggttaattgtccaaggctcttaaacgatgagtcattccatgccattgttagcgggtgctttgttgggtcaactaattacatccatactctcggccgtaatggaaaacaaattattgttaatttttaaaaattaatcataattttaaagagacgaccaaagccaccacggctgaccaaagatcagacattcaaagtgccaccacaaatgactttggatatgccatggtaagaaagaatgtttaatgaatggattgtttaaattattatctttttgactaaattttatgttaaccgaatcagaaatagaatattgaaacactgaaattttttatccttttaatgaatatttaatgaagaatattgaaaatttttttggtttcgaagttatgattaaaaacttagcaatttcgaataaatttaattttgccatcatttttaagtaaggatgaagtgcttcaactgtacgaagaactacaatcgtccggcgtgccacaaataatgagccgctttgaagaagttgtaggcaatctgtgccggtgggcaaacattttgcgaagaaaaaataaataaatttcattttagtgaaattgatcaaaaacgtgacgaaaatgaacggttacaacaccagcaaaaagcgtgagtttgttctctttttgtaattatgtgggtactgcaataatacaggaacaaattacggtattcctactgttttagtgaacgtgaaagctacaataagcggatggcagcattggaaaatgaaattgatcaacaattattgatagctgagaagaaagcacgggatgaagtcggtgatacccggcgatttggtctcgagcttttagagatactgagtctgactaattaacatgactaattgacgacctgttctcgaaaaaacattaaacttaaatgaaaatttccaaatttaaaggaacgtgaaaaattggccaaggaaaaagaggagctgaaagagcgattggagcgcgaaatgggcgacctgcaaacgaacattgaacacttgcaaaaaatggaaaaagtgctgaagaaagaggcacaaaagaacggcaatcaggaaaagttgaaggagaagctggaggcaagaaaaaatttagaggaaaaattaaaattaacaaagattgatagcgattttaggcacaaaaaatcgcaaaatatacactaaaaaggcagaaaaaatagcaaaataggcattaaataggtacaaaaatcctggatatgcactaaaataggcaaataaaaatttttattacagcttttaggtaccaaaacacataaaaacttaatcaaaaaaataataatttggttatatttaaattgtaaatgaaattattaaatattttaaaggttttttcgaataatgacaaatttttaaaccaaaaattttttatcatgaaaaaaaatattttagggaatcaatttttgggaaaatttcttcatttcttaggggtgtattttggtttttattgtatttttgttaaggacttttccgaaaatcctgaaaattggcacattgagcataaaaaaccgaaataggcaaaaataggcattataaaagtcatcgtagatgctcaaagccgagcggaaaacgcgcttttcatgcttatctgtgcgtatcaagtgcgcaaaattttaggcatttgcctaacatcgcatccctagtgataaattttaatttgtttgtttttgcgcaggaaattgcgcgagagaatcgcacactgaagaacaatttggcggagaatcacttggagatgacgctgatcaaagccgagttggcggagatcaaaagcgagtacgaaaatcggacactgctcatgcagttggagcagcagcaggagcagccgagcgcggccgaagcacaacaaatccaacggcagctgcaactgctttagtgagtcgcgcgacttggggccattttgcctgttgttacgctcgcgggggggggggggggggaagtgtataggcgatgccaggatgttaattcaaaaaacaatgaaaatgaaaattatgacaaaaaaggaaataattgttctactgagtaaccaaatcaaacaatttctttgtaacattcggtatccagggagttctcaattaattctgcaaaaatttcaatccgttaattccaaaattattatggccaaaacccttggaaattatttaggtgctaattttttaaaaaactaaatttttttctgacattttatccatataaagaaaaattaaagatatcgaatgatacaaagattatttattctgcactaattattaaattgtttgtgttctcatgtcgctccgccggcgccgagtgccttttttattcttatgtcttctgcttattttattcaattttttttcaatcagatgctaacttttcaatgctttttttaattaaatttcaaatttgagcgatgcaaacaaacgccttcatgacaccaatgacaaccttcgcggggcattggatcagcgcacaacggccatcaaacagatgaatatggtaaaaaaaagaagaatggtataatcagttgaattaaaattatttaatttttagggtaattttgtcaatttggcattaaaagtgattttgaatttcgatttcactttttccattaagctccacc

SEQ ID NO: 3700 - DNA, 4068 bp, Heterodera glycines
  unsure (1)..(4068): unsure at all n locations
taaaaaaacgaaaatgcaccctcaaaagaataataatttcgaaaaccgttaaatntaatgtttttttgccaaattaaaactattttaaatgttatttgaaacgccggtatattttttgaattaatcacttaagaattttttaaatttttataccaaattttttcaattcttttccgtattttgttaatttgtccatattttttgggttttccttctatatttttaaatttttgtcagttaaatcagaatctcctttattgaaatggcattttgtcaatttgtttcaatttcacagactcaggctatccaccccggacgtacggcgcagggtcccgtgccgcgtcgtccgtttcggacaacgatttgttccggtgcgcgtccgcttccgtggacaccgcgtcgccgatgccaatgtctcttgagcaacaactgatgatggcaagacactttccgacggctgttgccagcaatggcatggtactaaatatgtcttttcacgacgaaaattacccaagaccgagacttaatgaccgagactaaaagattaaaactttcgcgaagtcttgattcgacaccgagacactcttgagccgaactcgtctttttttcaattattttatcgattctggtgcaattgtgcaattcttagaacattttggcattggctagtaccaatattcagtcttaatttggactgagactaaataagacaaacaaatagcaaactttttgcgagttttggcattaaattttgataaaataatatagaaaaagcttggctatcgaacaataccaagaatgtcaaattttgttgcttttaagcaaaattatgccatattttgtcaaaaaatagcttagatttttggacatttggattgttttatcgctaatgttttagactgcaattaacccttaatgaggtcattttttccaggtccttcaagagtattcgggaccgcccgaccgcacattccgtgtggtgatgtgcggggatgcagcagttggcaaatcgtcaatcattatgcgaattgtgaagggcattttccaatcaaacattgccagcacattgggtgataaaaaattaaatattttttcctaaatttaaatgtgaaaaaattcaggcgtcgattttcatgtcaaaagtgtacgggtgggagaacaaaacattgctgttcagctttggtcaattttttttcgtatttttttgaaaattaaaattaaattttagggacaccgcaggccaagagaggttgggaaaagaaaatcttttcaaatttgcaaaattttttaaacagatttcgcagtctgtgcaattcatatttccgtcgtgcggacggtgcaattttggtttatgactgttcaatcgaccgttcatttttgaggatacgtgattggattgagacagtgaaggtcctattggaggaatattttgactcgttcaataaatattaaagctatttaaaattatgaaattaaaaactatctttaataggggaatggtggtaattaatttggtgtatcttatttttcccgaaagtcacttgggctgaaacctacgaaaagcaaattgtgaaatgctgttgtcaactactactcgttttgaattcatattttacgaatttaagttctagaaaaatatgaacacaaatctagtcaaaaagaataaattaagcggaccaaataagttttaattttctttacaaatcaaatattttattagtcaaattaaaattgtttttaatgtcaggaatcgaccatgaaagaagtgccaattctgttggttggcaacaaagttgacttgcgcaactcgggcggtgatggcacgacgaaagatgagtcatcatcaacttttgtgtcaagaaaagagggcgaaaatctgtcggaggttaaattaaatttatattaaatttaaaacataattatttcaatattatattttttagacgctacgggagaataaaaatttttttaaagaattttattgcagctgttgggcactgatttcatcgagacaagcgcgttggatggcacaaatgtggagacggcacttctgttgcttgtcgggtgagcactccaaaaaaaggcctttggggatcaattaaaatggaatattatttttaaagctaaaaatcaaactgctgcttctgcttaaatataactaatcagttagttatttatttgtcttagaaaaggtaattttgagaattttaaacaccagcagtaataggcaaccggaatttgggtgcccaaaaattttcgtaaattcaaaaaagtatgttaaaatacgcattttgttgaatcttgataatcagtgatacgaatatttaagttctgtagcattagtattgtagtataaaagtaaaattctataaggagatcgttctgaattacgaaccccggaccagaattcgaacaaaaggtcgaaagtccaaaatttgaaattaacatttttggttaaaaatcactttaaatacatggaaacaaactgaaagccatcaatttttcaataagagataatttacgccgtttttgaactaaaaatgctaaattagaaaatttggactttctactttttgttcgaattcgggtccatgtttcgaaattggcaaaaatgataccgaattcgtgattagtgacctcgaaaacccaaggaacttatttttatgacattaaaattttcactgacgcatttctactgacgtattttccgggagccgaatgattccatattaattataggcacagtttgaaaatttgaatgtttggatgattgttttttaaggattaaattttcgggactgcgatttccctgattcttaggaccatttttaatggtactgatttgatcttaaggtcaattattttcagcgaaatgctcaaaacagaggatgatcagttgaaacagactgcaatgatgctgcaaaatggtggcaaatccaagaagagcaaatgcctgagttgtggcaactcatagatcagaagattatcaaccacagtgatcagcggcatcgatcggaaaatgaaactttgacttgngtcacttgaaaagattcagagatttctcccactnttttggtactaatttaaataatgctttataaatttaaattaccaattttccctgaatttcgtgattttaacttgtgttagacaggtccgggtacccgaccggctccagacccggaaaccggacccgaccttttgaaaatccaatactcgacccggtaggtccgggtccaaaaatacactgctaagaatgagggtctgggccagggctggacataactgattttcaattacggaaatccgtaattacggcgatttttaattacggaaacctaatccatcattagggagttccaaaaaggcgccgtatttcgcgtaatccttactcgtagcgattttagctaatatttatgaaaaaaattaggagtttttgggccgggcagtgcctcaaagtttagcatgatttgaaattttgctgtgcgcttttaatgactaaaattaggagatgggagtgattaagttcgtatttgaattaaatttgtgacttgtaaaaacttcgagaaaaagccatttggaaaaacgaacaatcaagtaatggaaatcatatgatatcagcaatcaagagattaataaattaatttcgaattatttaacttcgtctttagcagccgaccgttttgttccttcttttcccaatcactttgtttgcctttaagacattattgtttaagagtctcaattaaagttttttttaattgaatcgatgaaatcttttgaaattttgcaggctaattaatagccattatatcaaagtattttcatgtaaaatttcaagtcattttgacaactacgtaatgaacaaggaaataagaaattgaagcttcgtgaacttatgtgcctatttctgggaaccctacttatcacgaactgtcagccttattggctaacatggatttttcttattttatccacgtaatccattctatttccggcccctaatttaataaaacaaaataattaatggtaattttttttagtgctaatcttgccaaaaattattct

SEQ ID NO: 3701 - DNA, 1657 bp, Heterodera glycines
agcagggctgcaaaaaatatgcaaatgcatatttttttcctggcttctccatgctctaaatagcaggaaaaacacattcttttttgtgtttgcgtataaaaatcgggacttttatttacatatttttgcatatttcgaggtttttgtgcatattttgccattttcggtgtattttttcccgataattccgagaaatttattttaagttttccattgaaaaattgtttccggcggtgccgatgtgcgccgccggggaaagttttgaatttttagtgcaatgttttaacttatttagttcaaaaatgacaatattttacgcttttaattgttaaagttgcgattaaattctcatcggaaaaaggaataattttgaaaaattagaagaaaaatgaaccacttcaaggggaactgatccaacgaaaaaaagaagaacgtaacaaaaagcacaacccactagaccacgcatatgttaacgaaatgaacgaaaaatggcctaaatttataaaaatataagtttagcaaaatccaatcattaggggtgtaaaaaagtctcggtctcgagtctcgaaaaccgagaccgagactgaaaacccgagaccgagactcgagaccgagaccaaaaaaaccgagacttttctcgagtcgagactcgagaccgagagtctcgagcatcactagtcaacggtgagctcctgccgaaaatctcgagaaatttttgattgcaatagcaaaaacaaccgataaaatttatgaggaataaaattttttaattaatttgcacccctaagtttaaattttttgtgcatatttggtgcatatttcacgactttatttgcatatttatgcgcatatttttgccacttttcgtgcatattttttgcagccctgttaatcagcttttggcttttcggcaaaaaaaaatgccaattttcggagtatcataaaaatttttattaagaaaaaaatattaaatagcatttgcctaataataataataataataataatatgactaaaaggcctggaaaatttgttttatgaaaattttttggtgtcaattgtttttcggaacgatatattttattttacaaaaataatttcattaaaaaaataaataaatttttgacattttttaaaacaacgaaaaagctcaaacaaaagtgtacaatttgttaattgatttatttatttttaagcaaataaaatgcccatttcccactttatttgagtgtgaaatttgttcatttttgacggaaaatcgccaaatttaatggcaaaaaaaaaacgaaataaaattcattttaattttaatgcccatccccgagagtcgaagttttgccgagactccagactgagactcaaaaaaaaccccgagaaatttctcgactcggaagtttcgacagagaatcaatctcgagcagccctccccgccccagtgattacgtgtcgcgttcgcatgtcgccctcgccgtcccgcaacaagttgtaccagaacagcgcgtcatggatggtcggcgccacgcccgtctccaagtcggtgtacaccgtcagaccgcccttcttcggctgtgacatctgtgagagaggagagggcagagcaaattttgccaaaaaaaaacaatcagggttggtattagagaccggcgcgggacgggat

SEQ ID NO: 3702 - DNA, 1694 bp, Heterodera glycines
  unsure (1)..(1694): unsure at all n locations
gaaaataatgaattgttatcannatatttatcatttatattaataacatatgtaatatttgtctacaatcacttaaggccaattaaaactttattggcttgaacaatgaaacctaattgcacattaattagagttcaataactaagtattactgtaatatttaaaaaaaaaattacttttcttttttgaacagattaaaacatttatttaaattgtccattgatttctttgagattcattcaaattaattattcaattattttttttttttttgccattttattgtaattacgttttgccctattcacgtgaaattttgatgttaaaattcatttaaattaattattcaattaattacaactaattctaattgcctattaattcgcgtccaattattaattatatattgtaatattgaaaatttatttttttaaactttaattatcctttatttcattgaaattcattcaaacaaatgattactcattaattaattattaatttattttttaattattttttgcccatttattaattattacattttgtgccactcacgtgaattcgtcgattaatgcgctcaattatcggatgctcatctcccttaagccatgccgatttgctgatgcgatacgaagcgaattccaatccgccggtgcgcgaattttgcactgtcgcgcgacggagctgaaaatttatttaaaaaaattttttttttggcaaaatgtcccaatttttcaatattttcctgaatctttgacaatattttgattgaatattcagttcttgcatttcgattcagggaacctttgcttaattgctcccctaattattaaattgtcgtcgatttgctgtgacggcattatctcaatggtacattttctgattatttggttgatctggctgatcggtattttatgtgcctatgtttaattgtttgatcagtccgtttgttgtctaatcattttttcaatgtttttttggcccaattaattaggttaattttataactgtccgttactccaattcttttttcaatcttttaagttttttctgtcccaattgatttgataaattgtctgatcagtccgtttgttatctgattctgatcagatcccgtcttacccgtggggtggccaattgtttgacaaccgcaatttcctcgtcactgatcacattgcggaacacaaccaccagcggttcataatgaacaatttcgactttgtgcggtgccaactttaggtagggctgtaaaagcaataattattttcattttttaagcggtagggattgatcagaagcccaggactgatcagtatccgcccgactgatcgcatagcattgtcctgatattcttccgatatctctttttgattatggtgctttttgcgtgtccaaatgagataaatgctcggtctgatcacttttctcttggcatcattgatcagttactgtgatattctcgactgctgtaatcagttttactcttttgccacaattcatagttgtccaatctcagaaattttcaaaattcgagtctcgaccatttcaactgatcagggcgggagtatttttcgctgatccatacgcccaccttgtcccgcttgaaataacagtagagtttggaagcatttgcaggcgaaatgtcgaactcacaggggcacaaacttcaaaaaaatgatcgaaaacgaaat

SEQ ID NO: 3703 - DNA, 2635 bp, Heterodera glycines
ccccccaccctactaattgccagggcattgtgttttgacgtcccaattttggcaccaccgcgccgcacccaccggcggcacgcggatggccgggcgccagccggaccagccacttggtcatggtcagtgcccgcttctggttgccctgctggtagagcgcgtaggccaagaactcgagaatgtccgcctcgagcgcggcggacgggtcgcggcggagcgcctcctgcatccactccaacgtgtagtagtagtccttgaaaaatagcagattatcattggaaaatcgcggggttcgagattctcgacccgggtaggacctaactgggtgagtcctaattaggcgcaattaatccgccgtaatgcgtgtaattaggggcgaaaaccagtactgaacatggatgatttcaattacggaaatctataatccatatgatccattgtagcgtgaaaacagataattgggtggtgggttttcgagactcttgacccggacaggacgtaactgagtgggccctgattaccttttggttgtaagcggctcgtccaatctcgaaacagtcgttggcattcagctccttggccacactttcaccatccacaaatccgttggccaggtcagtcgtcttcaacttgtaggtgtcctgtggaaattttaggctttctgatcagttaatcagtccatgaatgatcagtatatggaaagtccacttaattgttgatttgttgatcagtttgatcgtctaaaatcagatggtcgtaccaaaaccgatcacatgctttttcaaccgatttgaagcctttgatcaacaatgaactgatcagaaattcgaccgaccgacccgtttgtttaagtgttcggctggtccacaaaaaaactgattaaatcctccgatcagcactgatcagaaatgtcgatgcaccgttactattatttaaatgatcggccgacacccgtcccggcaaaaaaaagttttggtagataattagcgcgtcaatcaaattaacaaattaatttacctgtaagcggagcagtccctgtgccgctccgtccaggtcctcgtcatccgggtattttacctggaaaaaaatttgattttcaaatttttaaatctcggtttttcgatttctctaaccgcgttcgcctctctgacgccggtgatgtttttgatgaactgatcgcccgggttggcattcatcagctgcctgatccgttgccagtcgcgcgtcagccgcttgatcagcaaatacgcgttcaccgggttcatcaccgagtcctcctgtgtttatggtgggggaaatcgggatcagagtgatcaggatttggctaattaaaaaaaaattatgaaaatttggtgatgaattagggtccagcggttccaatatacttggtgtagcctgaaatttgatcaaccaaagtcagtgatccagatcaattttagggccaagaattttaggaaaaacccgaattttgcctgggccgattctttagcgttcgagagtcccttgatttagggtcgagatcagtgatcgaaaagggaaacgagtagaagagagcaaagatcgaaaatttgtgccaaaatctgtgtgatctagaaatggaataggccgtgagaaaccaatagttcagaatcccaagaccaatattagggacgatcgaaatgacttttggcacaatgccatgcctgccatacatctgcttcgccgggctccagctgcacactgtgctgttgcccgctggcgttgtgcctcgactccgtcaacgacttggcgtactgctcggcgaacctgcaattggccatgcttaggcttagactttagcggaaacaaaaatccaaaagacagagaaattttaaaacagagaccgagaattattgactaaaaaaaactgaaaaccaaaaagaaaaattctcaatttggaccgagaaaaaaccttgagaaccaaggtacaaaaaacccgagaaatttcgtgaatcgagaattgacaccgaaaattgacctaaaaccgagaaattttctcaatttagaatcgggaattagattgagaaattgtctcgagaatcgagacccaaaaaacccgagaaatttcttaatttgcccccctagaatttgtgggtctccaaatgttggcactcaaatttttgtcctggtttgaacccaagcttaatccttgcgtaaaattttaaaaatttcaaaatatatatatccccccactcgctgagctggacaagccgtgcccgctccgcctcaatgtactgctcgatgatgtcggaagtcgaggccgactcggaggccaacagattctccaagtcaaccatggcggtgaacacgtccgcaaccgccacacggagcaccgaagcggaagcaaaaagcagtagcatcatcagcagagaggacgggagaagcagtgatggcggcgccgccaactgcttgttgttattgacggaaaattgcattttttttttgaatttgcgcgtgcctctggcgttgtgcccacagtaattaatgttttttgtattgattttttgaattagcgcgcctttggcgttgtaccgcacaggcacttggcgttttatttttttctaaaaaattcacacaaattttataggctcaggataaatcttcgcactacataagt

SEQ ID NO: 3704 - DNA, 2394 bp, Heterodera glycines
ccccccccccccccaaccccccaaaaatatgaaaatccaatttttaattggatttttccgggaatttcccatcaaattttcggaatccctttgtccgagattagcataatcgcaattgacgatgcatttgtgtggcgttctctttctctctccggacaaattccaagcaaaaaaaaaacaaaaaataattccgcttttccccgacacaaattggtcgatcggttggttggactgattgattgcgtctattttactacaaataaatgttttatataattgaataagcgaatgattaatacgttttggcaaaaatttgcgggaaaatgtcatgctaataaatatttgaacaaaattttgctattcaacttaacagatgaggcattataaaatgattaaagaaaaattggatgtttgaaagaaaaattttaaattaacagtaaatgatgaaagaattaatgggtaagaaaattgcgccagaaattccgacgaacttttctgatcgaaaacataattatttgaacaattaattcagctgattaaatgtgctcagacatgaaaagattatccatctgatcagcttaacaacagttttaggaaattttaatggattattaattaatttaaaatttcaaaaaaaatgatcagtgcgagaaataaatcagatcagcagcagaattgtcctataacaattctattttgatcattgcagtttcctctgctaatgataattgaagctgatccattgtgatcagcaacagcagcagcataattgttgcacaattctctgatcagagaacaattagggaacccaaaaattgtttccgatcaatcgatcgcgctgatcaaatgataaggaagagaaaattgttaggtcgtgtaaatgttgttttatatgtgtgctgtgctctgcgctcactcatttcaccacgccttttcgacagagaaaatgagtgtgaataatgtgatcaatcacattcaattttctttttttgcccctgccgccgattggtggtggtggtgggtgacgttcgttgcgcaacgtgcatgtttataaggccccaaacgggaaaatttttctgataaatgatacctattaacacagattatcggcatgattagcaaaggaatgtgctgcaatttttaggcgcccataaaaatggtgatttgcgccgccaaagaatcggctgtgatcaccagcagcagttttgtctagggttttttcctgattttgtgattttggaaggagacagtcaatgtggcatttttaaaaaaagattaaggatttttgggtgttttttgaatttttgagaaaaacccataaaaattaactacagttttatattattagtaaatgtcatttcgaaattaaggaaaaagccactataattagccaaaataatgatcgaatgcaatcaattaggtaattgattccctgtgctctagcgatgttggcgaatctcggtgcctggtcatggcaaatttcggcgattcataactatatgccattgtcagaagttgtgggaatgttgtgggattgggcatcatttcataaaaatgccgaaaatgtcagggattcaagccacatattagggggcctcgggatgcgtgccccttcccaattaaaaacaaaacaaaccaaaattaatggctgccgaaaagcaaaatattttcattgcgaccaattaggcaattccttcggcaggggatagcacctagcgatgtgcaggaatatggatgccgagtctcggtaaatttttgtcaggcatttaatatattcggggtcgggatggcacaaaaaccaaaaattaatggcactgattgagaagcaaaatgtttttcgtgggtttgcgcaagcatcaaaagggccggcccgccgccacattattagcacaaacaatcaaattgaaccatttcttcttctacatacataacataataaaataatgatgatgatcggctcggttcggctcggcgtgtacacacaaagaagcgcagcaaacgcgaagcaatttaatgaggcatttttaaagaattgaggattttgcatgttaaatgaatgccgaatctcggcaaatgttcggcggtccgggcattgggcatttggtgaaatgccaaaaatatcagaggatttaagattcggggccaggatgccggccttcccaattaaaaagtttataaaataaaaattaatggcgctgattgagaagcaaaatgttttcgtgggtttgcgcaagcatcaaaagggcccgccgtcatatgcacatgaagcagcacaaacaatcaaattgaaccttttcttcttctacatacataacataataatgataatgatgatgatcggctcagcgtgtacacacaaagaagcgcagcaaacgcgaagaaatttgcattatt

SEQ ID NO: 3705 - DNA, 8492 bp, Heterodera glycines
agctttttgttaagaattgttaatatattttacactcccacatagtttttcgtttcgacattgggtgaaatacaattctttgtaaaattatttaatttatttatttacaaatttatttttcaatttctttctagtgctcatgccgccggtggtctatcgttgagcggagcattgaatgagcaacttcctccgccgccaccactgcgacatcgcgcgtctctcaaccagcaacagcaaccaaagcagcgcaaactttcggcggaccaacgccgacattcagcgttggtggacggcactggcactgacaaacagcagaaaaagcagaggcgccaaactcacgggtgccgggatgagcagcagccgttattgatcagcaacgggcccaaaacgggggcaaataagaaacggaagcacgtggtatgtggtcgaaattaattggtattttcgtgccgtttaaagtgtgtctgttaaagaggaattagtcaaatctgaaaacacggcaagataattagcttttgtcactaaccaaaattttaatttggcttttacatttgggaccaaaatgctattttgtcacgaagctgcccctttttgttaaaactgtacgtgaaactgtccctgtttccctttgccaaaacgttttatacattaacaacaatcgcaaatttgttccaggaaaaggcatcgcgcacgggaagcaacgcgtcgacgacaagtggcggtggtggcggaagcggtgccggtctttacaacggtgtacgaaaatcggcagcggctgttagttcggacgaggcggggaattgtgtgtcggaggacgatgacgtcgacagccatgaagatgagaacgaatgtgttgtaaatggcagcgacgacggaggctggatgaataatcacgtcgaagatggtcagcagcagcagcagcaacaacatgaggaagatgacggagaggcgtcgcagagccaaattcaatcgaagggtccgtcgtccgattacctgcccttctcctccgttcttcatcactgacaggaccgttcagcggtgtgcagcacctgtctataagaaaaacaacagcaaaacacagcatcatcaacgctccaatgtcgaagagtctcaccattttcaattgttttgttttcctttgttgtgcccttttgtgctccacttaaatttaaattattatataaatttttgttttacataaatagcattttgccataattactgtaggttgggtcacaaaattgcacattgtcagagctatttttgccatctccgcgaatacaaacaaaccatttatatacaaatgttttttgtgtgtcgtatctcacggtcggttggccgatatgtgtgcttttcggtgctattttctttttgttcccctccccccagaaaagtcatcgatttcttcattttgtttgtttttttgtcccgtcccaacgcccgtgctcacaaaatacaaatgtttattcaaatgctataatcctttatattttgtcttaaccatcgaaacctttgtgcaactaaatatccacctcacccatcaatcagaacaaattattctgcaaatttattttcacttttcccctttgtttgttacttttctgagtacgtataatgcacagtttgacgcattttaccggttgagataataatctggtaacgatcgagtgattgggccgattgcccctaattgtaagtcagtgtttagaaaaaagagcttactgcaccaatttgtatatttccttttttacagttcgcatccagaaatgcattttattacgaaaataaatgtgaaaaacaaaattttgattcgggccaaagataattagtataactgatgagggggagaggaagcaggaaaatgggagcaacccatgtgatgagatccattactcccccaataaaagagccccatgaattccgttttaattggccctgggctaataaatgatgtccatgacgacgcattttgtggattttaaaagtttaacataacataaaatggaacgatggtaaaatcatacaaaaaatattgagacaacaacagtgcggacgacaaaaaagaggaggacacaatttgtgtgaaaaaagaaaaacaaatcgaaaaatagaagagaacagatcgtttcgttgcaggtatccgtccgcgttgctgctttggttgagtccatcccgctgctcagaattgaggtgcaggccttaaaaacaatttcatatttggcaatcagcaacccaaccactaaactaaccagttgtaatccgttttcggctgtgcgccagccccaacgtcgccgcctccgtacgcaccataataagcggtcgaatagtcgcccgggtactgtccatattggtggtgttgtccggcggcggccatcgcaccaacgccgcccgacattccgcctgcagacgcaccactcggcggatagttgccactcgcgaatgctgccacctgttgttggacggcctacaaacggagggaaggggggacacaagcgtgagtgtgcatgataagtgggcctgaccagaaataaacaaaaagatggtatggggaatggccaaacgaagttgatcgaaatgggataaggacatcggtatccgagtcaaaaacataacacaaatgactccttttttgtatcttcctaattcgtggtagaacttctcccaacccatcaacaaacaaaaaaaggaaaggaggcggttggacgttcattttacgccttcccttcctccatctctcatctttcttcccaatgtccaaagcttgcctggtggtaggggctatagtcagttgaatagtcagagtgctgtgaaaagagaaaaaatggagcagataaataaacgaatgagcatggaataatgatggcaaatgtaaaaacaaagaacagacaaagaattaagtgactaatttattgtcggaatggattttcaatatgagagaaaacaaaattggatattagtccaaaaagaaaaaaatgaaatatgcgagttatttattgaacaaaaaatatttgacacggcaaacgtaacagacctgcgcgtattgttgcgctgcggatggcatcaccggcccaactgcggcaccgccacgccctccgccaccgccgcccttaccaccgatgctttcgtaagtgacatggggtggaatcttcgctgacagtgacgggaaaagctccacgtaactgaattgaacgaatccaaggtgaaagacatataatataggtaaaaaatgaaatcatataaaagaacgttgaagtcataattttataaaaatcgaaatgtgactcaatttcatcaaatttttaacgaattgacgaaatttttatcaataaactggacgaagacttgcctattcactaaattaattttttgaaaaatctcgtcttgcgaactgtagggtcgacccccactctctttttaacatttaattggtgggcgtaaatgcacatgtctctttaccggtttccgatgcattcccggtctttgctcattgcctggcgcgcatctgccggtgtttggaattcgacaattccgtctccgcttgaacgaccgtccggcattgtgccgacctataaattgaaattaaagcaaaaattcgacattcacacaatcactacctgaatatccacgcaaacgagcggagaaaagaaacgttcaatgtcattggctgtcagacggaaaggaattccgcgcatgtaaagctaaaattaatatttgaaattaaaatatatagacgcagcactagaatgaattaaaaaccggtaaatagttccttttttactttggtcggtccagcgttgggatttgcattgtatccacctccatagccgccgtatccgtcatcgtaaccaccgccacccatggctgcagcagcagcagcagcaccaccgccacgtccagcaccgtaaccgcctcctcccgcaccaccggcgccgccgggctgtcgcggagtgccgtacccgtagttgggatagctcgggtaaggcgagtatcggtgagaggccggaccaccacccccagctgaatggattaatgagatgatgctgtttggtgagttgattcaacacaaacctccataaccgcctcgtcccatcggacgcccgccagcggcacgctgttcataaccagtcctgacaaatagtagaaaatttgtagtttaatggaattgtgttaaaataaatggaaacttgcccatatgcagccggaccatatccataagaggcgtacgggtcgccggtcgcctgggctaacgccttcagcggaacaatgttgttggtggcacgcgctttgaacgcttcaaaggcggcaccgtcgctcttgaacaactccaaatatctgtagaaaaagggaaagcattaattcaaatagcatccttttaaagatgaattcgtataaaattttatttgtggaatttgtaaatttgttgggggttttcagttgtcgtttttttccaccgcccaaccctccgccatttcctcctgtccatcctctctttccatcccgaccctcccgcattccgtttgtccaatgcgtccaccaccaattttgcaccatttgcaaccccccatccattctttgccaccaccaccacctcctattccaacctcctcgtcatgtgcgagtgagtggggtggtcaaccaaagagacacacacactcctccatcaatggacatctcatctcatcaattgggatgggtcgcgtttggggggttcacgtcacatcatcaacaacagagaatgaatggttggcggaattttcgggttaataaatttttatatattttttgaaaattttaaattttgtgaacgatgaaatcaccgacaaacagtcggcaaacaccgtacctgttccccatgtgttggttgttttgttgcaaagcgcgttctgcctcgtcggcagtgctgaatctgacaaacccctcgcccgtaggtcgcccctctagccccggttccttcccgaacaccacctcttccacggtcagccctgacagtacaacaatggtcatttttcattgtcatgggaaggtttaacaattgtattactacaccaaacacattatgaataaatatataaatttaattctcatgtcgagttttttggaaatggtaataaaacgccatacaatttttgttgaatttgtatcgatatttcgaagttttccaagactaacaaaagccatgcgcgttactaccatccattaagtgaaaatcaacactaattaaattaacaagaaatatttaatgcattaaacaactccctcccggccatttgtccaccaaaaccattggcccgcccgcccgttgcgcgtgccattcattcatccacattgataaacggtttgtgaacagacctcggaaaaactgctgcacctggtccttgttacagttgtagggcaagccacgaatgcgcacaaagcctttgctggacagcgttttcttcatctgagttgtaaagtttcaatttttataagcaaatataccaaacttttctgggaattttcaaaatgtaaatccctaaatcccccagttctcaattccaacctgcatgcgtctcattaactggtccatctcaacgtcgcccacttggaaaactgaattgttttttgattattgtttcgtttattcattaagaaccccgaaatgttggcatgttttgagtatggctcaacaaaccttcgatgtaccgactgcccatcgtctgtcggtctttttgttgtgccacagccgtcgattctctgtctccaaactgcacatagcattccccggtcggcttcccgtccacgctgctggtgaaatgcacgtcgtaaaccgtgaattctgaatcaaatgaattacttcctacatctgaagaaaaccacaaagtgacaaacctccaaaaaatttgcgcacgtcattttcgttggccgaatatggcaacccgcggcatcgcaaaaagcaacttgcatcggtctgcggactttgcggctgttgcgtagaaacgggcattggcgcgttgacctgaaaattgtttgcattctcatgataaatttgtaaattctaaaaagtccgaagggaaaacctgtgtttgtttttgaaaagaattattatacaggttcaagaaattttatttgatggggcgatataatttagaaatgccaatttaaacaaaagaaggtcaaggcgtaaaactggcacaattgattgtgaaaaaatcgttaaacgatgatagagttcaacctgtggttgaactggcgtgaaattctgctgctgctcgccagggtccccgctgtcgtcggcaccgataaccacgggctttgcctcgacgacctcaccgccgtcggcagcttcagcgccattggcattgcccccgttcaccgccgaagtggcgccaacagtcgatgacgccaaaaagctaccatcagttccattcatcattgttttgtcttacaataagtcttgttggaataaaacttcaaaatttgagctgaaatagcaaaaaataatgaggaaaattaagcgcgagtctcgacgtctttctgtgataaagtaattctaaaaacacgaaaagaaggaaaagaatcgacagaatgtgagcatggccgaccagcgaaaggaaaaagcgaaagcttgagagaaaagagaacggaggaggcagaggcaaaggcaatgtccaaatttttaatcgattagcgatgtgcagaaatgtgctcgtggcgcttttcttttttgtttgatggcactgtctaactctttaaagtttttctctgattctcattaaaattaaacaaaatgaaagaaatttgctttaagaagggaatcgttgtaaaaaaaatatattagagtaaattttgttttttcacaaaaataaatttttaaaaatataatttttctgtgttttgcacgctaataacaaacccatagggctgttgaataataggggtcaatggcaacttgacaaaaggcaactcgtattttacaaagtagagtaaaagcttaagcctaggcccaagcaagcctaagcggcctagcttaaagcttaggcctaagcctaggcctaacctaagcaatttgcctttgttcaacattgtacgagttgtcatgacacagaataataacaaattaatttgatcacttctgacaatgagaaaggctatgaaattacgtcgcattcaaagtctctttttttgttgccctttctttcattttcggcttttcccttcccaaatttgcgcttccttttctttttaatctcttcctttccccggaagtctgtgaaacaaaaaagttcatcatcaccaccaccataactcgcgtcattttcttttttgttttatgcatggcgcgggacgcagtcgcagcacaaagcgcggcagatcgaatcgattgtgcggatgagtgaatgaattgaatggatgaatgaaagctgccaccagcagagaatccctcttccaattccatcctttcttttctgccactgtcaaataaattttcttaattttttttattaccctttgccatttcatccattttttttttttgccttttgtatcataatctctgctgattcttctcattgtctgaagaacaattcgttttttcaaccatcacccaaatttggcattttgatccaaaaaaatatatctaataattgctttgcatacaattttatgaggatatacctaataggagaaaaaggggatatcgatgatttgatgaatttgtcgaggaggcaaggtcggatttgtgttggcctttccggaacgcctatttgcttagcttatccccattagctcgattgttggaacagttgtaacatacaatatttttggcaacataaaatgccaaaaccaaatgatgaatcgtttgatttgcatttgtgccaaaatttactccatttcaaataatttctgcaaagcgagtgatcagtgtgatcaaagcgagaacacagaaatggtaaataaatggatacaatgaggaaaagagcagcgagaaaagtcagagacgggcagacaaagtcacgtcgggaatgggtgggcagagattgtcgagaatgacttgggccgtcgagatcaatcggagcagagaaacagcaaaggaatccgatcaaaaagcgttgtctaaacacatccatcactaatcactcaccggggcttttcgaccggagaacggcggcgggggacgacgaggcaaactgcggccggacggacggtgttgagccaacaaaacctcgctcccgcccccgtacgccatcagcagcaattaaaaagccttccttccatcgccgcgaggtttgtccgtcccatggggacaaatgaatgaatgaataaatgtgcgacgaccgcggcggggggcgggggaattcaatcgccacacatattctatggactccgccaaatcgcttgctgcgagcagcgagactcccgtcgcgcccgcttcatcccccacccctcatttgatccccccctttcatcccaattaatcccgccgattttttgctcccccccttttttttttg

SEQ ID NO: 3706 - DNA, 7344 bp, Heterodera glycines
catcttttctaagcaaatgcatcccaaccccccgagagtgcttgaagtgatccgacggctgggcgagtggagaggaagaccatgggacccaagacgtccgcctcaatgaatgaatggaatttggattttgataaaatttgttgttttaattttttgaattgataagggttaaatcccgttacctaaattgtttgaaaattattaaaattttaagaaattagatgctaaacctaacctttgacaaagattatgaaaaaatgaaaagaaatgacgaaatttttggaatgttccttctttttattatctatggattttttttcatgtgcattattttggtgctagtaagatattgccgaatgaattaattggtttttctcttcattttaaaacatttcacgtccccatgccctgcccacttcccgcggaattgatcaaggaaataattgacgctctcccccctccaaaaacacatcggcttttgcgcgtaaattttgttttggcatactttgttaaatgtcggttttattccatgatgagaagattgtttcgcccagagcatatttcaataccaatggcccgaagaaccggaatttatttctttttcgatgtttgtactccccctatttattttccactctaccaataataacatttaaataaaattataattttttatttcttatttgattaatttcgatcaatattttttgataattaaacaaattgtatttttcaaaaaagacctttctcgcagtagcaactcatcggcttttttttactcccttcataaaatgtctcgcttttgccctatcgcccaaatcaaggaatcgggccggcttaacacaccaaaggggaaatttagtgagttccaaacctaccaaattaaataaaaaattttgataatcgttttaggtcttttttacgctctggaaaatgctcgaaactaccaatgcctgaggaagggtacgagaaagctgagaatcagagcaaaatcgcagtgaggtattttgaatggttggcgcaacgcaaaggggtgaaagttcgacatgcctgcaacggcggggaggttgaatttggcgggctgaaggtggactgtgtgattggggcagagaaaaaaataattgagtttcaggtaaaagaaaaaatattttctttttaaacaatacttaaggggtgtgcatttcacgggtgtccgagatgttttttaccttggacgatagcgccaaacggacggacaatggaagagaatcaaagtagaaccgaaattcgcatggaaattttgagggaaaagtgcaaaaatttttcaatcggagaagtttgggtagaataaaacatttagaaatatttattaattgttagttttaggagtgtgatgtcagagcggaattgaagaagaataaggagatgaaaaagttctttgaaagtgtgccggacaagggaccaatcaatccgagggatgcttatgccgggggaagaacgatgccattttgtttgtacgcaaaggctaccgaagaaattgagatatcaatgtttgatatcattagtttgtatccctttgttaattatggtaaaaatctgcttaatttttgttaaagtttcctttcgcttaagacactccataccccgttggagtcccgaaaattgtagtgagcaggaattttaatgtgaattggacagtgcccgacgatattccttatgatggactgctgaaagtgaaggtcgtccccccgaaaaatcttttgtaccccctcctccccgtgcacatcgatgatatgctcctcttccccaattgttgggcttgtgcaaaaagggccaagaatgagtttgtgatgacaaaagatgtaaagaaatgtaaccaccgtccagcgcagagagcatttttgggaacgttcacttcgattgaactacggaaggctttagagctgggatatcgggtcataggcttctatcgggcctatcattttgagcagtttgacagtcaactgttcaaaggatatgtgcggatgtttttgaagataaaggttgaggcgtcggggtggccggcggaggtgaagagtgaggaggaaaagagagcattcatcgcaatgtataaggcaaagtataacatcagtttggattatgataagattggactcaatcccgggttaagaatgattgcgaaattggtgagaaattattttaaaaaatcgaaaaattgtttaatttaagggattaaacagtttatggggcaaattttcgatgcgcaataccctttcaaatacggaaattgtgggcagcatggaacgttggatggaattggggagagacaatacaattgagtttgggcgcccagtaaaaataagcgaagagatatcaagagtcgtgtaccggaaaaaggaggagttcatcagggagcataaagtgtcgaatattgttttgtcattgtggaccacgagtgctgcgaggctaaagctgtacgagtacatggagcaggtctacaagaaggaggggtgtaaactgctctattgtgacacaggtgaaaaggaataaaaagaaaataaacaccaaaaatttagattctctagcttttgctcatcggaaggggcgctgtccgttggtggaggggaaatttttggggtaaaacataatttttgaaaaattttctataaacatttgtttagtgagatgactcgagagtatgctgacagcgaaattttggagtttgtgtccgcgggtccgaagcagtacgccttgaaacttagaagaaagaaggatggtgtgatttggcacaaaaccaaaatcagagggatgacattggatagacgaaacgaatttaaatatgatttgttcaaagagatggtgctggattacaagaaaggggtcaaaaaagtttttcactacccggagaagattgggccgacaaacgacttccgggttctctcaaaagatgtacaaaaagaatatacgccggtgcagaaaaaaggaattattgacgatcactttaatgttttgccctttggatattattaataatttttgttttgataattttgtctcatgtttataacatttaatattttaaattaatcaaatttgtttcttttttttagaatgtcaaagaaaaacttccaagaaacttcaaaagaaatccgccgctcgaaaaatacaaaaaattatttcaaaaacaatcctaatttggaaaaatgtttcgaagaagtggagagtcacataaaggaaaataaaaaatttgggataaaagagcacgtgacaactttctattttaaatgccccgaaaatgaagatcccgaaaaaatgtttaaaaaaatcctgaaaaaattaatgggggatgcaatgagccgagaagatgagccgggctggaaaattgagaagatttcagtggacctttattgcagtgccctgtcagaccccgtgatcatccctgcccgccccttccaacaatcgaacccagacattgttttcaacgagttcatgcacaggcagcaatcatttggggaagtgaatttgttagaccagagaatttcaataattattgccacttattctttccctgttaaataaaattttttcatttttccctttcattattttttgttcattccattattatttattcgagtttttttctttattaatttttcagttaaaatgtactcgtttcaaaaatattttgaggaggctctcgaaaaagaagattttttctggcagaaaaacagagcagaagtggaggcattgttaattgaggcttcaaattataaaattataatacacagggactacgaaagccgctattctgattatattgccacctatcgccgcaccccactcttctgtttctgcatgattgagagaaatttaagatttttttacgacacaggaaccgggacgcccataggaagggttacaaccgtgctacatgttaccgttgaggcgagctatacaggagaggggttcatttcgcctatgttttccttttggttttattgggagggcaggagtcaaacaacaaacgaatctttcacgagccgtctttatttgtacactgtttcgatgctaagagcaatgggcaaagcctggggcagagaactacttttgaaccctgttgaagttttaattgatatgttctaccaacgtatagataggttgggacatagaaaaaacaatttaaaaaaatattttagagatttggtcggatcgtggtcattgttctatagactcccaccctcactttttgacacttcccgccgggtggttgcggagaataaactggaagaatttttaaaattaccatcattttttcgcatgcttttttataataaatattaaatgttcatgttgtttttaaagtgaaggttttgacccaagtatttaatcaattttaatttattatttttggtagaattccagaaaatgcaaacaatcgctgaaattaaaaatttcgagattattgaaggtggaagagtttttgttgtgagagcgagaattgagaatgtgatggaggcggagtacagggtttgtaataaaaatgaaaaaatatattagtttgtttaggcatgcactttatgccgtaaaggggcttgttcttgcggggttgagaaaaagatgacatcttatttgaaggtgtctgtggcagatgatacagggcttttggaaaatgtgggatttttcggtgtgcgtgggaagaaaaacggaatggtaatgttttaaagaaaaaataccattctaatttaaattcaggaggagttgagaggattgtctggggccgtgtgcactatgaaaatcggcgcgagggtgaaagaattcggagggaagaaggggatttattactctttgattgatattgtcagcctttaaatctataaataaacttgttaattttttcaaataaaaatgttttacttaaaattatttctagtttggttcttgttggtcggaacggaaagttgttgcctttcaaaagaagaaaaagagcaatttaccagtgcccgaagaactgtagaaggcgtatttagagacataattaggttagataacgaagcaaaagaattttctttttctgcacataataccatgattgaagcccaaaatataaaaaataaaaaccctgataaacctggtgtaaatttttggcatagcaaattattagatggagttttaaaaattcatgccctatttgacaaaataaaaaaagaagaaaaaaatatgaaaaatattaaaaaaggtatggaaaaatgtctagacagaaaagatttaaaacaatgcgcgaaaaccaaatacggtttgaaaggcaaagacctcttgaagaatttagggatgaatttattgcttataaaatttaagaaaaaaataaaaattcgagaaaaggaaactgcatgagaatcaaaggttgtgggacataaaccaaaaacaggtgaaaagggaaacaggtgaaaatagatgaaaaggaaacaggtaaaaacaggtgaaaataggtgaaatttcacctaaaaatatataggggcgtgcatttaatggggcatattagagaatgtctcaactagtatcaataaaaagtgccaaaggaaaattttgtgatggttatcgctattacaaacataaaacgaccaagttcaaactttggtggaaatgtgaacttaattcacatgggtgccagggctggggttttgaaaaggaagggttctttacaatgacgcgccgacacaatcatcatcctgacactatattgattgaaatcgaagaggacataaaatatcataatttttctgcgggggcaaaatgctttttgggtggcaacaagaaatagttgatgatgctaagaaaaatccgagactccaaactgaatttagagatgaatttattgtttgtaaactataaataggatcaagaaaaaaataccaattaaataaaaatgaattctgaaaaatcagaaaaagctaattccatattattggaagctgcaaaaaaagagacagaaagagcatggcgggatgtagctgcgctaacggatgaagtaagcgattttgccaaatcttctcgcgaaacacttaatcgtggaataaaatctagagaaaaggctccttacgctaatggtattcgagaattatatcttaaaatgtccgattcaatttgggaaatcttcacaatcctggacaaaatcaatttggagtcagaaaaagccgaatctacgtggcgtgatttcgagagatacaaaacttttgaccaggcaacaaagctcgaggaacaatcgcaaaattcattaacggaagcccgaagattacatttcgagtcccggagggtgcagagccaaatgttaaattatgaaaataggctccaaacaattgtttgggagcatatgggtatataagaacaaaaaataatgatataccaaaatggaaaattgtgccataattgagacatatttccataaggacttaaaatttggctttaaaaaacacaaaaccaagttttattttgttaatccattttttgttaatgttgagcaaaaatttaaactaatactcacatcgttaatcgatgaaatttataaagaggaacagggaaaattcagaagcattttgaagctttcttttgggtttgaatcgttttattgccctcttagatgcctcgagcgtgagagggagggcggtgcgcaatcgccatttaatttctcagagaatttttaaatttatcttatatccaagaaaaatgactatctcttattttgagaaattttatacgttacaaatgctctcgagcatgataggaagtgcggtgcgcaatcgccatttaatttctcagagaatttttaaatttatcttatatccaagaaaaatgactatctcttattttgagaaattttatacgttacaaatgctctcgagcatgataggaagtgcggtgcgcaatcgccatttaatttcacagagaatttttaaatttatcttatatccaagaaaaatgactatctcttattttgagaaattttatacgttacaaaagcgctcgagcgtgagagggagggcggtgcgcaatcgccatttaatttctcagagaatttttaaatttatcttatatccaagaaaaatgactatctcttcttttgagaaattttatacgttacaaaagcgctcgagcgtgagagggagggcggtgcgcaatcgccatttaatttctcagagaatttttaaatttatcttatatccaagaaaaatgactatctcttattttgagaaattttatacgttacaaaagcgctcgagcgtgagagagagggcggtgcgcaatcgccatttaatttcacagagaattttaaatttatcttatatccaagaaaaatgactatctctt

SEQ ID NO: 3707 - DNA, 2368 bp, Heterodera glycines
  unsure (1)..(2368): unsure at all n locations
ttgtggcatccggcgatttgggtcttcgccgacctacataagacaaaaagaaataaaattattttaaaaaaattccttttaaagggntttcttngatttgtnggnataaaattttttaaagatttttntgnnattgnaaatngtngatgtcacagagnatnagnagantctgatgaattgggncgtggcgagcgcattccgagaaggaaaaagtcagttttttgggaggaccaaaatgggatttaatcgggtgttcaatttatctgtttcgacagttcggcacttttttaaatgccgggcactgaatttgtaaaaaaattgatttttttttggcttttccgaaattgaggggccttctgtcccatatgaaatcaaaaatggattggtttttagaaattccgatacccgaaaaataagaatgtctttttttttaaaatgagtatcatttttttaataaattgcatttcaatttccaaaattttcacagcggcaaaatttcggcaaaactgaggttggaggacacatttccgagttttcaattttttttttttgaaattttttgcttaaattggcacagctaatgcgccaaaatcaatcaagtttttgtcatttttaaggcttatgctcggcttcgtcacgctcagttttttcttattcttcacctcctatgtgatgttggttgtgttttttacgttcgaaatgatcaatttcaaaagcaatttattataaaaaaaatgatttaattaacaaaaaaaaatgattgaatccaatatttgaagcatttttaggtttaaattttaatttttgtaaatttttccacttcaatctctctgcaagatgccatttttatgttttgcaaatattaattccatcggcttaaaaaattcataaaccgtgaaaaattttggcttcgaatttactaattttttggatttcagcactttctatgcctagatcaaagctaggtttattttgtaaaatctcgagttttgtttaataaaaatttattttctgcaatttcacaacatttttaaaaattttgtgcaaatttcacaaaaattttttaaaaacataaaaatgacatggttttcttcgttttatgtattattgtcaattttcgagcatctttattgtattattacaattattgcacaaatatgtatgtatcaaatttttgatttaaaaaataatttttttttttaaatttcttagtgattaaaaaggcacggtgaaatttaaaaaaataaaaatttcggatttatttttgatcacacattgctgggctttcgactgttcacctcaacaatgttcacatcatttgtgtttaatggagttgccaacttaaaacataaataattaggtacaataaaatgtaaaaataaatgtaaaatatcatatatttaattccggaaaatatttcaaagttaattagggtaacgaaattcatataatctatacatttttaatagtcatgaggaaattttaaaaaaacttttaaataaaaaaagaaaaaatgaatttgaaatttaaaattttaaaaggtttctttatttaaataaaaacagaaaaatatttttcaactcgctaatttcaggtctaaattttttttataaaatctaaaaatggtattttcaaaaaaatggaatttaaaataatttttgaaagaatttttcaaatttttggtgtgtccaacctcaaattgaattcgaatttttcaaaaaaaaagcccgcctgtgcatcagcatcattctcgtcgttgttcactaccaacaccgttgtgcttgtgctggttgtcatgggcgtcttctcctcgtcatgagcaggtcgtccatttggcggtggttcatcagcagcaagttcaacaactgcttgcggttgttgttgttgtccatgttgtacggcaggtgttgcagcagcgtcagtttgaacaacattttgcacaacatccgcaacaatttggccaactgaacacggtaatgaccattattaaattaattcacaaaatctgattttaaaaaatttatgcgatttttaattaagcaaattataattattaattaattaatttacactcatgaccgaattaattgttttaaaaaatgcgttgaaccctagtgattggaaatgttgcgggcttaatgctgttctaggggtcaacaagttggtagaatggaattttgtactattcttaaatttaaatttaaattttttctcaaaaaatcagaaaaaaaattattatttttttcaattagacataaacttgaaattgttttatgtttttcttaaaaaaacattcttattttttgagaaaaaattctaacataaatttgaatttaaattatacgagagtccatttgtacgaactgtc

SEQ ID NO: 3708 - DNA, 1794 bp, Heterodera glycines
catttgacagatttctcggctttccctgactgatcagtccttcctttttcgagtcgctctgattttccccactgatctgacattgactgatcaccatctcctcttccggaacatctgctgaagcacccgttttgtcttccaaaacttgatcaatgctttcccatctctcctctctggcagcttttcccgtttgctccgttttgccattttcttccccaccactttttggcacttctccgccatcagtttggctttgtgccgaatgttcctcattctcatggatcagcaaaccaacggcttgaacttcaagcagtacatcctttgtgccagcaacacattcttccaccagctgattaattgttggaacttcttgtacagcttcaacttccgctttccccgtttcttgaacatcgatggcactttcttcgcttttcaatgcatcattagcaaattcaggtacagcttcaacttcgtgtacatttgcttgagggctcggaatggtatcagcaaatggttcagttactgattcgcttcgattttccagggcatttttttggcattttggcacttcgtcttcaccggtttggctttccatggcattttcttcgcattttagcacaacgacattgcattttggcacatcttcttcaactggttcagctacagtttgacttccttctacggcatttgctttgctttccagcggcacttcctccccctttccttggccactcgtcccattttcttggcattttgccaatttttcttgttgttcctgtcgttctacttcccgtcgcacatagtcacttccatccaaactggtgcgcacaccgagtggcacaggctcagacggatgtgttggctcagcagtggaagcaatctggcacaaaaaaaacatatatgtaaagccaaataattaggagagaagagattatagagatgtgccaattttaaaattcttaaagaaaatgaccgacttttcaaggacgtccttgagaaggagtaccatgaaataaggaaggtttattttagaacgaggaaagtttgttttcagggacacccttgataaataagcctttttctgagccaaatacgaagataagacattatggggggatgtgccggtttcaaaatccttatagaatgaatgactattttctcaagtacgtccttgagaatgacccaaaatgaggaaatttttgtttttcaaggattccttgataaaataaggcactaatttccattaaatttcgaaggattttccacctgtcaaatttggtcgaacccacctcgtcctggataatctgcgtcgattgtcgggtggctttggcacgattcaaattatatgagtgcttttgacccatttttatgaaaaattgagcaaaaatctaaaaataaaattaaaaagcaaattttgagggaattttttaaaaagattcaataaaaatagaaattcctcccacaaatcaaaaaatatattggtgagcaccattcattcatttggtgaattgacaaaagaacagccaaaattgaagctaatttttcggcggacaaaccttccacccgccgccggatttatgagcttagcaatggaaaattaattgaacacatttacattgttattacaggtcactctgatcactgatcgctggtcaccgatcatatatattaccgtatatcgtggaataaaatcctccccccccaaaaaattggaacttcccctcccccctaattttgaaagaaagccctccaccatttgagtggggagggggggggggggggtgaaaaacaaaa

SEQ ID NO: 3709 - DNA, 2365 bp, Heterodera glycines
ttcgaaatattgggttttcgggtttcaattgtaataaccaaaattaaagcgttgtttggtgtgtaaacatcgtataaaaattaaaatattatttaccttttttagtgcttgtccgaggctttttgtgcctatttaatgcctatttgctattcttttctgctttttaggtgcctgtttttattgaaattctttgttttttaattgagaatttgtgttttttttaaagttttcctcaatttttaatgcaattttcattttttataaaaaatattcactgaataattaataagtaatttttattacggcattttatttatttattttgtaaatatttttgcaagtgaatttgctatattcaaactgccagcaaaaaattgcaaaaacaataaaaccatcacactgatcatttctcccaatatattttccatcaactgttgaatccttcattgatcatagctgtttttttcatgttttccgctgtccgtcggctcctatttaccgtagcctgaatggtaggtgatccgctgcatcggcatacatactgtggcatcagagcaggtcaccgtgaacacggttggtccttccctcccaatcttgttggttcatttccccgtccgtggcccaatttgttgccctgcctcagcctccttgccattaatcgggccatgtcggcatcggcacacgcactccctccgcctccccccgcgcccacgggctcgaccatagccatttttcgttgattattcgcaacggacccggcccttttggcaatggacccgaggtccctaggatgtggagatggcactggcacatctgctgttgactgaccacctaccatgcccgtcgcgacagaaacccggaaggggacatggcggaagcggtggtcgaccacgctgctgctcattgtcattgtcgtcgtcgtcctgcgcctgttgctgctgcctttgtttgccagaaggaagtgcatagattggcactgagtatgaccgcctaatgtgccatattttatacgtataagcaaatgccatttttgggggaaatgccatgccaaatgttagcagggggggggggctcaatttagggaatatggtatcataaactttgatcagttctgtattttgatagtccttgtaagcgttgggatcagtctgccattcttagtcaaaaaaaaaataatagtttcccacttacagataattaagtgtttggttcaagttaatcagtgaaggatcagatttggtctccgctaatcagtgctgttttcggtctgataatttctttgatttttccgctgatgaatgacagagataaatttggtcccggccactgcttgatttgtaatgccaaatcattctcaaagtttggtaatttccattttaaaacttgtgattttttgatcattcatctttctgatcactgatcagaaagcattaatggtaccaaaaaacaaagctaaccaaaaaaaaaacaaaatggcaaacaaaaagttttttagagcaaaacaattataatcattttgttaaaacggaattttgtcagcacaggcagcacaagcagcagcatctcgtgaatgctaaaatattaataattcccaaaattggggcccctcaaaaattccgaagaatttattggcgaggggcaaaaaaatgaaagaaataaatgaatgttcgttcgttcgtccaatttgtgtgtgtatgcaatttcattttcaaatttttctgggcggggcgataagaaagaattaatgcggcggcggcgggtaaaaatatttgtgtgtacacacaaacacataaaaatataaattctaaaacaaaacagccccggaggggcagaaaaattgatggaatgaatgaatggcctggccaacgacgaccgacgaccgaacacatcatcatcatcatcattaacacatccatccatcgctaaaaaggggggcgacgacaaatcgtcggtcggtgggtcgcttcagggagaataatcatcggccgtggatgatggaattattaattatttatttttgtcccatttttttttgggtgaataattgggccctccggcggccccattcgatgtgaagaaacaaaaaaaaggacaggacaggacagaaaaaatgatgatgcttaatgctaataatgatgcttattgaaattgcattgttcttttgttttttgtgtgaatttttgtgcaaagccaaatctaatccaagcggcatttttgatttagtgatcagaaaggataaacaatcaacaagaatgaatgtgatcagagcaatcagtctatgcacatacatacttactgatcgagagtgttagaaatatctctgaagacttttaggtatgggttagattaggagtttaaggtagag

SEQ ID NO: 3710 - DNA, 1381 bp, Heterodera glycines
gtcccggtcccggttaagcccaaaattcccggtcccgctgcactctagttttaggaccaaccgatatctcatcagggtttcaattttcggccaacagatctcgaaaactaagaccaaatttttcaaattcccgaaacactatgaattgcatggatatgagttggtgttcccctctcaagagatccgtatctcaagaactattcgtcattcttgaccccaatgagtgtatgtctatgtctcggtctcaaatctcgagaaaaatcgttgccaaattccccgctttggcggcatccccgattccccgcttttttttctatttaaagtgtggcggggtatggaaaacagacagcacagatgagaagcgattacataaattttgttgtggggggggggggggggtgttttttgtgaaaaattcttttcaaccaacatctgctgctttctgcgtttgggggcgggcggtggtcgtcgccgccggcggccgacgacggacgttttcccccgcggcgctcttccgtcttttcatcgtccgtctgtcgccccgccccgtccgtccgtcgtccaatctgtcgtcgtcgtcgttcgctgagaaaatggaaattgcgcttttttggcgccccaacaaaaaaaaaagtgtcggcgacaaaattcgcccccccccaaccctccggcgatgaataatggggaggtgatgatgaaatatatgtgtgaatggtatttgatttttgtgtgtgtgtatgtgtacacattgtacaacacatatataaagtgtttacgggccattgacacgaccgacaaaatgttccgttccgttgccgcggggcgaaggttaaaagttgaacgatgggttggggggggggggacggcaaattgtgagcaaattttgaattttgaaattgcagagcaaattttaaattttttaaaaattagattggatttaaagttatgtttgcaatcttgacttttaaatttgcattttgaattttaacttttaatgaaattttatttttattttttaattacgaacaaattttaattataaagttgaattttgaaattgtgagcaaatttcaaattttcaaaatgcagagttttggatttaaaatttttttcataaaaatgttgaaatttgataaatttgtgaattttttaagttatatattgttcgagggttgtggagtttttcgatacgctcggataattgagccccccccccccccgacgagagtctagaatgagcccaaaaatcacaaattgagctcaaagattttcaagtttcattaaaaaaaaaaacttttaatataataaaatgtttatttgactttattctttcaaaaacgtattaattttaattaaaaaaaatatatttgcgtttcgaaat

SEQ ID NO: 3711 - DNA, 1354 bp, Heterodera glycines
  unsure (1)..(1354): unsure at all n locations
cattttcgggatcggcatcgccgaaaacacncctagganagtggttttacgacttttataaactataaaaatttatttaaaaaaggtgtggcaccatctaaactattacataggcaaggaatagggcagaaaaaaaatccntaaacatgtaactaaattggtaaaaaaagttcatccgtataagataatcattactaggcttataaattatatggaccaaaaaagcccgaaatatggactaaaaagctcaaaaatggccaaatatggactaaaaactgccaacatgtatcttttaaacttcaaaaaattcagaaaaatgttttatactcaatatttgcttaaacaacttaaaaatacgctaaaaattgccaaaaaatggatttaaacttaaaaaatgccaatttttattaaactctagcttcacaattgcaaatcaaataggtacatctcaaaatttttgtaagaatttcattctgttgtcagcgaatcatttcggaagtggacaaaaaatttaaaaaaaattccgaactttcgaaaaaattctctttttaggggtgtattttttaaaaatttccagaaaagtcgacttagaggtgtatttttcgctttttttttgcatttttcttgcgaaactttgccaaaaatggccgaaatatggactaaaaatgcaaaaatggcgaaatatggatttatttccgaaaacccccaaaatatggatttatttggactaaaaactttcactaaatcaaaaaattttaacgtagaaatgctatttttgagcccctttcttcatagcatatgcgcagaaaaaatttgttaacccatataatttataaccctaatcattcattactgacgcatttggcggtttgaaaaattttgagtattttttcctaatttaccattctaaaattttaacatttcactgaaaacaaaaattcaaattctaacatggttgcaataaaaatttgtacaatttatgaaaatttgttttcattataaaatgattttcaaaatggtcggcctaggttccctgggcggctctaattgaaagaaaaattttaaaagttacaactaaattggtcatgttaagacatttgcagccaaaggaacgctaaaaattatcattttttaaaatttaattacactaaataattaattaatttaaccaaacccgtaatgacggactagggatttccgtagttgagaaaatcgtcataattacggatttcggcgctacttgcaaagcgtggcgttttgaaaatttttttacttttttttgtctatttttttttttgtttattttgacgaaaaatgtgtttttttaaaacaaaatgtccacttagaaaagaca

SEQ ID NO: 3712 - DNA, 1383 bp, Heterodera glycines
ttttgagcttagaaagtcggaaatttactcctgaaatttttcccagcgctacattaccttttggaaagtcggaaattttttcatttgtccacgatgtcaaaatggtatcaatttaatgatatgtctgctctccttatttttcttttgatgacttttgagcttaggaaagtcggaaatttactcctgaaaattttcccagcgctacattaacctttgcctccacgatgtcaaaatggtatcaatttaatgatatgtctgctctccttatttttcttttgatgacttttgagcttaggaaagtcggaaatttactcctgaaaattttcccagcgctacattaacctttgcctccacgatgtcaaaatggtatcaatttaatgatatgtctgctctccttatttttcttttgatgacttttgagcttaggaaagtcggaaatttactcctgaaaattttcccagcgctacattaacctttgcctccacgatgtcaaaatggtatcaatttaatgatatgtctgctctccttatttttcttttgatgacttttgagcttaggaaagtcggaaatttactcctgaaaattttcccagcgctacattaacctttgcctccacgatgtcaaaatggtatcaatttaatgatatgtctgctctccttatttttcttttgatgacttttgagcttaggaaagtcggaaatttactcctgaaaattttcccagcgctacattaacctttgcctccacgatgtcaaaatggtatcaatttaatgatatgtctgctctccttatttttcttttgatgacttttgagcttaggaaagtcggaaatttactcctgaaaattttcccagcgctacattaacctttgcctccacgatgtcaaaatggtatcaatttaatgatatgtctgctctccttatttttcttttgatgacttttgagcttaggaaagtcggaaatttactcctgaaaattttcccagcgctacattaacctttgcctccacgatgtcaaaatggtatcaatttaatgatatgtctgctctccttatttttcttttgatgacttttgagcttaggaaagtcggaaatttactcctgaaaattttcccagcgctacattaacctttgcctccacgatgtcaaaatggtatcaatttaatgatatgtctgctctccttatttttcttttgatgacttttgagcttaggaaagtcggaaatttactcctggaaattttcccagcgctacattaacctttgccctcacgatgtcaaaatggtatcaatttaatgatatgtctgctctccttattttcttttgatgacttttgagcttaggaagtcgggaatttactcccctgaaatttcccagcgctaca

SEQ ID NO: 3713 - DNA, 1494 bp, Heterodera glycines
cggggacctctagagtcctcagcggagcggagagtcggcctttgtttatgtgtctcaacggcgaaaacatagtgcaacaagacgtaagtatataatttatttacaagagaatcaacatttgttcaattaggtgggcaatgatcggagttttgtggcgaatgatggccaatttatgacggatcgaaggtatccgatcagagacggcgcccaatggacaattatctcgaccgatacaatccaataccgtttctttgaggcactaaggccagttcagaatgaggtgcattgtcacggttgaatgtgggccaaccaaatgccgttaaggttgctcctgtgccaattgtcagttcgctggacatgcactcgactgacccgacttcgtcttccggcgcttacgttgagcttaatgggcacgacttctaccccaatttgcaggcttggctcggctccactcccatgcccacgacatttgtgtttgttttgaacactaagagtcatcactttgttaaattctcggttccctttgctttgcagcaacaaagagatgctccgtttcactctcctccctctcagtcagctgaatttgcaggagggcgtcgattatgtgttgggtgcccgctgctctcttctgtccgtcccctgcccgctcagttcgccctcccattctccgacaacggcctcgtctcccccattccttcacttcctcaatggcacaacaacagtttcttatgacagtgatcaggaattggagtttccgttgtcattggttcgcgatgacggagtcatttacgccactcagctgagtgtgtcttacacgagaccacgggaacaacagttcaggacgggaattcaaggaacacaaccgaacagctagccggggaggacctttatttggttggatgttccgttctgttttctatccattgttattctcaatccatttgtcttaagttttcttccttatttattacagcatttacacttgcatagtttcataaatgtcattctaaatctattcaataattattttcaactaatgataatatatggtgtcgattacttctgtgtctgtcattgtttatccgttatcttgtctgaaaacacgaataaatctcgttgtcgcatttcccatttttttaattatcgcgttcaaatcagttttatgattactttatttatcgaatttacactaaataaaataattcgtttttttttgctgttaaagacaatgttggagaatgggcccgacgaggattggggctgtgtaggcccggacgaattgttcgtaaattcggggccgactccgtcactcctttctttggcagcgcgagtcgaaagtcggcatcgtctgctcaacataagcaaattgaacttagagttgggacaaatcgtggacaaaaaggaagaacggacaaatgaggaggaaaggacgataagaaacgaatgggagggagcaaatggaaagaattgcgccacaacggacgacggacacaa

SEQ ID NO: 3714 - DNA, 1763 bp, Heterodera glycines
  unsure (1)..(1763): unsure at all n locations
ataagaaacgaatggggagggagcaaatgggaaagaattcgtgccacaacggacgacggacacaaaatgccaaaggaggggccgaaaatggcaacagcacggggagcgaagaatttgaagcaattagcctttgaggttgttattgaaaatgagaaatgagggaaggaaggctgttctgttcaggttgaaagatttgttgcggccaatttgactgatgcgaatgagcggcagtcggcggagcagcgaatggttgttgccttaggcgcgaaacccccacgacggaaggcgatcaattaccggacattaaaggaacagagaacggaagcgaagaggaaaacaatggagggggaagacggacaacagccggaaaaggacttgtggaggatggtcaaagaaggaaaagtgcgaaagagagagggcggaaggaagaggaagaacggaagcggagtgctgaagaaatggaagaaagaaaagcaaaaaatgagtggaagaaaaaaggacaaaaaaatgaatgcgtgttaaacacagttgaattacctatcctttgttttgtatttgtgaaataaagtttcatgaattatttcggttcaccttttcaaatttattttaaaaatctatttgatctttttactataaaataaaaagatttaaacttgaaaaatgacaacaggtccgttacaaattaatgagctagccaattgcgaaggtaaagatcgttttcgaaacccgttccaaatgtatctgctgagttgagaaagaaagtcacgaacaaacacatccttggggttgaggctgaagcgttggagtatttgccgaatgtaatgggaatgggcaaatcggcaaaagtctcggcggagagatgtgcgccgttttgccgaccaaacactggcacatttcctcaacaaattcatacgaccgttaagcgcccttttgatggtgttgcaaatgaagcgaaaatggtcggatgagcgaagggcggaggacggaaaagaaatggacggacgacgctgacgataacgacaatagtcgacggtcaactgaagaaagtgtaacccatcaaaagatcaaagggaaaaacatacactcaaagtccgacgatggatcgccagtccacaccattgcaatttgtcctttgatttcattggtttaattctgtcactttggcattgtaattggaatgatgtgttcactttcccaaagtaaagaccaaattttggcatctcagacatcaaattatcaatcaactaaacccagcaaataatgtaaatttacaacggtatttgaccttttcaactcgttcccttttgttggatatgattagataatcgtccatgtaacgacagcaaaacagggtaatagcgcaatttgtcagccccatttccggcgaatgaaggcaaatttgtcgctcgacccaacccaaatacaaattgcacaaggcaaccgaaagtgagctcccctggccaattcctcttccactgacaaataatcgttgtcgtaagggccggttttgtgcagaggaagttaatgcgcagaatggttctctaaaattaaaagataaaccagtttgcaaaaatggaaattaaattaaaaccaataaattcaaattcacctgattagggtacgcatggcaaattgagtgatcattttgagaaattcgacactgcttatttcgcttttgaatggagaattgaattcctcgcttcctttacanatgatgcgtgaaaatgcgtcgtcatagctaagcccggcttctgtcttcgttt

SEQ ID NO: 3715 - DNA, 3451 bp, Heterodera glycines
ttacaaatgatgcgtgaaaatgcgtcgtcatagctaagcctctatagtgtcttcgtttttcgatatttgtatattttgctgttcacttgaacactgacaactacaaacttgctgaaaattgcggtttatcagaaaaattgatttattaaatggaatgtgaatcaaaataataattgttggggttttacctgtcagagggtgtgattttgtgcaaaatttcgtccaacactttgtgttcaaatgaggtataacaattgttaagatcagctgtacagaaatgcattcgttgtcccttttgtggtccacgtgtattttggagagataaacgacggaaagcgaaggcaaagagtcgcaaatcttatgaaaatttaaatattttattactgaattgaaaattaaatcacttgaaatgccccattcagaaagaagcgagcaccgaccaataagaaaacgcagaacggcatgaatcgcgttgagtttatttttgagccttgcatttctcaaaataacaatcggacgaacgctgcattttttgggcaaaaaactttaaaaaggggaaattgaaaaatacgaaatttaaatgagaaagaacattagcttgtggatttgaccatctaaatcaggaagagcatcagttgccaataaaaatcgcaatttcctttcggcacgaagcagatcaaaactttgtgaacaaatgcgacgccaaacatctcttcgaaaatggacaatttggccagcataattgagagtcgaatagaaaaaggacatgaaattgggaagggattattttattgggttctattaaaaaaagtacgtaaaaatgcgagtaaagagatttaggaaggatttgagaatattaagcacgatggactgcttcagttgaaaatggagtcctttcagccaaagaatctgatcaaatcgaatgccttttaaaatttgggtacgtgacatcaaaaaaccgcgatttctaaattattactataaatcatcagagaaatgtgtatggaaccaacctcaaatcaatgaaagtcgtagcgatgttttcacaaaacatttttacattggaatgatcgagaagttcagcattaaaaaaaagagaaagtttagtgacaaaagcgtgaagttgtcgtctttccaacgggttgcctaaagaaacgtaaatgaatgtcagttattttctaaatattgggaataaaaaacaccgtctaaaaacatttatagcttacaattaacaataagcacacacttatcagataggcacatttttgtcctttatgtgccgggatgtgatcattcaaaacacgacgaaagcgaatgcggccaatttttggcatcaaaaagcgtaatttgacgtgaacatcgtccaaaacccgtgcatccacctggccaagcacatggatacactggggggagaacagctcctcgagcaataaatgggtgtcgttgcgtctcgaaagctaaaaggtggaggctataactgtaaaattaaatacgtttctgaatccccacccattgtgaccctccttctccgtataacattggtcccttgggtctgttaacgatttccgttactttctttacgtcccaaaatttatcatccgtgttaagagtgaacagcaactttaaatggtcttcgttaatagaggttctcttttgcctacgatattttttcctgacaaaagaacataaaacaattttattgaaagtgtacaaataccggtgtctcctccgtttctctccccttcgttctttggtcccttcgctcatcatttttatagaccaaagaaaaacattctttgctagtttaaaaataaattttcaaaatcgaattttctttgagcacacagattaagcagtataatttagttaataggaacaggtcgacaaatatacaaatctgaatgctctttttatacctccaaatatgcgatgcgaaccgaataacaaaacacccctggctaaacaaagttggaaccatgaacaatagtataagaaaagagatgaaggagcaagtcgaccaagggaacaaagaggatgatagggcataatatattggtacgaatatggacgaactcgtatcgaacacttttgaggtacagacatgaagtaagaagtggaaatattcagccgtttgatacgagttaaaaatggaaaaataccaaatgatttgaagagagggaaatgattgatggggacaactcaatcagaaggtatggtcgaaagtgtttcaatggaaatggaaaacttgcggacatacaacttttgtcattccacagggctgactcctctgatgcgccgtctttcattgtctctcggccaaataacggcgccccgcctcagactgacggacacttaaaaacacagtcaaaaattggaccttatgctaccaaaccacctttgttgtagcaaaaactgagccaattggatttgatgtggcgatccggtgattgtgatgatacgctcatccgttccgaagacatccgactgcgtgtcaatttcaatgcgtgcgccggactcgtttcgaattcgattaatacactcgccgcgttttccaatgattgtcccactcaatttgctcggaatggtcaccttaaaatactttattaacacgttttggaaaaaactctggattgaaaaacatacctgtgttgtggtcatttgctctccacctggccctggataacccatcggtggcggtcccccatgatggtgaggaggcggtccgcccggtccgaaaccggcatacccaacaccaggttgatgaggcgcatttggtggtccgtggtgcggtgggtagtcgaaatgaggaggaggcattggtggaggtggtccaccttccattggcaataataaagcatcaatgaaggcactcacccatcgattgtccttcaaaaccaccataagcgtggcacatgtgtgggttgtaattgtgtgggtcgtaaggctggtgcggtcctttgaagggaatttctttgacaaaatcgacgagttgtttgacggcgcagggcaattttgacggatcgccagtgatcactgaggaaaaaattaaacgaagaaaaaacacgaaaaaactaacggcaaactcggtcgctagaaactggacaacattcttggaaaaccttaaagcggcattgcgtttgctcgcgaaactctttgattttgcttccatttcggccaataatagcaccagcgtgagactgatggacaagcactttgatgtcaatctcacctcgactggctttctcacccttaaaaatttaatattttaataatattaaataggtattttggcaatagtaccgatggtggcccccttttacgaaaaacaaaatttttaaaatttttttcgataaaaattatataaggggttttaaggattgaagaatccgaatctgacattaatttcgacctaagtcgaaaccggaacccgaattcgagcaaaaagtcgaaa

SEQ ID NO: 3716 - DNA, 2180 bp, Heterodera glycines
  unsure (1)..(2180): unsure at all n locations
ttctcgaaaaaaaatcaaaaattttgttttcgaaaaaggggggctaccatcgggtantataccggtattttcaatgatccttttgctgtacctctgataatttgccgagaatatcggtgaagcattcttctattgattcaagagagcaaacgatggtcaggacacttaaaataacagggaattaggattatttgtaaagagcctttccacaaaatttaaattgtatccaagccaagagaaatgatttcgccattagccgaccaacccggggccaaatgaacgaaaaataattttgcctacataataaaatgcgtccgatttattcaaaataaggagggaaggattaccgctcgggagtgctcctatcgggaacattgatgttggcatcgtactgaaaacggaagggtcagtcaatgaagaagagccatttggtagtggagggtgctgattgaccagccgttggttcgaattctttgttttttctcttccattttaccaagaaacttaatgtctctcgacagaagagtaaaggaacgtgatttaaaagtgatgggaccaccctagccaaaaggatgggcgggtcaacaggatggaacaacactttgctttatctcatttttaagatatttcaaacctaaaaaggcattgaaaatcgtcaattatgatcatttaatagaataatattttttcctttatattttcaaaagcattgtcaagcaaaccttagatcgcaatgatttgatgaattctccaccacgtccgatcacagcaccagctgatcgactcggaataaacagacggagttcgaattttcccgctgccaatgcatcttggtaagcttcaccagcatcatgcggaccgcgaaagcgtttccccgcaccattcatatggccaccgcctccatgcatttgcatgccgttgttttcttggttaaactgtcgtttcatagcatcaaactggctaaaattcatgtcacgtagttgaagcgcttgtcaataaaatactgcccaatatcgatgatcaatacaaatctaaaaacatcgctccaaagaaatgaaaatatataacgcttattgtattcttttccacaattagagagagtatttacttagtggggggattaaattttttctgtgcccatatcgccaagttgggcatcgcccagttggctcctagttgactcccatttcctatttaggatctgtatgggtacgctccaatgtgcatgagaaagcccggtactatctctccgtttttttttttgtatttttctctctttggcgtactatctgtaacgttttcatagaaaaaagaatttggaaaataaaaataggaaaaataaaaacccaaatataaaaagtttacaaaagttgacccaaaagccacacaagattgggctaggatttgcattggtccggatagatttgatcagtgatccagaaaacgagtaaatataatttcataacctttaacacagaaaacctgatatgctgcccactaattccgatttattcaaaataactattgactcttctcttgaccttcatttcttcaagggtaaacgacagaaaatatgttcaactttcggcaaccaattcgaagtcattgagccggctacgggtacagtcgtgacacaatgtccaagtgcggatgattctttagttgatatgtcagttgcaattaatataaaagttccgagaagattgtttatttaaatgatatttttagagttgtgaatcaagcggacaaagcacagctccaatggtcgtcattgagcccattggaaaggtcgaaggtcctcttgagaactgcagatttaatcagagtaatattaacatacaatggtattttacatcaattcatggttaaatagttaaggccaatttggagacactcgcctcttgcgagacgcgcaccaacggcaaaccaattgttgaagcccgcgtcgacattgagtccagtgcagacacatttgcattttatggtgggattttgccagcagaatttaaaggtgtgtacaaattactgtagtggaaaatttactgggttgaataattcaaattacaggcgatttttacgatattccatcagatgggaaagggaatcgctttgcctacacacggtaagggcatattctttttaccccctatttttgggtaatattncacaaaatgcatagt

SEQ ID NO: 3717 - DNA, 3562 bp, Heterodera glycines
  unsure (1)..(3562): unsure at all n locations
gtcaatggattggactcataaaagtcgattggactcataaagtgcattagagccaaacgggttgtgtatacaattttttttctttgcgccatttaaattcgttgtcgagtagggctctatatttggatgattcttataattgaagtaaaattttttcaaaaatggggtaaacaaactcaactagttccatttatttaacccaaatccatgtctagacgcgaaccgttcggtgtcgtcggttgtatcggtgcttggaactatcccttccaagtgatttcttcggtttctgtaacatctactataaaactcgttcagacttgctgttggaaagtcgcgccggcgttagcttccggcaacgccgttgtgtacaagccgagtccattcgcgcctggcagtcccgttttacttggcgaattacttaaagcggctgggcttcctgatggagtttacaatgtcttacaggtcattattttatttttaaaggcactttaaataaatattggcaatatttagggagaagccgagaccgggcagcttatctgtttgcatgagaaagttgctcgagtttcattcactggctcagtgtctaccgggcgaaaaatccaacaaatgtgctcccaacgcggcatcaaacctgttggtcattttgccaaaacaaagaaaaatttacattatgtcaggtcacccttgaactcggtggaaaatcagcatttattgtctttgaagacgcggatttgaaagatgcagtagcttcagccattttggcgaatttctgtaaccaaggcatgttcccttactcatcatctatcagtgaaattgaatttttatatatttttaaaaccgaatattttatattctcaaataatatttcgtccaattaaggcgaagtttgtacaaatgctactcgtgtgtttgtccaggaatccgttcttaatttgttcaaaacaaatttgctggctgaattgaaatcaaaaatccgaattggaaacccattggatgacacaacaaatgttggagcgacaattaacgagcaccatttggagaaagtgattcaatttgtagaacgtgccaaagaccaggtaatttaaactgtttaaagggtttaatcactaacttttcctataatttcatggtgcaactgtgctgtttggtggtcggcaagtgtttccatccggcgttgaaaaaggcttctatttcgagcccgctgtgctcaccgatttggacgatgagatggaaattgtgaaagaagaaatattcggggctgtgatgttgattttgccgttcaaaactgaacaagaagcgattgcacgagcaaatgccacacaattcggattggcgtcgggattatgcaccacgtgagaggggtttaataataaatattgatgagattaggtcgtaaacaattaaaggacatcgtttgatttttagctattatgaatagtaagtttatgtagattttgtttggattggagatgcataattatttaaaatgttttcattgtacccttccttaggcacaaattaaaaatcgtcactctgatgtcctaattaccacttattttttaaatattatccgatttattctcttgttggtcaaatcactaaaaaaatctttggtttacttttagtttaattgggccttattgcaaaacgacaaataagcttttgctaacaaaaaataaaagtttctaaaaatatttatttacaagtaatgaaaatttaaattttggttttattgcattttaattccaattttttaaggaatttagcacgagctcatcgcgttgctgctcaattgaaagttggcactgtttttgtcaacacttacaatgatgctgaggtaacaattttgaataattaattgcgaacgattgggtttactgttttgttgtaagatggtcgtttaaggtgcacatcccattcggcggcttcaaaaattctggtcacggacgcgaaaactgtgttgaatgtttacacgaatattcacaagtgaaatcggtgtacgtgaacatcgacgaaggattgcaacacaatttgggatgaaggaagcggagagagaaaaatgcaatagaaagagctcaaatacaaatagaatatttttaaaattttttcacatgccttattttactaactaataaagagattaactaactttctagaaaaaattaattgaaaagcaaaaaaggttgtttacatggctggaggacctcgtaaatttcggtccccaccacttactattttataacctaatcagtgcttggaaatttcgatgctttatgtaaaatgttttaggtattttgtttgagttgcgtcgcagtgtgtgcttgtgatgactgcctttgaggagttgggcgttttgtccgaattggcaacggcactcaatgatttggaatggacgtccgtctctcccttttctttcctacttaattttcatagctttcagcttgcctactgacattcaatccgaagcgatccccgccattctcgggggtggcgacgcttgcatggtccgtccgtccgtttctttctctcttttgttttgattgaatcggtgtatttaaggcggcggagacgggcagtgggaagacgggcgccttttgcattccggtggctccgtccactaattcctttttcgttaattttgcttttcgttgaatcattttcagattttgcaaattgtcttcgagacaatgcttccgtcaaaccccaaacggagtggtgctgtcgaaggtcaatcgacgggcggtgaccatgtcgataatgatgagcaacgtttgctttaagacaacggttggcgcatgaacatctttgaccgtgaccacaatttgggcatcgacgccagcggatttgtttgtgagagtaaccatcccaaattgtggagcggctcgcgttcagtgcgtggagttaagggatcgggtcagtattcttgttcatttatatgagggataggattttaagtcacgaaaaatccaaaaagtcaactaaaaaataataaaaatgcaaaaaaaaaatgaaaaattgacccaaagttaaaaaaataccatttttaaacaattgttgaatagcccacattcttttttctcaggcaaatattattacgaggcgaccattgaaagtgacggactttgtcggatgggttggtcaacagcgcgggcaaatctcaatttgggtttctataataacaaagttcgtgaaaacgaagatcattttcaaggaacggatgaccagggctggggatttggaggcaccggcaaaaaaagtcacgcgggtcaattcgaagactacggacaaagtttcacgttgggcgacaccatcggctgctttttggacctcgaaatgggcagaattcactttgctaaaaatggcattgacttcccagtggcttttgccctaaagcaacaacagattcagcaagggcttttccctgccgttgtgataaaggtgaacagacggacggcaactagccccccccccccgactaattttttcagtaaattccggtggggaacttttacataattaacgttttgtaagtgtactttcagacctgnncnaggcatgc

SEQ ID NO: 3718 - DNA, 1969 bp, Heterodera glycines
  unsure (1)..(1969): unsure at all n locations
agataaagcctgttcattcaaaaaaaataataagaagcttctgcaaatctgaaaatgtttgtttgaaatttggcattttaaattaattacgcattgccaaatttggcaataaaaatttacactcgggcgcattggtgatcaattcagtgtccccgctcttaacaatatgtgcccgaatttctgcgagatgcgtgcgaaatttgccaatgccataattttcggaagcctcttcagtgaggttgtgccacgccatgcgcaataagaactcgttgggaacacggaaattgagtgagagcactaaatggtatgataatatgccattaggatgaggaaaatttgtccccaggtcctacggcatttggcctttgaataacatgggctgtgaagtgaaaaagccgggaatctgagaccaatcccggacggtatcccaaccacatataccgtatgttctcgaattatcgacctggggggattatttttcaactttttcattttcaaaaggggggggggagtaattggatacgaggcgttaattagagaatatacggtaagcaaattatgatgtgaatcgaaatgtaagtgaaacttacgtgtcatgagacagtacaaaataagcctacggtgatgtgccactttcgccaaaaaagtgcccaatttgccatccaacgcttcgacctaaatttatttcattaaataattattattttttatattttaatcaccaaattgcaaaacattttcagccatttgccctgtttttccaggacaaatccatcaaaaatggcagaaacccttttattagcccaatggcatttgaaaggcaaaaaatgaattaactcaaaaagtaattcgggtggaaaatattttcgtttaattagtttcattttaaaaataaaaaaagtaatatttggttatttattaatgtgaggaaggcgggcatttttatcaccaaataaataaaagtgccaaatttatccgttgataaacttttttagtgataaatgttgatcaaaggacgtaccgcacattcaaattttgtcaaacatggagtaaagacaaatgcacaaattaaataataaattgccaaaaataatattctggcaaactttaattagaaaaatgcttatatttttaatttttaatgtcctttttatttacaaagttcaaaaaatgtgctgatcaattaattgtcttttagtcgtttgagaatatttcagtggtgtgatacggcggtagttaattaataattttgcattcgactaattacattttccattgcgcgagctgtttgctgatcattttttaattacttgttttacacaaatcaagttttggtcactttgaatttgctataaattgaaagaaaatggcgccgacaaactcattaaacttattatttttattaattaacaatggtcacgttttcccgtattcaaaatggccaattttgggtaaaactctgagaataaatgtttcaaactgtacaaataatggaataaaaacctcaattaggaaaatacacacttctttttacgcaaaaaattatatttttaatcagcaatttgtctttgttattttttttagaaattttcaataaacgagcaattaaaataattaattaatttttataaaatgcgaattttccttttgctttgcttattgtcgcctctttgtcttattattttgctgtgaagatggagaaacgagctgtggtgatggtgaggcaatttaatggtaaaatatttttttattatttaaatttaaattcgattttagacactttttttgcttatttgttttttgaacagaaattcgattttcggcattttttagagtccttatttttaaggacggccttattcaaattagactataaaacaagggcttctgttttttttagtgtgtctttatcagagtgaatcggttgcccattgaatttaataattaattaattntgacagcctcttga

SEQ ID NO: 3719 - DNA, 1766 bp, Heterodera glycines
aaacaaatatgattttttaattttctggttaatattattttttgttctttttgaaacgaaaaatattttttatttaacgcaattttttttaaattcaaaccaattatttttctccaaaaattttcactgtttacattcatttttttttctgctgatcacttcactttctacatattattcctacccattcattctctcaacacacttttgcaatgttttcccccgatttggatcacaattatccgatcggattaccctcccctcctcctgatcagtcggtgttaatgaggtcgtattgtcactcggatcgccactcattcattcatcgggaatgaacaaataaataattggaggtggccccaaaatgagtgatcacaagtgtcgatcgacacagaccggaatttataccggaacaattattgcgggatcgctataaaaagagcagttgatgaatgggtaatgcaacagaataaaacccaaacattcagatgaacctgagtaagctgatcaaaaattgatcaatcaaactgatcattttgaaataatactgttgatggccaagtgattagactgtataacacactgattaatgcaaattatcagtcaaagtgatcagcttgaaacattacataaaatggccaagtgatgtgatcaacttgatcatttcaaacaatactagctcactgatcagactcagactcgtttaatgatattaggcaataaaattgcatttattctttttataagttacaaaaactttttcattttttgaaaaaaatcataaatattaacagatcattcattgtccgtttaaagtaattcctgctttcattgatcactcgtaaattcagatcagcccaaatcactgaataatcctcactttcgatctccaaaatggcagcatctttttcatcatcaaccttatcttactcaattataaactgtttgttgctcgctttatccatttttctattcctttcaatgactcatccgatcagcgctcagccggccgcggttaattggccacgaatttttttaaaataaaattttcccatttctttagtggccttccaccagttactcgccctatttccaaagcttgttcagtgttgcaaattcgccggtggcagcgttgccatccggtgccggagcgcaaggttatttttttatgacaaatttgaatttgttggcattttgtctttgtgcccatttcagcgccggccatcccaatcactggcggcgccgcggccggtcccatggcctacggtggaggcattgtgtgaacagtgaagacgacaaacaattgcagaaaaataaaaacattgatcagagtgatcggaattttagtttttcttgtaaattgatgcatcgataaaatttatcagagtgataaaaaattatccaatcattaaaacggcatcttggctctatttaaggtggaccgcccatttgctaataacttttttcattattaaccaattaaatattgggctctagtgcactttatgagtccaatcgattgacaatcccgagtttttttacaataactttgtttatgttcgagctaaacctatctttttggtatcattcgaaagcacaaagtctaattaatgtaataatacgagaaaacaagagaattctaacatttcaagaaagtttatttatttatttcgtaaaaataaaaaagtcatcagaagaagggccaggggcgtatctagagaaaattttcggggggggggggggacccgacctgaagaccttttttt

SEQ ID NO: 3720 - DNA, 4457 bp, Heterodera glycines
aatcagatcatttttcgtaattgcctaaacgttgagattttatatattttagcttcgttagacttcgtactttcgaatgctaccaaaaagataggagttgttcaaacatgaacaaagttattgtataaagtcaattgattggactcataaagtgcactagagccattaatattttgaaaatatctttataggtagctcacaacattctctattagcatgcaaaattacaaaaaaattttgtggtgtttataaaaaaaaagttatgaccaaaaacctcaaaaattgactttttcatggctttttcgtcgcggttgacataacttcttttaccttgtgcatgatttatttctttttcacatattagagctttcaaatgatgccagatttgctaactttaactgacaaagaaaaaagtcagaataatacaaagttggcggcgccaaaacagttccacgccgccgaactaatcccgaccttacttaagtggaagaatgatgaatagggcgaggattcttaggtttttacttattttttctgcggctttaactcgacgagaaatgcacgaaaaacaccttttttgttcggaaaaccttcgttttaacgcccctatccgaccctagaaatccctattttggatgttcgcccctaaaaatccctattttgagtgttcgcccctaaaataagtttttacccctattttggcgttttctccaaaatttattaacaaaaatgcaataaaaacgaaaaatacaccccaaagaatcgaccaaaaaattttcagaaaaatataccccaaagaatcgatccaaaaaatttcgaaaaatataccctaagaatcaatccaaaaaatttcgaaaaaatatacccctaagaatcgacactaaaatgaaaaaactttctaaaatatatcttatttgtaactgcaatcagtgaataaaattgtttgccttaattttaacttatttacatagagaaaacagcaatttaaaaaattgcacccctaaatttgaaactttttcgcccctatttttgcccctatttcgcgaattttttgcccctatttaggtccctaaattggaatttttcgcccctaaaaatcctcgccctaatgatgaagaagagcaaaattggcataattttcagggcgcccggaaaatgcgtcagtggaaattttattgccataaaactaagttccttaggtttttgaggtaggtcactgaccacgaaacagatatccatttcggcctattccggacccgaattcaaacaaaaagtcaaaagtccaaattctcgaattttggttcaaaaatagcatataggctctctttcttatcaaaggattgatgggtttcagtttatttccgtacactaatttcgaaaattttgactttcgactttttgttcgaattcgggtttggggttataatcagggctgccagattaaaattttctaaagcctcattcggcaagcaaaaaagcctcattttgggtcaaaaagcctcatttttacaaaatttattcaaaacacgcttaaaattttatatttttgactgtccatgatcaatttgagcaattttttgttagaaataagcatttgggaaattttgagcacgaaaaaccgaagttgattttttgcggcacttttttcaaaaaatttcggggaataaggggccggtggtgccgataggggccgccgggggagaaatttagaattttgaccatatctttagcagtttttcattaaaaaaattctttattttgcgatttttctcaaaaaaccacaaaaagcctcaaaatttctcaaaaaaccacaaaaagcctcaaagcctcattttgaaaatttagcctcattgacctaccaaaaaaccacaaaatgaggctaaagcctcacatctggcagccctggttataatgaatgaaagaaaatgggggaggagggagagcttttgtagtcgcgaaaaatttggaaaatgcaaaagcgtacaaatgaaccaataaaaattagtataaaagtggttgctcctcctcctccacctttcattattattttccattcgccatttatttttttttcgactttttctcctgacaattccttcaaaaatgattctgtacttttttgtattttttctctacatcaaaatttttgctaagtaaaaattccaattttaatttgaattttgtttcctttttttcagttttatctccggcgactgttggctttgtgtgttcaatttgctctctccgcgtcagcttggctttggaattgcgatgatcagtcaccgatttgacttttacgtcgatgaacacttcaaaactcgcaaatggacattgggacttattcgaatttggagcaaaattggagagaatggcacgaagaaaatgaaaattgtcaatggctatggaaaacgaatgccaattccgcaaattcaaatgccacggaaagtcatcggattcaattacatttccatctagtaaaattggcgattatacaaatttcagcaaatttcccattcatttttagttacatcgaccaaaatgccatcgcttttctccgccattttcaccaacttttcgccacctgtccaattaatttggccatcgaaactgaaaatgaccgcattttggtgttcattttgcgcaacatttggccaatgatcggaaaaaacattcatttcatggaattgtccgccggaatttttcatcgttttcgacaatttgtcccgtcaattctcaacgattgtccatcacttcgctttgtctgtttcaattttcacaatctcttcgccgaatttccatgcgatgacaatgccatggcatccgatggacaagcggtggcaaaatggctgttcactccgcttcaaaacgatgtgccgaagatgtacaaatgctggttgaaaaatgatgattcgagttggtcgtcgaagattgaagcattcaaagcggtgatttttatttgattgatttaaaatggtcttctcctaagcaacaagtgtcacagctatcatttcttaatctaatttttccatgttttaggcttttgccaatgcttcatctcccgtcaatttcattgtcaccatttggttttcttttgcttcctccgttgtgccctttgatctgaccaacgaattaactcgagaacaattgacgttgaaaagaactgactacagcaatcgttttctgctaatccgttgtccaatttcgcgagacgcgagcaaatgggcaaaatgggaaaaggaagcgattgactggagaatttgcggtcaatgtaacagaattgagattcaaatttatgttgagcgtcaaattggcgacgggtaagcgaatgctttttcaaaaaattcaaatttaattcgtttaaattcttttaggcttctcgacgcaactcctggcacaagtgatcggcagcagaagtgaatgaatgaattgttgagaaatgatcgatcaatttgaattatatagttattgtcgtgatcataaaattgttcttttttgttggaatgttcaattttgtttttcttctttaatccttagagctttaaaaaatgccaaattcgtaacaaaattcgtttttgaaaaataaaatgatcatttttgggaagcagctgaacgacggcgctttccttcaaatactaagaataccaaacccattcaggaatacctgatatacatcgtaattgtcctattttgtctgttaggccaattgtccaattttttctggatagaacagtcgcgcaatttatgtgtaggcaaatcgtccaattttttctgggtatgccaaatggtccagttttgcggattcttcctggcctgctcattcatttttcgatgaatacgtcttcgttttctctgctgatcatcattatttttcgattccttgaccaattgtccctttttgttttggtcaatccaaacaccttacccattctgatcatttccatttttctccttctgatcagtggttattttcctgttatcattgacccttttttgttgttcactgtgaccctttttcttctgatcgttggcgattacagtatttttccaaattcacttcaaaagatgtgccgtgaaagtctggtaaatttattggattaaattaaaaaaatatattaagttccccagaatgttttatatctttttgcacttggcaaaaatttttttcttttatttgtgccgatgaaatttgcctaaacccaactcattaaaagccccagagattagataagagcctatagaactccttctttttttgtagacagtcattcgttacaataattttcacatccaaaaatgtttttggcccccaaaaaagtgcccattgaattggtctttgatctgagcagtttcattaaatttgatcgaaaatggtcgagaaaatgccgagtttgctttttatttgaccaatatttgttggcacaaaaccgatattggctgaagctgatcaaaaaattggt

SEQ ID NO: 3721 - DNA, 730 bp, Heterodera glycines
taaatccctaatttttttcttaaatagttggctcaaaaccgcaaaatttactcattttttggacattgtcggtttgcattgccccggaccccttcacaagaatttggttgacccccccccccccccccgctttttcatgtatgaccccgagagtcttgaatagcattattattcaatagaatttatccatataatcaaagtatttatttttgattttttgtttgaccacagttttgatgactacataccgtaacgtggttggacttactgaatgagaagcacagaaaatggcgaagagtggtggatggaaagaagcttttttgagagttttaatcattgcaaaatttttactttaaattcaaaaaagtccaaaatttgtgattttaggaaactttaaaaaaaaataattttaaggattgacacaatttgaattttcgaccttttgttcgaattcgggtccgggattcggcattggtcaaaatagatgccggatccatgatcagcgacccaaaaaacccttggaaacacattttcatgacttataaatgcaaaaaatattttttttcaaaaatggggggggggggacaaactagagtattaccgaaaattgtgccaattttcattaattttttttattccctcttctgattttgttggtccacaacaaaggttggtatatgaccagcagaggacttacaaacatatttggattaattttggtttggttgct

SEQ ID NO: 3722 - DNA, 3059 bp, Heterodera glycines
aaaaaaggataggagccgaccggagttgaaccggtgacctattgatctgcagtcaattgctctgccactgagctacgactccgttgaattagagattctcattttcctccttctttctttaaaaagctcctctaaagaaaaactggattttatggttaaagtggacgaagaaagcagaaaagggaacgatttccttctaatatgcaacttatttgttagctgagaaaaataatgaattatttattatattaaaaagacataaaataaataaaattaacgataaaaaaagaaaaatcaaatgggtggaataaaacaataaaatattttttatttatattttatttaattaatattaatatttatgtagttatttccgaatatgtaaataaataaatttatttattttttcttttatgcaaattaccagcataatttttgcgttttctttgcaatatctacagaaatcttttatgaaaataaaattttctcccattttttttatcaaaaaatattgtataatttaattatttttttgccatataattttaattatcctttccctcctcccccaaggcacgccaatcggctttcatcgaagtgcttagtcatgtgccgtcccagccctcgtccgatcaaacggtgccggatcgtccccgggctgttttggcaccgggcaaagatcgccccaactttcacattgaattgcgctcccaagagctgtttgtggggcagccgcttcgtctggagacaaaactgacgccgatcagcgacccgtcaatgaaagtcgctttctttctgaacggaacacccgtccaatcgagtgggtgtcgactgatcagtgatttagtacagatcaaccaagaaagatctttttcaggtgaccgtgtgcaagtcttataccaaaacggatttgcattgctttcaatcgccgaagtcactgaacaggatgccggctactacgtttgtcaagccgaaaacgaaattggcagtgccgaaacatccgccactgtggtggtcgtgccacggacgggcgacggcaagtttttggccgaaagcgaagtgtacgagcacgacgtggaagacatgcgcgagttgcaggtaaagaattgcaattgtgaaattaaaacaaatttaaatcgagcaattaaattagcattaaattcctttaaaagagcatcaaagaggccgagggcaaaatgtacgcgccgcaatttgtgcaagcgccacgcgactttaactgcgaggacgagctgggccagtcgtacttcgatgcgcgcataaagccaaccaacgacccgtcgctgcgtgttacttggcttaaggacggacaaccgttgccaaatgccaaccgtattcagctggtaattaataattaaaaatataattagcaattacttgcttctgcccttgcccaggtgaacaacttcggcttcgtctccttgaccatccatccgacttaccccgaggacgcgggcgtgtacagctgcatgctgaccaactcgctgggccaggcacaagcggacgccaatctgtcaaccatttcctccggggacattatgtccgacccattgcatgccggcgcactgccgacaatccaagcgcacgaggaataccaggtaaagtagaggaagcaaaacaaccgagactgggcttgacttggctaggacctttgaagagactcaattgcattacgtcgagattctcgtttgaacgagataaaaaataaatattaaaaaaaaattacgtttgaatataatttagacatctatcgatgataattttatattttaacttttcaggtgcacatgggccccatgtttcagcccgaacgacccgaggaattccaaagcgtagagcaggtagaggaatgtttaattacattaaattgcaaatttgctttttttttattacacttacataagtgcaatttgtcccacttttagcctcggttcgcgcgccctttggatggccaagttgaggtcgaacaggaacagccggtgcacttcgagtgccgagttcagcctgccaacgacgtggtgagaagggaaatgaaataagcattaaatcttaaaaattattttgccagaaaatggccgtccattggctgttcaatggccaaccgttgttcgccgcccaccgcttccggccaatgttcgacttcggctacgtcgcgttggacattttgtacgcttatcccgaggacagcggcacgtacacttgcgtggcacagaacgaacttggcgaagtgaggaattggaaaaaaaaggaattgattgctatattaatccattattcgccattccaggcccagacttcggtggaattgtcggtgaagccgaaggacacgctttaccaagacccattgcatccggaaggcctggaccggatccaggagttggaacagccgaaggacttcagtttgcccgaagtgccggacagggaatgcgacaatccgccaaagtttctcggcaatttgcaagacattgaatatgcggtgaacaaagaattggcaaaatgattttatttgatttttaaattgttcaggaaggcgatgacctgatcttcgagattaagctggtgccggtgaatgacccgactatgaaagtataaaaatgagaatatttaccaaaaactgagttaccgtaatcattcaggtggaatggttcatcaacggccaaccgttgttcaacagttcccgcatccatgcacagaacgatttcggattcatcactctgttcatcaaaggagtgattccggaggatgcgggccaatacgttttgagggccaccaacgaaaagggacaggtaccgtactctaaacggaggacaaaactcaagggcatactgtaattgcaaaccatcacaaaataccgtagcattcattgttttcttttttctgtgctttcattcctatgggacactttgccaatgttcaggcggaaagtgccagcactgtgagcattgtcggcaaagatgcaattctgtcggcaccccaacacgaacagtcgctgtccaaaaattgaatatctcgagggcttggaacaatacccgcgccaggaa

SEQ ID NO: 3723 - DNA, 3882 bp, Heterodera glycines
  unsure (1)..(3882): unsure at all n locations
tgcaggtcgaaaaaacgcaccagcagaacattccaattaccgaatgcatttgcttacaattagtccccacccttttttagcatttttcaaaatccacctcccccctaatgcttaataaacgaaaacaaattgagcatttaaaaagttcagtttaattatattttgtgattttaattaaaaaataaaacaatttcagaaaaaagtcgcattttctctgaccctcagcatccgagcagttacgcgcgcattcaggagatggaggcgccgaagccgctgccggaggaggtgcccgaaccggacaaacagtcaccccaattcaccaaagcattgagtgccagcgccggacatgtggccgaagcggaaagtgtttatttggaggcacagtacggcccattggacgacaacagcattgtggtgggcaaaacgagggggacataaaaaaaacattctcttgcagtgattaaaatcaaaatgagtcattaattgggctaattagagtcgaaatggcgattttataatttacagttgaaattatttgattaaaatgttaacaattccatttcgagcaaatattatgagttacattcagtgtgaatggcttttcaacggacagccgctgatgaaagcacatcgctttgtgctaagccaagactttggatttgcagcactgaccattttgtacatgtacccagaagacaggcaagtgcaaaaaggagaagtgagcccgcattagttctgctgtgaaactctcttgtttcggctcgagaaaatcgtatttttggagtctcggggttttggtctcaagcatcactagccctcatcttaattatgtataatttaaaggggtgataaatttggtcattagtgtccggaaggccgtaattgactgcaattttgttttcggtactactgatcagtgataggatagtctgctgatactgattctctgcaaataattgatatttataaagactgactgggaaggtattcattttcttgccactaattgatccaattaccaattaattactcgtcaaaataattactaaaataaatacccattaatgtgggccacttcagcggcacttacacgctgttgatccgaaacgcggccggcgagtcctcctcgtccgtcgagttgagctgcgagggcaaagcggcgctgctcagcgacccaatccatccacagtctgtggcgcgcatcgccgagttggaagcgccgcgtccgctgccggaagagccggcggagccggagaagcaggcgccgcagattgtcaagcagctgacggtggccacgcaaggcgaaggcggtccggccgagacgcaggcgctgcattttgacgcacaatacacgccgacggatgacaacagtgttaaggtgggggaagggacggagaaaactgtttttacagtgatcactgatcggttcaaaccttttttaataaagatcaagattttgaaaatgccggaacaaaatcaggaacaggaccagaaatcctgccaaaaattttgcgcggtcgctggggcgctctactttttaactcttggtgtcaaaatgaagataattagaacggaacaaataagataatttctgctttcataatactaatatccacncacggggcacattccctaattaaagttaatataaaaaaataaaatattgcattggttgggccattcatttgtcagattgaatggttcctgaacggtcagccgttgttcaatagcaatcgccatcatttgaccaacgatttcggctttgctgctttggacatcaatttcctcttggctgaagatgctggcgattattcgctggtggttacaaacgcagtcggtaggaatgttttggtttaattagttaattaattaattattacttttttactaatcaaaaatatattgccacgaggaattctcacaaaaccatttgcttaaaatgtgaaattaattcccaactatatgttaaggccaagcccaaacatcggcatcagtgcaaattgaaggtggcgctttaatcctggaggacacgcaacatccggaaagcttccgacgaatccaagagttggaagcaattcgtccggcagagccggaggagccggaaattgtgcccgaggcaccccaattcacgcaagagttgaccggacttgtggacgatttggccgacggcatgccgctacatttggacggcacagtgatgccgataacggatccgaagctgcgcatcgaatggtaggcttttgaaacaccaatcaatggtttgggggaccataatgaattagtgaaatgattatccatttggctaccagttattcaatcaatttatatacctattaattatattattttaaatagttattaattaattattgtaattactcaaatcacttctctccctcctactttaaggttcttcaacggacagcctctgcagtttagctcgcgcattcgcaccatccacgactttggctacgttgcgctggaatttgcccatcttttgcccagcgactcgggcacgtacacatgccgtgccaccaacgaagttggccaggccgagtcgtccattaccatcgaatgcgagacgaagcgtaacctgtacttggactcacaacatgaacagtcgtggcaaaagattcaagtctgatcaattactgatctaagaggcttgaaatatattcaaaaattattttttaaggaaatcgaaggccgacaaccgacgaaagagccgagccccgagttgcacttcctgccgccaactttcattgtgccgttgtccaactttgaggacctcgtcgagggcgacgtcgtccgctttgagtgccgacttcagccggtcaacgacccgacgcttaaggcaatttaaatttattttaaataaaaagtaaatattctcgaattctccgttttaaggtttattggacgtgcaatgaacagcctttgccggaagggaaccgttttatgtaaatgtccgatttttgaaaattaaatacaaaaatggaattcaggcctgcccggaaccttgacctcgtcacgttggacattctcacagtgtacggcgaggactccggcttgtacacgtgccgcgcagtcagcgactttggtgaggcacaaacgagtgccacggtgaagtgccagccgaccgacgcgcttctcctggacactcagcacgagcaaagctggcagcaaattcaggagatggagaacagagaactgcccgaattcattgtgccggaaccggagattgtggcgccgcattttgttgtgccattggcgagcggacagaacgaatttcaagtcgtttttggagctgatccaacaaataaacaaagaatcgattgatcgctcatttaggagggtgacccaatccatttggaaggccaaattgagccgaccaacgacaacaaattggtcgtcgaatggtttttcgacggccaaccgttgccgaatgggcatcggttccgcaaggtgcacgactttggctatgtatcgctggatattctgtacgcattcgacgcagactcgggcgagtataaatgcgtggccagcaacgagttaggccaggccgagtcgaatgtacagctccaaattgcgcccaaagggtcgctgttcaccgacccacagcacgagcagagttggcaacgtattcaggtgggaaacggcacttatagcccacaagtgaatgaacggtggcatttgcgtaggaattggaagcaccgaaagaagcggtgccggaggaggagccgcccgcgcccgaggcgcccgccttcgccggccaattgccctcactcgaacgcgttgagggccaaccagcgcactttgagacgcgtgtcacgccgatcaatgacaacaaattgcaagtgcaatggttcaaggacggagctc

SEQ ID NO: 3724 - DNA, 1542 bp, Heterodera glycines
cgaactggacaaggacattcgaaaatgttgagctggagcatttagggaggcattgtgcaattggttggccatgtggaaccggaaggagacccgaacatgacgattgcgtggttcctcaacggcatgccgttgcaaaacgcaaaccgattcagacaggtgacagagaaatggcagggaaataaccattttcaatttcccattttttcatctactcaattacaggagaaaaacttcggcgaggtggtcctgcacattttgcacgttctcccgcacgactcgggcgtgtacacgtgcaccgcatcgaacgcgcaaggcgaggcgaccacgtcggccaccgtcaaagtggcgggctatgagaagattttgaaggatgtgcagcacccggacagttggaaccaaattcaagtgcaaaacagaatttaaatttaaatttaaatgttttaacgtgcacagattttggaagcgccaaaaattcgagaggaaatcgaaattgaggaagtgaaggaaaagccgcgctttctcactcagttggaatccgtcgcggacgcgcccgagggcacgcccgtgcggctcgaggcgaccttccaaccggcacgggacaacgacctgatttggtacgaaatgacagaaccatctcgttatctaatcagctaaaagatcggattatccgatcaccgcgatcaatcaatgcaacttttgaatctttgatattttacacaccctaattagctgttgaaaatgttcagcacgtgggagttcaacggaagtccgcttggcgcttcgcaactcatacggacgcgcaacgacttgggatgggccgctttggacatcaggtggagcataaatcaacggccaatttggcacttcttaatgtgaatcggtataatagtcgtcattcagtgccgtcaacatggaccacgagggcgtgtacacgctgaaaattgtgaacagtgagggcgaagcggccacctcagcttcgattaaggtcgatggagcattgcatttggaaaatgatattaattaatatttttttagtcaaataactcttgagtttactagatttgcaagtgttgttttaggtcgccggagttggcaacattcttggcgatacgcaacatgaggagtcatggcgccaaatccaaatcctggaagcgcccttggaagtgattgagaatttatttgccaagcaataataattaattttttttgaagcgtccgccgtcgcctccggcgctcgaatatcccccgcccactttccaacaacaaattagcgacatcgaatgcgacgagggcgatgtggtcgaaattcgaatgccgttttcgatgcccgacgacgacccgaacgtcgaaaatccgaatgggtgcgcgaacggaagtgcccattggtccactggctcgaaagtacgcgaatcgcgatacgacattcggactagtgcgcatttgatcgtcggctacacgatccccgaggacgaaaggccggtgaatcttctgctactggggaaaaccagaaaagaatgggacctcgaagaaggattccccccc

SEQ ID NO: 3725 - DNA, 1905 bp, Heterodera glycines
  unsure (1)..(1905): unsure at all n locations
attttaaatatatttatttaaatcatttattaaaataactttaaataattttcccttccgttagtgtcatgcaaaagcgcccattatcgacgatgtccaacacgagcagagttggcagcgcattcaagagattgaggcgcccaaagagccgttgccggagcccgagccggcaccaaaagtggcgcccaaattcacttcgccagtgcttacgccgggcgaagtgaacgagggacagccgacacattttgagacgacggtggagccaattgacgacaacgaactgaaaatccaatggtgggagagcaaatatgaaatttaaagaaaatttattattcaaatttaaataaatttatttgccagattaatttaaaaaaattagatttatttctcgggtaattagggcctatccctccgccgatttctttcaaatgatcaaacgattttcttactgaattgctcccatgttttgaccaggttcgtgaatggagcacctgtgccggactcgtctcgtctgaagcaaattgccgactttggctgggtgattctgaacatcaacgacaccgaactgcgcgacgcgggcgactgggagtgcgtggcgaccaattcggtgggcgaagcgcgtgccagcgccaaactgaacgtgctgccacgggaccgactgctgttggagccgatcaaccagtcaagtctggcacaaattgaacagttggaggcaccgcgagcgggcccggcagagccggaggcaccggtgtacgaagcgccgacattcaccgcgcagctacaggcaccggacggactcgcggagggtgacagcgcgcacttggaggcgcactacacaccggtggccgacccgaagacgcgcgttgaatggtaaacgaagcggagaatttgaattaagggcaattaaatacaattaaaattaattaattattttttaaatttaaattctataagcaaaattcattttcccatggacaggtacaaagatgggcagcccatttaccactcgaacagacaacgaatggtcaacgactttggttttggcattttggacattctctatctgctggcacatgactcaggcgaataccaaattaaggtgctttatccgttttagaaatgcttatctcaaaaacggatttaattaaagggcaattaagcagaatttaatttttcaaatttacaattattttaattggtgctcatttgtcaggtgatcaacgaccaaggcgaggcttcgtcctccgtccaacttgaagtggcgcccaccgagtcgctgctgcttcagccgcaatcggagcagaaggcgaaggcggtcggcgacttggaggagcggttggccttccgtccgaccaaagaagaggtggcacgtgagggacgaatgccggtgttcgtcgcgccgttgagcgcgcccagcgaaagtgagcagggcgaccgggcgcatttcaccgctcgctacgaaccgatggacgacaatcagctgaagatacaatggttattaagctgtgccatgccatggcctttgttgactgatcggcatttccccgcaaattgcaggttcctcaacaacaaaccgttgctgaccgggtcccgcgtgaaaactatcgacgagttcggcgtggtcgtgttggagatttacccggtatacccggaggattccggcgactacgtgtgcaaggcgaccaacgcgcagggagaggcggtgacgagcacttcactgaaagtgagcaacggggggacaattgtatggtttttttgtccgatcacttgatcaatctgagaggatcttctgttaaagggaataatttcttcccgtcaactgatcaaaaaacgaaacccactccccttttaacaattatgctaatgttatgcaaatttggcacttttaggtgacaccanaaggag

SEQ ID NO: 3726 - DNA, 1854 bp, Heterodera glycines
  unsure (1)..(1854): unsure at all n locations
tccgtaccgtactccaaccgtatccatctgagcaacgatttcggcgtcatcactctgatgatcaaacacttaattgcgcaggtcattcacaactttgagaaagcattttaatcatattctattgctccttgctgttcaggatgccggtgagtacaaatgcatcgcgcggaatgccaaaggcgaggcgagcaccgcggcgaccatcgaagtgcagacactggtcgcgcaggaggagccgacggtgcagcaaccgctggtggaaacactggacgccgcggagggcgaatccgtgcacttggagtgccgcgtgacgcccatcaacgacccgcaactgcaggtgcactggctgaagaacggacaaccgctgccggacgccaatcgctatgtgtaagcggaacataaagcaaaaaaaataagaaaaggagaaagggcgaactgattggaagcgaagtgatcggaaatgcaatgggacaaggcgaatgccatcatttttcaggcaaagcttcgagttcggcttcatcactttggacattttgtacgcaattgcggaggacgggggcgactatgaattggtggcagtgaacggaaagggcgaagcgcgcaccaaaacacacataaatgtgatgccgaagccgggccttctgttccaaccgcaagcgccaggcagtcaggtggcgaaattgggctcaaattagtcaattttatttaaaaattccctatcgacggcgccgtagctaaagctttacgaatgatctgacggcgccgtcgtcggatatattttttaataaagttacccaatgtttctcttttcgcaggtggtggacaacttggagcaccatttgcgtcaattcaccaaggcacaattggctttgacagccgaagacgcttggcaaccaggcaaaatgatttaatcataggggggtcttccgacttttttcacttttgcgttttgggacggtgccgccagcggtgccaatattcaatctcattaaattcttaagaaaanagctcaaatttcaaaaaatcagagagagaggaagagaaagagagaaaaaagaccccattctgctgaagtataaatatttcataatttaataatttaggagctcaacaggcgcccgctttcaagtccgaactgaacaacatcggtgtgcaggagggcgacttctgccgcttcgagacccaattagcaccgatcaacgacccgtacatgaaagtggagtggtacaagaatgccaagccggtggacattggtcagaaagaaagagcctattaaaaccgattttggttggaaattcacctgtaattaaggcgcccgtttccgcaacacgctcgactcgggttactgttgcctggacttactgtacgcgttgccggatgacactggcgaatacgcgtgtgtggccaccaaccaattcggacaggtacacacagacaaacagtggacctctccaagatttaatagttccaatttccacattaggcaatgcttacggccaagttggcctgctcgggcatacagcacgtgctgacaacgccgcagattccgcaaggtgaaaagaaaaaattaaaaatgtttcaataaataaattattatttactaaattattaattaatttattattaattctttaatttaatttttcactatttaaaaaagggatactaaaacaattttataaaaaaacacnatcccttaaaccatttttgaagcattttatgactgtttcacgctttttatagtatcccattattacaaattaaattaaaattaactaataggccttcgcgtgaaggacgtgcgcaaaaatgtgtaccatgcgggagcgggtccgccgccggagcgccaaaagc

SEQ ID NO: 3727 - DNA, 10725 bp, Heterodera glycines
  unsure (1)..(10725): unsure at all n locations
gcgctgaggatagaaaatggcggcactgccngggttcagatctctttggactcgagcggggaaaagaattgtgcctttttgtcgctccccaggaaatgaatgccatttttggtcagaatgagcagtgtgtccggtaaagagcagttgaatagccaggtctaaacaaggtttcaaaaccgtatgaatttagtcgattttagaattcaataacctgaagcgactgcgatttggagtatgggttttcatccgtatttgtgccgacgcaaaagactagcgaatccaccgcacgaaggtcgtcgtcactttccttaatagacaaaagaataacaccttttttccacttttttaaactttaaaacaaacccaagcattgtagattcgagttgcgcgttctataaaaaagtttttgttcaccgataagccagccatagttgaaagaatcgctgctaaatgatttattaattataagaaacagtacaaaagttcatataacttatgaacgaatattcagagacttagacaacagtaaaagagtacaaaaaaactgaattgcaatggaaaaagctcgctaacaagtaaaaaaacaggttcaggatcaagcaaacagaaagaaatttgaattgttgttttcttttaaaaatatgtggcgttttgttaatattcaatccatttttcaaaaaaaaaatctttaaaattctgtcatggcatggtcattgcatgccatggaatataaggctcgtgaatggcgtatatttgttttgttggtcttacgagcgcgagctaattctttttttactaatgatacttagtttgactagattctgcaaatttgcttttctctttttaagctctgagtcagctttagttagcaacactaataattgagcacttcttagaaatattacatttacaactcacaatttccatatatatatgatttttaattttagaaattcagcagtccaaaaacaaatttcaccagcaacaccagcaatgatttaccaccgatttgttgagattggccgtgtcgtttacattgccaaggggaaggaccaaggcaaattggcagtcattgtgaatgtcatcgacggtaacaaggttttagtttttttttgctttctgaccaaatttattgttaggaataacaaagccgtttgtataaaaccaaaatttgttaataggacatgcggatttatttgattagaaacaatcgctattcaatctttttttacaaaatatataatctttcaggttttattggacggcccctcctcgggtgtgcctcgcggtgtttggaatttcaaagacttgcagttgacaaaattcaccctcccactgcgtatcggccaacgtacgaaaggagtgcgcgaggcttatgaaactgccaaaatcaacgagttatggcaaggcactgagtgggcaaagcgcattgatcggaaacagaaggtccgtttggaattctacagatagtttattgggtggatatggtagaatttctaattaactactcgacaaatttgtggcaaaggttttcctttattttgtgcccagtcaattttatcatcctcccgcagatttttttgcttctaacacttggctattttagtttacacgtccaatcagtgaccatccttagtttcttaggccatgacttttttttagcttggtcaaatcttaaatctggtatcaaacgaaagcttaaaatctatgcaacttatagatacaagaaaagagcaaatgttgaattaggaaaaaaaagttgcaatgaaaaacccgaaattcagcatttttcaaatatattcaagcatatttttgtctttagcccaatatttaaaataattaaaaattattttgctttttttaaatctttgctataaacttggtactatatttaaattccatttaatgataaatattgcatttatttacaatgcctgcatggctcagtggcaaatcctttgttctttccttgggttcaatttcctttacgtgccgtttttcccaatgctttcacaaaagcaccgtatgcgcccttaataatttggcgtttttcggtcgtcgcgaaagcgaaattggcgcgaattcaattgggtgagacagaagtcgcctaaattgggcttcacgtctcaatatgaattcgtacaatcttttttaaaattacatttaaattattctctcgttttaagcgtgccgggctcaacgacttcgagcgcttcaaagtgttcaaagccaaacagcacccgaaacccgtttggtccgcgttgagatggctaaactgaaaaagatttcgaagccgacagcgaagtaaatgactgaatttggcctgatcatattttgaacacacaaatgccgtcttttttgttgatgaaattatttgttggagttaaattgttttttaattcaatcgtgagttgataatgcgaaaaagagggtgttgtaatttcaagacttgtatgcaaaacaggtcttaaattaactgacaatatggttcggattgaatgtcggacagacagaaatgagtttaagcttcgacgcttcattgaaatgattacattgggggtagtcagtcagcggccaattttgcaaaagggtaacggctatgtgaatcggcgacctttttgcttttaaggacctccgaaactattttttactaaaaaaaaatagcccaaaaaattaaaaaatttggtcaatttttggacaaactcttaacaaatccgacggtaaaaagttgatcggaaatcaaattattaacggttcataaatttgactatttttttcttttcaaaaccacttttgcggtggaatttttcaaaaaaactaggaacagggggtccggcggtccttatcagggatggcattccgaggcccaaaaaatgtcggaaaccggaagtctttccgtgccatacccatacctggtgcctatcgacatctgcgagaaattttatgaaatttaatgcgatttgttaacagattttgtctaaaattgatcaaatgacgcatttttgactcaatttctacaggattattaagtagggttgcacccccgaacgtcggggttagaaaagtcggggttcggggttgtcggggccagcaagttcggggtcggggtcgaccaaattgttcgggtcggggttcggggtttttaaatttttaccttgtgccatatagtcaaattataatttccataataaagttttatttgtttatatttatttatttttttttatcataaatatttttgtatgctttaatatcttgaaaattttaaaattttttattttgtcggcaacattatgtctttttggcggcgacatttctggtgcatcgaatttctatattaataaatgaaattttgccggtttttacaaatataaacatgtgaaaatttaaatttttcccaatccggaaaacggtttcggatccggcaatttgaaaaaagtgaatcttattcaaaaaatgatcaaaaatttaataagtaacttttcgcatttgcaaatcaatgtttcatattgttaaattttcttctttcatacggcctgccaaatgtgactttcttctccaactttgagctgatcacggctcagaatttccaggaataacttttgatcaattggtaaaaaatcatccgatttgatcaatttttccatgttattgtcaatgtaagccaagcaacgaccagcaaagtcccaaaataaaagtgattgaaattattatttataattcaaaaattaatttttgtacattttcttgcagaagacgagcttcggctaaggcaaggaaaacatttggcaatttcgaaatgggaaagtcggcgaatgcttcgatcagaccgatgatggcatattttttggctaaataataaataaataataattaatccattggtgaaataaattttaatttttgacccgcataaaacacagccattgcattttgtccgtccaaaacactcaaattgtttgtgtaaataaagcgtaacatcgccttaaatggcacggcacaaatgtcagtgaccaccacagggttagaaggagcttaaaatgaaaaacgaaagtttaatttaattaaatttgatttaattgtccaattttcgtacaattccccgccattgtcccattttgagagtcataagcgaacatcgcttcgcacacatccgaggcggccatcagaagggttttatgtgccgcaatttgcttaaaaataaaaaaccattttttatttggccattgcaccctttgtataaaacatgaatatgtatgtatacagtaccaaatacaaatcattttcaattgtacagtagacactgaaaaactttgtaccgtactaaagacaattcctgtcccgattaattattattttaattgatatattttttaaatcgccctcactcgcctccttttcttcgtcttctgcaaccaaaaagtaaacatccgcgccattgcccgtgttcaacaaaagttccaactgatcaaccaacaattttggttttggcattgtgtaaaaacaatttcggccaaatttggaattaaaagctgaaaaactttaaaaaggtaagaaacaaaattattagagatcggtattttgaaaaaagcctggacctggattccatgttggacctggacaaaaatccaggaaaaatccaggcctggacctggattttttgaaactcattttaaaaatcaaaaaatgtttgaaaaaattaattatttgcttagaaaacatttaaaaatatctgatttataataataatgtgtttttaaatttatttaatctttttttgaaaacttgaaaaaacttcggtcacttgaaataataaattctaaaattttgtccaggaaaatccagttttttcctgtttgcctggacctggatttttttcacatttgacctggatttcctggacgaaaatccaggtccaggaaaaatccaggttgccgaaaaatggcctggacctggatccaggtccaggccgatctctaaaaattatcaagtggcgaaaagttgatgagaatctgaattaattgaaggattgggagacaaagtttggcgggaagagagtcccgcgcagaaatttcgcaaattttctaccagaacccgtctgttctggatgaattgttaatacctggacacagcaaattcaatttgtaaatttaaaataattataaatggaaaatgttttttttaatttgcccaatgatttgaggaaaggttttttgagactaaaagtttggtgttttttttaactttcgtatcgacgaaaaaactgcagaaaataaatgtttgagaaaaagtaaaagaaaaactcagtcaatgcaaaggatgagagaaaagaaacggaagagacaaaagggaaaagaaaaaaaggaatatttgtctgactaaggcattttatgggcagaaaagcgggtcaaccaaacaaaccgcgaccgaacgtgggtcagccgcggcggcgttgcgagccaaaatcggccagcaaaaaaccaacgccatttgagtcattaggacgctattaatgagtaaataaaaatacgctaaataaaataggataatatcaaaaactttaataacgaaaagatgggtgaaaagtccgtagaagtgaaaacaataaaaaaaacacttataactttgtcaaagatcttaagaaataatattggaaattctcaatgtcaatgttttcccgtttccgctcttcgtcgcttttcccttaagccttgtatgcttctgaaataccgatttcggcacgaattttcagtgcctttccaatcgcccagccgatcccgaccaaatccttaaattttgatacatttcaaaagcatttcatttcttggcacctccacgggtttttcgataggcgagaagggataaagcatccgatctccaatggactggccaaaaaaggtcctcttttgctcatttcaaccatttaatatacccaattaaattatggaaaaatatgaaccaaatcttgcaattgacaaaaaaggcggtaagccatttactggtaaagctaaaataaaatttgtcagtaagttcattagcaaaatgctcacttaaaaataaacaaaaattaagcattcattgacaaagtaaactcatctcaaatttgccgaaatcagaagagcataaggaaaaagatttataaaaaaagacaaaaaggctgtcaataattaaccacaattaaataatgtcagaattttgtttactctccaaataatcatttgataactttgaccatcgatcagggattgatcaatcagatgaagctgccacattcttccggcttcgtgtcacaacattttcgcgcattgcaatggcatttagtcgtcgctttgtggcagtagcaaatgtcgtccaaatgcattttcttcccgcactttttgcagacgaatttcgactccaacgcctaaaatggaaatattttattgtacaaatttcaatttgaaaattcaaaaaacaaaacatcttattcatcagtgtcagcccaaatatcctttaacaaaaataggcccattaaaaaaagtagcgggtcataaaaagagaaaaatggacaaaaaagaagccaatttgggtttttgaacataatttaaaaaaattagtggaagcttaagtctcttggtaaattttttgctagaaaatgttgaatatttggtgcctttttccattttttcgtgccttttttgccatttttgtatttttttatgccttttttcatatttttggtgccttttttaggtgcctatttgagaaattttcgtgcctaaaagtccggtctctaattatcacccaagtttttgaatgttgttaaaagtagttttttaattttagtgataaatgtttgggtgataatattatacaataatggtggaaaaattactgtcccttggggcccagttggcggggcccagttggttggggcccagttggcggggcccagtcgacccccaccgctgattcccaatccctggtcccggatttttcaaaattccgggctgaatttttaaaacttttttcccactttagttccacaaggtgcccccaccttcacacgcaagccacagattttgcaaaaaacatcagactctggcgacccggccattgtgttcgacatcggatttcaggttaaccatttgtaagagaatacaaaaaataactttgatcctaaaaactcggccaaccaaacgaacaattgtcaatttttatgatgaaatttcatgttgcgctacgttatttttaagaaaattctagaagatatttttggaaaaatcgctagtttcattttttttttaaatttttaaacaaaaaattttaaatttttttttcgagtttaaaagatatgtgggcgagtgaaaacgaacgctttccaaatttcttgattcattcttaaattaatcatctcattttttatgcaggctgaccaaaacccggaagtgatttggctgaacccgaagggcaagaaaatgaaggagtccagcagaatcaagtttgggttgacgccggacggcggcgctaacacttacaccgctcaattggagttgaaggtgaccgaaaataaattttaaaaaaacttgggatataatccgaataatatgcaaatttttattctaaaatttcaatttcttttttttttgcagaattataaggcaaaagacagcgggacgtacacgtgcaacatcaaaaatgacgcgggagaggcgaatgtggagctgacactgaacatcgagggtcagtttaaccacaatttttttaaatgactaatgacacaacatttaattatcggtgtgtttgggagtgaagtgagtgaaaatgctttatctaataccaaaacaacaccccgaagggttaaccccccccagactcaaaaaatttcaacaaaaaaaagttaccacgtttttcttaaaattttcgtttctgacaactcactaatccgtgcgcggtttgaagcttaaaacccgattaaaccgttcttccaacaatctcgcaaagtgttgatcaatcccctactggaaaatcaaaccctgctaattaattgatcatttctcgcaatcgcttccagccccttttttgttttattaaatttttgccaattgcccatttaaaaacagcatttttttttgttcgttatttttactaaaaccggaatatgtatcaaattgactttattttcgataatttttcaaatttaattttggtgaaatttcactgcaattctcttctagcagtactttacttttttgtaattttgggcaaaaaaaaagtcttgcatcctaaaaccaattttttttttaaatttcttcccctgaaataaaaaaacggttttcccgcaattttagacgacgaggtcaagcaataagccagagaacagaagagcgcgcaaactctatgcagtgtttaaaatggtgctgtgtgaatgctgttgttttacaatattattcatcacattattattattttatgtgtatgccgtgtgagtgtgtgttggttgctctctcattcttttatcatcatatctcttctattagatttgaatttcaaaatgataattaatttattttattgtgcaaatttgctgatcgaataattattgcataatacatacatacaataactcaacatattgttttattttaaattataatgaacccgattcaattaaaataatacgattaatgcaattggcacatttctagaatttttagtgggcccaatgaaaaaccataggtgaattcttattagttggtagttttacaatcgaaaattacatttagtataaataacaatctatgatcagcagtgaccctgaaacattaaaaatcaaatggtcgcttttatggtttttcttcgggtccattaaaccagggtgccttaattatgactaatttgatgcaccgaaattctaaccgtttgtgtttaacaatttgacaaaaaaacattatttattttttccttgttaggaccattggacgatgctggcgacgacgaaagtcaagcctaaggagtaaattgggaaaatggagaatttgttgaacgatgccgagaaaaaatttcttgaaaaaaatctgtttttatcatgaatccaacctaaggcatttacacatacatttaatattttgtgcccaagataaatttttctttctcatccatcggtgtaatctcatcaatcaatcaattcacttttttttttgctgtcgctgatcactgatcaccactcggcccgggcaatccgtcgaaaacactgaaaaaaataaaaatgagaaaattagcaaatttttaaaattgttcacccattgttgactccgtcgtctccgatgcaaatccaaattttactgttcttttgccctcgaatcacttcatcaatttccatcatccatttttcatcgtctgctgctgcaattgaacaacggatcagcttaaaaacattcacaaatttttttgacagtctcaatttctcttgagtgaattcgtttgtgtgttcaaatggcaaaacaacaggaaacggaaaggaatacggaaatacaacgcaaatgctgaaagcaacaggagaagaagcgatggaaaatgcctaaaaaaaaaaaaagggaaaaaacgggcaatcgtaaagaatgggggtccctaatttaacttttttttattttcgctcaaaatgagtattgagggttttcgagggcgctgatcacggatctgaactcggaattgcccaattccgaaccccggacccgaattcgaacaaaaaagtcgaaatttttttccaaacgtacatttttcctgggtaaaagctttggattcgtttaacaactatttatacccggaaattcccggttttcccagccaaaaagtcccggtttttcaacccgaaaagtcccggtcccgacttaccctaattaaaataatggataattaccgctttgatttgttccactgttgtcaaccattggtcaaccgacgcactcacaatggtgacaagcagcagtttcggcaaattgtcgtggcgtggcgagaacagccatttggccaccgcttggccatccgacgacgcattggcagcaatgtcgtcgtcgtcggcgggcggaaattcgggcaaaatgtcgccaatgaaaccgacaaaacgaagggatggaaagttgaagagaatggacgcgtccaattggcgcatttgacgaaaagtgtttgtgttgaaatacatcacacgaatggtgtcattgagcagtgtccaaatgttgagcacaacgcattccggaatgtgaatgcttgcagtggaaaggtcaaattttgtttcacatttgctgaaaaaacgggcaaaacggcgaaggaaagtgagcacattgtggtcgaagaagctgaaaaacagaggagggcacgtgtttgatggcacaaatcaatttacaaattcggcaatcctaaagaatgtgggggtttctaatttaacttatttattttgtgctcatacataattagtttctgcaggttatcgagggtgctgattatgaatctgaacttggatttccccaatttcgaactccggacccgaattcgaacaaaaaaaaaaattttttttttcaaaaatacacgttaaaatcgaccaaatttacaagaaaattgcgtattttctattcaattaaataattggagcattgttttgcatcaaaataaatagtggtcaaattaactcgaagcttttccccagaaaactgcattttgaaaaaatttcaattttttgttcgaattcgg

SEQ ID NO: 3728 - DNA, 1652 bp, Heterodera glycines
  unsure (1)..(1652): unsure at all n locations
tgatgcaaaataacggaaagaattgaaaggggtcaatttttatccactcaaaacattttaaaaaaagttagggccaaaaattcccaatttttcccctttttgaaaaattgccaaaaaaagctttagggaagttgtttaaaatttaaaaaaggatttaaacaaggatttcctacgggataaactatgctggaataattttgcatgtgttcaaaaaatataagaaaatcttttgtccaaagacaagttttttctccttggccttgtttttcagaaattggaatattcgcccataacacaattttggaaacttgtgcgattctgtaatttttttatattatttaagggcataaaaagcctcaaaaccccgatggaattattttggattttgtttttgactttcggtttggccaatagatttgaaaacttggccaaaataaacatggccaaaaaattttgttttttctttttcagaaaaatttctttcaggctttttcttgttaagctcatcaaatttcataatctgaccaagttttaagtcgttttgacaattttaactcaagttatggacgttggtgtaaaatggtagccaaattttgttgaccttacccaattttttggactgtaactttagatataaaaggacaaaatcaaaatttttggcaaaaacatgacgagaacattcagataaaagaattacacacaaaaaagacataacaaacgttaatcaagtcttaaaaaaagtcattttgaaaaagcgcccttttttatgcaacgacctagtaattacatcgcttttttcatttctttctccgcttcctttggattgtgcgacatttttttggataaaaaacaaaatttaaaaataagtgaactgaaaaaaagttatcatatgtacataatacatatgttatgtgcagggatgcgatttttaggctctaaaactgctgccaaaaatatgtatattcaggttgaccaagttttttttttcttcgaaattcaggaatgacctttttttttttttgctttcagaaccgctcttttcgcggcgcgttttttccaaaacttttggtgaaaaatttttgtgatttttagtgcggtttgttaaaagattttatgactatgttttgcgcttttaagccaatattttatggaagaatggatcgatcccaataaaatatgacgaaataaaaaaagatttttataaaatgctaaaattggtgaaattataatttacaaaaattttccctttcaataaatttacattaaagcccggtaaaaacatttccggttatttatatgattttccaaacatttccggttattgtataaaatgatcccttttcgaacctttccggttatttatataaaaacgatcttttaaagcattttccggttatttacatgattatccgaacatttacggttatttgtaaaaaaaaatatgatttttcctaacactttccggttattgtataaaaatgatcccttttcgaacctttccggttatctatgtaaaatgatctttttgagcatttccggttatttacatgaatttcctaacatttacggttattggtaaaaaaattatgatttcagaatttacggttatttaaaaattatgattttttacgaacatttccggntatttatat

SEQ ID NO: 3729 - DNA, 1077 bp, Heterodera glycines
  unsure (1)..(1077): unsure at all n locations
aaaaaaaataatggttttcggaccatttccggttatggtataaaaattatgattttttccaacatttccggttatttttataaaaatgatcctttttgagcatttccggttatttacatgattttacaaccattatggtatttgtaaaaaaaataatgtttttccgaacatttccgnttattgtataaaattatgatttttccaacatttccggttatttttataaaaatgatccttttttgagcatttccggttatttacatgattttacaaacattatggttatttgtaaaaaaaataatggttttccgaacatttccggttattgtataaaaattatgattttttccaacatttccggttatttttataaaaatgatccttttttgagcatttccggttatttacatgattttacaaacattatggttatttgtaaaaaaaataatggttttccgaacatttccggttattgtataaaaattatgattttttccaacatttccggttatttttataaaaatgatccttttttgagcatttccggttatttacatgattttacaaacattatggttatttgtaaaaaaaataatggttttccgaacatttccggttatttatatgaaaatgatccttttttcgactaagggctatcagaagatcttaaaatgtttgcactttaatagccctcttcttctcctcctcttcacccaaacgtcgtgctaggcggtgcggtgcatctatttgctcttcgcattggtcagttgaattgtgttgcgagaggagggattataaaattggggcagctgtcaccacagcctccattagtagctccatttgcattcctaccataattatttgctcttttcattcaactaatttgagatcttgcgattatatttatctgctggttgagcttggtcgcctactatttaaggtcattccttgagtcattgctttccatgacaaacattttcctcttaaaaagactaccagttttttaaataaatccaaatcttaactcaanaagctgataagcccaaaaantattaaacaattaattattaaagaaat

SEQ ID NO: 3730 - DNA, 5390 bp, Heterodera glycines
  unsure (1)..(5390): unsure at all n locations
acggaccctccaaaagatgttttattttttgngtttttcccttggctttttgtcaatatttggaatttttctttgtcacgtgaataatctaatttagttagtttaaaatgtaatatgtattaacaccattttctttattttttttatttgattcacttttcaaattaatcaaacactttcgggaatatttccgcaatttcctctttcaattggcaagaattaattaattgcaaattaattattcttttctctccaaattccaattatttttccttttaggcgtctttagcgtatgagaaagaaaaacattttgttaaaagtttttcaaagaatgtatcattcgcccgtccatccatcatttttgtttcctcgttatattccgaattcccccaattgctgctggtgaaatcgaataccgtcaattaactaattaattagccactgatcagcaggtggtggcggtggagttcatctcccgtcgttatatttcgaaaagcgatttttgactgaatgaatttgaaaaaagaaatattgccaatccaaaaaagaatggggagcagaaaatccaaatttaatgggtcgctgtttttgacgcaaaaatgggaggaaccaaaaatcgaaaagtgaaatctgtcataatctttttggtcgcctccgccagttaaattgaacgaataaaggcaataattctgtcatattaactttcacattcgcacccattgaagaataaatacattaacatttgttctttctgctgcggtgtcatttgtaattttggaaaacgaaacattccaataaaaaagggtggcgggtgattagcaaatttggggagaacggggggagggtagagaaaatggcaaataacaaaaaaaaaaattttggcaaattcattttgcatagcaaagtaaactgatcagacaatcattggcatatggtttgccgccgccgtaagtccggttcacattcattgccaaaagtgctgagaatcagtcagaatttgcgacttttcccctacaacagacagataaacagtgatcgccaattttgtttactctctccgcctctgtcgcccccctgcccacttttgttggcttttgcgtgtttttcagctgtgtattgtcagcgcgcctttaaatcctaattttcgaccgccaattcattttcattccatcgctcaaaatgtccgttcgtccaatatttttgtcccaatgattgcattatcacgataaaactggtggcttggtgtcaaaatttgcaatcaaactcaaattcagcccatttctctgttcgcgttgccgccgcgcctttcctttcgtctgtcatttttttggagcccgcctgggcatacccccaaaaaccctcgtgcgctgttttttctccgttcccgcattttaaaatgtcactgccatgcgcccccccccccctcccattttcgcagccaaaaattctttccgctcgtccaaaactctcctccaaatgataccctcttttcccgccctttccctccacgtctctctgtttctctcgtcgctctctccgtcactctctctctctctttccgttatttctgttcacttttattattattaatatttattttattatgatcgctgttactataaacatatgcgttgctttgtttttgtttttgttgatatttcaaccgtagtaatataaccataaaatagtaataattacatgattttcgcgttccctccccctcccctccccccgcctcatttgtcgaatcctttcccacttttgtttttgctcctcgtggttttcgtcgttgcgcaagcgatcgtttggccctcctcgtccaatcctctttccccttttttcaaatttcaccaattatgtgcattatttatccacacattcattattattcatccattacaaacaaaatcattcaatttaatctccaaatggcttaaatccgaaaaaaggaaattattccaatttaaattacaacttaatgacagttgaaccattattttcaacaactattattaaacgggttaatcagcaattcgttgttatctctccggcaattaatataaaagcaaaaacttttgacggtatttttctctcgccgcccctccctttattttgaaggtgtcactttttttacgttggtccaattgactttacaaacttattaaatagtaaacgattacctgaaccgtcccccccccccccccccccccttcagcggagtccaatgtccgtcgacccgcccacccaatcaaatcactttaaaaaatcgcggcagtgttcccccgcacttttcacttccttttccaagcgctcttctccgtgttgtgacgtgtgtggttggttggctctgctttccttctgtcctcccctccagcggcccatcccctgcctttttttcgtcgagagtttgtttgcccccttccaattccgctctctagttggttggttggcctctccggaagaggagggacacggactcaattaaaaagggaaaagggggggggcgaagggtcggtcggtcttttattcatcaaagccattactataaatcccgtgatcccgcgcgaaaggttaggttttgtgttataatcacaagggaccaacaatcactgctttttccgctccttccctctccaattcatccatcggaatcactcgtgaaatgacattttcatcagaaaaagcattattagtcattacaaaagaaatgttaaattttaattttgatgaaggcaataataaaacggagatgaatcattgaggtggagattttgagtgtttataaagagaacaaaggcactcacttcgaacattttcattgggtctgcttgagggttgaaatttccgagactcgagaccgagaaagaaatgattctatgatagtcgagaacaagaaaccgaaccgaactaatcctcttattgttacaccaatccaagccaaaaaaggctattgttagagaacacttttttataaagttcttgtgatttttaaaatttgatatattgtgtttttttgcgtattaataggataacgatgatggggcggagggacggggataaataaagggggggggggattttgcgccctaagcctacccacaaaaactgctctatgaaatactatcataaaaaagaaaacacccattcttatgtatgttttactgttgaattatttccatcaaaaaagtatttcgttgttactaaatatagtccattcggaagcaatttttctcatggtgcctgtaatgacctaaatccttagagcacttcagcaatgccaaaagcctttatctcaaatggatggcctataatttgagtgttttttagcggtgttttcatccgtcctttcccatttgttccatgcgtttattccatgcattcaccggtgattctccggttaacaagcagtttttgctattcgtcatttttctgtgttttgtcgcaacggcagcggtgggaccgacgaggagaagtgcaattcgaaatgcgccaagggaagcgaaggcggacgaagcgacgccaaagtgcgacttgggagacatcgagctgaactcggaggaatttgtgcacacgtgcgacgaggacaaattcgaaaatgctaacatttactgcaaggggaaactgctggaggcaaggaaaagcggattaagtgtcattcaggaatcttgaaacatttttaaaatgcgaattgagaactgaaaatcaaaccattgaggggttgatttatgttataatataaagcgtttttttgaggcagttaattaccaccaattgttggatgacaatgactcgaaggactttgtggacagaccgttaagaaggaacgccagcgaagtgctacgtcaattcgagcagaaattcggaggacaaaacgaatcggcgagcagcatcgacgtggaagaattgagggattttctcgatgaaaactttgatcgcgcaggaggcgaactcaaaaagtgggaaaacggacgaatcattgggaggggggcaagcaaagaaaatgagaaaggggaggaaaagcctaattgataaaatgaaaatgaaagttaatgagtgtgttttttgaaaggtgtgatccaaaggattgggtgcagagtccgccagagttggaacggattcgagacgacacgctcagggggtggcgatgggagctgaatacagggtggaaggaactgtgccgagtgattccatcgaaggtagaaaaacaatttaaaatatggacatggaacaccttaaattacaaaacaaaaattcacagataaaagagcatcgggaccggcactcattgatctatgtgccgaagcctttcattatcccaggtggatttaactaattttgcaaattattagcataattaaggcgggagatttcgagagttttattactgggatgcctattggattgtgaaggtgagtgagtgttaattgttaatcaatccacgggtggttaaaagaacaagcgaattgttcaagggactgattgcttcgggaatgacagactcagttaaatcaatgatcgaaaattttgttgtgatggtcgaggaattcggttttgtgcccaacggaggacgcatttattacagcaaacgatctcagccaccctttctaacaatgttcgttcggatattgagtgcattgcttagtaattagagtgttgttcaggatggtttacgagtactttgaagccactcacgactacgaatttttaaaacaaactgttcccagtttggaaaaggtggttgatcagcggggaatttaaaacagaattgcgcaaatgccatttgaggaattggcattttggcaaaaccaacggactgtggacgtcaacatggacagtcgcacttataaaatgttccaatatcgtactgttgtgaatgtgccacggtctgagtcgttctgtgccgatgttatcgttgcaaaacaaaagacgaagctgaaagacaaacgccgtttgtggaaggacatcgcgtcggcagccgagtccggctgggacttcagcagtcggtggatgagcgacccggacaggccgagcatgcttgacattgagacgacgaacattgtgccggtggatttgaatgcgtacatttgtggcaactacgaaatactctcgcatctgttcctccaactcggcaagacttgaatttggaaatgaaaccatatcaacgaaggaaaccgacggacaaaaagaacatttaggcaatgattcgaaggcattggaatatcacaacaaacattatctgttccgggaggcttttcaacgagtgttttaccgtaacaacgacatggagacggcgggatggtacgactacaacatcaggtcgaacagtcacaacactcacttctacgccacatttgccatttccgtgntcacgcgctgttaccactcatcga

SEQ ID NO: 3731 - DNA, 1393 bp, Heterodera glycines
tctttctgtccaattccgatctcttcggtacatttcgcaattaaaacaaaagttcaccaatctctcatttggttgtggacaatgaaaataaaataaattgtaaaattaaagaaaaattgagttaagtgttacaaatcgaaacttgagcgtcaaaatgacttgcctttttgagtttggactgtttgtgttcaaataatcttagcaatgtcaattaagatttcatatgggagtgccagcaaggtcacactttactaagtgtccgatatttgttgtcgtaaccaaccggcacaaagatgggctaggaatcctgggacacttgaacttgagaagaggaccaaatttatgaattattaagttcttcttggcatttttccaaaaattgcccaaaatgttgttgccaaaaggtcctagcccatcgcagtgtccaatttttggccccttttaacggtcactcttttcagtatggtcaacagtgcgcaacaatgggactatcccaacggatggccggtcaaatcttgcttttttattctcacaaataaaattgaccatttcgttttgctttagccattgaatcatatgatcatcgaaggattgcgccgttcagacaacaaactgtagctgttcttttttatgtaaatcaaaattaatattgacgcccctttaaccgacagaatgcagaaaaaggcgttttggttggccaccaaatgggtgctcagcaattaccgggtgtaccgttcggaagtgcccaggggcaacatgtgggagaaatacgcggtgaacaaattcaagccgaacaaaggcgttggcggtgaatacgaagttcaggtaatttgagggggaggggagggatttggtcgtcgcaattggacttttcctttgtcagtccgggttcggctggtccaacggagttatcctggacctgctgaccacctttggggatcggatggagttcaagaacgacttggaggaggaccccagcgcagtggccaaggaggtgatcaaggcggagccgcccaatttgcccacgcccaacccgaacattacacccgtactcaacggacccttcgtggcggttgggccgcagggcgaaggcattggaattccgaggccaagcggcgcccttcgaacagcgatggcacctcggcacacattgtgccgatggttgtggtggtggacaagcgtactcatggcactgctcgtcactcgcacaattcattgagtagcaacaacaaaggggacgggacaaaatttcgccgccgaaattacgccgccgaaatttcgccgccgaaatttcgccggacggaatttcgccgagggggaaatttcgccgccgtaatttcgccggccaggggggtgtggagacaaaatttcgccgcaaaaaaataaaatcaaa

SEQ ID NO: 3732 - DNA, 3956 bp, Heterodera glycines
gccgccgaaattacacactccgaaatttcacttacaaattttttaagaaaaaatcatagaatttcttataagaaaatttaaaaaaaaaattagaaaaaattttaaggatttttttttgaaatttatgataaattagtaagttttttcgaaaaattttccaaaaaatcactaaaaaattttttcaaaaatttttcattggaatttccatataaaaaaattctaagaatttttttcttgaaaatttccaaattttttaaaaaaaatttaaaaattttccaaaaaatcactaaaaaattttttcaaaaatttttcattggaatttccatataaaaaaattctaagaattttttcttgaaaatttccaaattttttaaaaaaaatttttggcgaaattatgtcccggcgaaatttcggcggcgaaattatgtcccggcgaaatttcggccggcgaaattccgtccggcgaaatttcggcggcgtaatttcggcggcgaaatttcggcggcgaaattttggggtgcacccacaacaaagcaataccaataaatcaaacccacacatttcgaaatgcacttaatttacactcacattcaccaaatattcatgcatatcatccttttcattttgttttttcttccattttgttcccttttttgtttcccatttccaaattacggaattttaatatttaattaatttcccttaaatttgtttgtacgtatttttgtatttcatagtaacaatttagtgaataaaaatgtaattattatcagttttgaaatggaattccccaccttttccgtgctttcccaacactccgaaagagaaggactcgtcgatgaaaatgcgcactttgtgtcgccatttcagctcgatcagtttgggcagtgggcaaatgtcgcccgaatttgtgtaaattccttcgacaacgatcaaacggcgaatggacgctttccttttcggattctgcgaaaatggctttttgctgaattctacagaacaaattcttacaagtataaaaaatttaaatgggtttgctaaacaatctaatccgatataataatccgaattttggtgcggctcaattggggagggccgtcgcgcggaatgcattccctcggcaattcttttgtttcccctttcccgttctccccaccattttgtctttctcctccaactcgaccattttgcgctccaagtccgccatgtcattgtgttcaaaccataaaatgtcacttctcgacgccatcagtccggattgtatggcgaaattaacacctaaaaacatggcttttattttccatggccaacaaatgattgggcgactcccggggacctttgtccgcaaaaatgacatcgcccctccttgaataagctgggatggcacttgcgatggtggggaatccgtagctgtacagaatggcctcttcacagcccatgaactgtcaatttgaatgacaattacggtatgacaatacagtgtgaaagtgccgccaaaacgaactatctgcaaatttttgctttgtccctacctcagccaattccctttccaagtccaaatgtacgtccaccgttccgtagaaattcctgggcccgcatgagcccacgccgtatttgaaaatggcatttttggctacttcctatgaaatggaaagcaaaacaaaaatatttttaaataagccatgtatgaacaacaaacttcaattttctggtttccgataaagccgaaaaaatcagtcgacgccaaattgacgcatcgtttgtcatcgatgacaacaaatttgcccattcgcctgtatttggtttgtatccgtgataccggtccaaacaattcaaatgaaaatcgaacccttcaattgaacggggccgataattcgggtcgttttgttccctttccgagtaaagcggcaccaacggactcggctcccaattcgcaataaccgcttccttttcctgcacacaaaaaccaatctttgccagcagagaatggccgtttttaatcgaattcaaatggcacttgggtaatcgcttttttttttgttttgttgaatttatgggttttttcgacgccaaaatttctgtcgccgtcccatcgttctttccctcacctcttcgctcagttccgcttttttcccctttttctttcgcttccctcccatcattttaaagcgccaacacatgcaaatggtcaaaacagttgcgaccagtaaaggccagctgcgaattgtcaaggcgaaaacgcagagcaaaacggaggatgccatgccaaaggaacgcaccgtttgggtgagagggggcgccatcggagaggcgaaatcggacagaatgcaaaccaaaaatatattaacattatcaaacattgcttattgttagtgtacaaaataacaaatacaattcgcagtcgacgaattaaataaaatccttggaaaatatttattagtctgtttaatgagcaaatcgttctgtccaaatccttgccgctttgttgaattcttccggctgttgctggtactgttcgccaattaacggaaccaacgaattgtatgggtcgcaattgcataggagagaaattatagactaaattaaaaaaatgatagcaaattattttataaaagggaaaacctgaagaacggtggccacgccaaaggagggtcgccacgattgtcgactgatcacctgcagacgcatctttccttgactgaatggaattaggttagaaattcccactttaaaaattggattttcccagcgtcggtcccttcaattcaaactatcaaaaatccatctctctatcatcaaaccgcactaattaaaatttgaattctttggcaattataattttctcactttgaaatattgcagtggtaaacccgcgtcaaaaagaccacttccggcgcatcgaatggataatttttgttgaagttcagctcaacaaaaaaggtccctccctcataaaccgtttcttttggcccttcgatcactgcgatccattggaaaatgttctcactgtttggggacgcctgacaacttatacctaacattacacagaacagtatagtaattcattcatgatattttagaataatttattgtatagaacttacccctgtaatggcaattgactcaattgtttgaattcggcgtgcagtctttgggcagcaattgagtaatcgtcaacaaaagaggggaataaacgtgcaatgtcaacaagcgaagatgaagccattttaaattcaaccaacaaaactgaaaaataagacatatatattttttagagctcggcctggacctggatccaggcctggatttttcctggatccaggtccaggtccaggtcatttttcggcaacctggattttcctggatttttgtccaggaaatccaggtccaggtccaatgtgaaaaaaatccaggtccaggtccaggcaaaacacgaaaaacctggattttcctggacaaaattttagaatttattatttcaagtgaccgatgtttttttttaattttcaaaaaaagattaaattaatttaaaaatacattattattattaagtagatatttttagatgtttctaggcaattaattaattttttcaaacctttttttgatttttaagatgagtttcaaaaaatccaggtccaggcctggatccaggtctcgaagagcctggatttttcctggacctggattttcctggatttttgtccaggaaatccaggtccaggttcaacatggaatccaggtccaggtccaggtccaggcttttttcaaaataccgagctctaatatttttattaggattgtgcccgggcatgatccttgatcagaccgaggatgactaaagtggggaacccaggaaacggagattcgtaaatttgcttcgaaaaagattcttttcaaaaacttttttttagatatcaatttgttcggctttgttgggatgaatcgagttatga

SEQ ID NO: 3733 - DNA, 2113 bp, Heterodera glycines
aaattttaataattttatatatgtgttaatactaaatattaatcttgagttattttgttgaaagaaaaggtttgggacgatagcacccggccggtctgctttccgagcacgatataaatctaaaattatttaatttttaaaatatacaatactcagttttaacaataaatttttttgtcgagtgataagacactcataaaaatatttgagttcgaaaaagtttaggatctcgaataattttgttgttgtaataaaaacaaaatatttcgaaatttaataaaccaaaatattatggctaaaagaaatttaattcatacaaaaataaaattattttaaaacaaaatggaaataaaatacgaatatgttaaaactcagcttgaatttataaaaatgaaaaaaataataacgtgcttaacataaaatatatcaaaaactataaaattaaataaattttggagataatttgaatctttgattccacccaaaattacaaaaagttgaagcaacaataatgaattaaatttaaaaacatcatttatttgaagatattcaaaatgataagtggcgcaacatgatattagatgtaaaaaattgtgtaatcgcattaaaaacactacaagacaaataatacaaactaatagaaactaaacgatgtttttaaaataaatttttttatatattttcttaataaagaattttaaaagctttaagctttatgaaagacattcgacaacaccgatattttgaaagaaatataaactgggtactaattacattaattagttttatttcagatctgtagtgaaaattataagcttaaaataactcacctactatagattttaatattataatttttaaaatgtcttttcattaattctaggttttctataaatctagaaaatggaacaatcgcagataaatactgctgaaaaatcgcccatagacgaataaaacaattaaaatttatgcaagtttgggacggggaatttagctgaggtttaaaatttaaaatttctgagaagaaaaatcagcatgaattgtggtcttttccattgtttcagattcagccaaaggagtggccaaaggtgtaaaaaatcgattcaaaattttgtaactgcaatttgtttataattgtgaaaaaagggtgcgaattgaactaaatgtccattagtaaaagtttaaatagctttttatcatatattgttttgaaaatttgtatatttttaaaggtttgataaaattaatgacgaatttcaaaagagccttttttctataattttggtctagtagaatggtaaatgcaattttttcagttgataatattttcattttttttgtgttacactgtgttgcattagaatagggacaccctattttttgggagtttgaccgcttcccatgaaccaatttcacagtgacatcaatagccaatttcagtttatcctcattttggttatacaatcctttgcttgggtccaacaattccttaattatgaacatttaaatttaaaaggcaaattaattgttttgaattgacacccaccgcaaatgaaacgaaattagggaatctcatgctgatctctttattgttaaaagtttcttcgttagcaatttgtctcttataatcttccatgcagcttttttgagacataatttgaaatgttgctgaacatttgcaactccaatttttgtctaaaaataaattagacaattttacttactaggttataccatgaaaatttatcagttttttatgatcaactattaaatgattcagcgaaattgcgaggttaattaaccggccgccaaaaagcttttaaatcatatgacccgggaattgcgggcttccggcgggttacgagaagagacgaccgagctgctaaattaaagtggtgctatctaatcgattaatgcctatagatgcaatgtttcagatcaaaaaaatgctcatagattagaaaggaggaaatggcccaaaaatggctattaataaaaaataatttcccattttatttccaccagctaaattttgttttttattaataaaataacttcctttcgaaaattattaattgttggacatacatctaataacaccttaatctatttt

SEQ ID NO: 3734 - DNA, 2967 bp, Heterodera glycines
aaaatttatgcataaaaattcaaaataaaattataagactattaatatcgtgataaaaattaaacatttgatgtgattttgcaaacaagaataatattataaaaatattaatacaaatttttatattcaataacatttattttaacaaaataatctcaaaaatatgactatatattttaaataaatcaattgaatatttttcttcaaaaaatgaatgaaattataaaattcacataactgaataagtataaataaaaggcaagaaaaatcaagagattaaataataataaattaacttaaaactcgaactaaattattttaagataaaactttgaacctaagattgctttatttattgttttataaataaaattatcttatctaaataatatcacaaagcctgactataaaaacaaaaagaaaaaaatatacatcaatcagaaaataatcatattataaattgagagaacatataaaagtaaggaaaaagaaaattgtgatcattctcacaattcagaagatatccattccgattgccttttttccatctctgaatattttttattcacaaccgttctctctcctttgaaggacaaataaacagctctttgtcaacggcacaattgcatttgaagtctgtaaagtggtcaaaattatacaataacaaagggtataataagggttggatcacaatgacccggcctaaatatacttttgttatatcaaaatactttaaaataaaaatataattaaatatccgtttttgaaaagtataacgaatacaaattaatacttattgttagtttaaataattatcacaaattaaaaaattaaaaagaaaaattaagaatttttcatttggtttactgaatgaaaaatgcctgaaaagagaaatgaaattatatctatactaataatagtattaagaaaatttaaaaattaaataaattaggctacacttaaataaaaatattccaaaaattgcagaaaaataaccggctaataaccgatttattatttacaaattttttcagccaaattcaaaaattcaataactccgtaatttatgcaatttttaatagtcctttttttatttgtcatgtcttctctttcatttaatacaccgtttcactttttctttgcttgtttgattttttttcagccgtttttcctgaccattccaaaattggaaattggcccgctaatttttctcgaattttttatggtctcatataacaaaaacgaatgtcttatatataatttagaccgttcgaatacaaacatggctatctttgctacttaaacttgtgcttatcaactctaactccttaaatactttcacacttggattgatctgtttcctgataattattaaaattaaataatatgaaaccatgagtattataaataaatattgatctagctacagatgaattcatggacagtcaatcaaaacacagattttaataagattaacacgcaaattagaaattacatgagtcatgagaaattgcttatgaggtaccaattttttttatagattatctcacaagattttcaattaacaattgttttattgtggaatgcatttaaggaataataaggtaaatattttatattatgctttttaacttttacataaaatttgtgatcctatgacttaaaaaatgacattaaatgatctaattgttcttcaattgcaaattaatattattcgaataaaataagaccctctggtccaaagtcagcttataaaataagactgccgcgcaagcgctcaccaatagatgtctaaattccatgattaattaaaaaattaaaaaatatattattacaaaatgcataaatttcgaaaatgcttgttatatttaataaataaaattcacatagatttaaacatttcaaaaattagatataagataaaaccaaaaaattcataaaatgtaatctagaaatatcaaataattcatagattaaatattttttaataaaatgttatgtcaactaaatatatcattaacaaaatttcgaagaacaatgataaatcataaattaagaatttcttagattatatgctaaacatacacgccttcaaaagtccaaatcctgatacttcgcgaaaaccaaatgaactaggtcatatgaaagcaatagaaattaaacataagtaagaaagttttatgttattataggctaatacctttataaatagtaaaataaaaaaaattcatttattttgaaaaaaattaaaaaattcaccgagaaaaaaaacacacttaaaattgaagaaaaacaatttgatttttttaaatcaatagttaaactttttttatttatattacttttttggagttaattgttttttttatttttataattttgattctaatttttaagctttttagttttttttctttctcttagggtttgttcacaattttttttttaattttttttaaaacaaaaaaaactataaaataaaaattaaaaaaaatatatcattttttatataaaaaaaactaaaaaataaaacaaatattctttatctattgatttcgagaaaaaataaagttttatatcaaaacaatgaataaatggttttttgtttttaactaaatttatataaccgatcttataaatgcttaactttggtgaaaattctatttgaataagaatgaaagacaatagggcattgttctaaaatactaaataaagcaagttttttaatctcctattaattccatttttcaaatatgaataaatattttaaagaattaatctttgtaaaatataaaataattactataaattttaatttaaatcgattctattaataatgaaaaaagggaatgaaaataatcttcgtgaattaaacaaatttaatatttcaatatatagacaaaacaaataaaatgaattaacttttatatgttacatgaaaaatttacaattataaaatttataaaa

SEQ ID NO: 3735 - DNA, 4563 bp, Heterodera glycines
tgagcagaagggcaccgatcgggaagtatgcgtccttttttgctggacttgagccaccgcggaaagctaagaaataccaagcggctgatgagcgcctcttcaatttggttctcaattacatcccggtgaacccgaacaatgaaaatgatcacaattaccacataaatccaaattttcatattattttagaatttctccgtggaatttcgcgcaattatcatatgaacccgtaaattgtttccatttcttcattttgttaagtttattatatttaacgaaaaatttcattttttgtttccatttcttcattttgttaaatttattatatttaacgaaaaatttcattttttgtttccatttcttcattttgttaattattatatttaacgaaaaatttcattttttataatttttacaatttcttcctgccttttttttcatttttggcttggcgccaaaacgtcggcgccaaaacgaccctggcgccaaaacgtcggcgccaaaacgtcggcgccaaatcgtcggcgccaaaacatcggcgccaaaacgacctggtcccgaatacagacccccaggcagtcacagtcggggatttgaatccaggagagattagaaggagcaatcattttattattgttgttaattgtacaaatgaagaatgagcccccaaacttacaaaaaagcataatccgataacatctgaaccattggccgacaaacaaccattgttccggaaatctaataatagaaaaggtcattttatttgggagtacagctacgtgagagagggagagaagttagagatagtcagtgggaggatgagagttcagggacagaagagaacagttagagatgaaatgagatagtgaaggatgtaagaagagagcagtcagtgggcgcgtgagagagtacagatgtgtaagagagcagtcaaagatgaaatgagagagtgcaagatggaagagtgcagtcagtgatgagatgagagagtgcagaatgggagagagcagtctgtgggcgggtgagagagtacagatgtgcaagagagcagtcagagatgagatgagagagtgcaggatgggagagagcagtctgtgggcgggtgagagagtacagatgcgtaagagaataattagagacagtgagttgactgaaagacattagggcatttgtttttttaatataaatggtcttatataattgttataattatattcattatgttttgaatttacctaagcaatgactctaatgtaatttatgtattttattaataaggaattatcatttcagaaattatatataaaaaagcgaaaagcgtaaatttgccaacaaattatttttgttttgttcagatcgttaatattcacacccaatccttttaatattttaataacaaaagaaaattgttctaaaatactaaataaagcaagttttttaatctcctattaattccatttttcaaatatgaataaatattttaaagaattaatctttgtaaaatataaataattactataaattttaaattaaaatctattctattaataatgaaaaaagtggaatgaaaataatcttcgtgaattaaaacaaatttaaatatttaaaatataatagacaaaacagaataaattgaattaacttttatatgttacatgaaaaatttacaattataaaatttataaaataatgaaaaagtcttgaaatattaataaaaatatatattttttggaataaatataaaaataaactttaacctatactctcatgaactattatttactcataaaaaataatattatttaatgaatgaaaaaacaaatacacatcgatggggttgggaattatatgtgatataaaatcgcaaaatatggacaaaaaatcgcgaaatatggacataaaatgggaaaataccaatttttcgaaaatctaattaatcaaacattttcgacataattttactaaaatgactttttcggaaaattttccagtttttaaaggtcaaaaaggccaatttatctgatgggggccattctaatagaggttttttggaaaaatgccataatatggacataaaatatgggcttaaatgccaaaatattacaaatatggaaatatggacataaatcgcgaaatttggaaaaatatggatatagaaatccatcctggaagcttcaacccaagttaaaaacgtttttcatgcgtttcaggcctcccacagtccagaaaaaatatggatttccatataattctcaaccctactcatcgagcgatgtttataattttttttcatttaattgcttttttgtaaagtctctatacatttctatcaacattgtaaaattaaaagcaaattttatcagcagcaaataattgataaaatatgcattacatttatatctgtaaatttaattaaaaactcactttacgtatgggtaaagagatgtgaagtcgtagtaagagatcttctctcccggcccagccctgcgcagcaatttcattggcccagtccgtcctcccataaacgcatcccgtatcaccaacggaccgtcgtccacgtaattggcaaagcatttccgcattgcttttcttctggccagcatttccgtaattcagcattcccagtacacatccacgcgattgcaatatcttctgatgtactccatcctcttgccgtctcgctcccgcacttgtcccgccgtttttccattgggaagcaccatgttgtcatttgggcaacatttcttacatccgtgccacgttgtcgaagcgaccaccaaattgtgaataggcataagtttcgtatttctttggcagtttgtagacgagccaatccacaaatgcctccattgggttttcgcccactatttgtttgtcaacaacagtgcccgtaaaacggagctggcagaaagcgaccacgcgatgcggaccacagatttgacagcctgcagtccctcttctccaattgccgttttcaatacagccggggcaagcaattcgagcagcgatgaagtttggctgatgttcttttttccggctggagcgggtccaatgcctggtgttgcattgtctccaagtcgaacaccacaatacgataagggtcaatttccctgggctcaattagttgaatataaaagatctgcattttttaaattcttcattttctccgagattttcatgtggttttaattcattttgcatttattaatttaaattttaatcggagaataaaaaaataaaacttgagaagctatttaaattatctcaaagaaaaagataatatatattcttgtaataactctaatttattgactttcttaaattttattttaaatgtttaaataatcaagttatatttgaatttttcacaatttattactgtgcgcatttaaactgtatatttttattttaaagataaataaatacctttggaactttacattttaatattaaaatataactacaatcaatttcataaaaaaacgttttatttttaatacctttggaactaaattttattaaattcttcttgcaattttccaaaaagaaaaatcgccgaattgcagcaaaaaagattttaaagaaaagaaactaataaataccattaaaaaatattttatagtataaaattggacttaaaatattgtgtaaaaattataattatttaaaaaataataattataagtatccttattttaataatagaaaatttaaagaattttgactatttaatttaaataaattacagtaataatctaattgaaaatctttaccatacaaaaaatgcggcaaaatgttaaaacctaaatggataaaataataaaaacagtttaattaaaaaggaatttgacgcgaacttttgacggaaaaactagtatttaagggattgtgttttgcggaaattttcagattcaacaaccacgcgctaagtaatatacatattccaaattataaaaaattgatgataactaataaaatgtaaatttagttgacaatacattttattattttgataattataaattcttcataaaattaaatacccgaaaaaatattatataatcaaaaaatcattataataatagatggatattagtagattaaatcgactaccaaggaatcatttagaatataaaactattatataagaactaattttactcttgcgaataagatgtttgctaatcaaaaaaaaactttttgaactatatatttaattaaaaaactaagagatataccgtgcaaaataagagtaaaatactgcagagtttatgaccaaatttaaaaaacatatacatttcagagtaaaagacaattttaatctggaatcaatctgaaaaactaaaaatttaaattacaaaaaatcaccaaattccaaaacaaatattagttaaaatttaaatttttaaaatagcatatatagaattttaaaacgaatgattattaaaaagtattttaaaaaatcacataaagtatatattattacaatcttaaacgattgagattagcaataaatttttaaagtttcttaaattttaatatgaatttataaataatattgtt

SEQ ID NO: 3736 - DNA, 4812 bp, Heterodera glycines
ttactgaacattttaagacagggttcttcttgcccagttcaaaggattcaagacagattggacattcttcagcttccttattgttattttgaaccgataatttatcgagggctcttgatacttaaattttaattttggcactttaatttctaatttgtatcatggcatttgacataatttcgccatctatgtattgcattggaacattctaacccaaattatatttgatcagaaatatggaatttcgtaaccttcttcacgaatttctcatctcttttgacttacttttcgaatcctcgtccaatttgagtgtcgtaacaattgcatttgacaaattggtaatgggcattatcacgaaaacaaagaagcaaaggataaaaccgttaaagcatttgccaaggtcgcgtttcttccgtcttttcggcttcatctgctgctggtcttaaaattaatttaattttttataaattaattcatttgaccatttttgttgtcaatcgctgtacgcaaaagttgcaacatttgctccattcttttggcggatttgtccggattttctttaccaaaattgcccccttttttgtcatttgccatcttttcctctctgtacaatttgattaagcttgccaaaatttgcaaattgctcatattttgcagcggcataattttttccgatggaattccttttcgcagtgccaaaacatcaatgacaaattgcaaatattccttcatattgtcagaatattggcctaaaagatgcaaatttaaaaatgcaaaaaataccttttcaattgcctcctttcatttccttgatgattaattgcagttttcgcattattcggcccaataaagggtctttttcttttattgccttaatcttcaggtatttctcttcgttcgcttctgttttttcttcctttcgatcagacatttttttgttcttcttaatggaattttggcaatcattaaaaagggctctctaattatttttattaatcattttaccaaatctaagcgctttggatctataataattgttttccctcatcccttttcagatattcaagtggtgttttgtatttattttattgttttttaaattttaccatatataatatatatatatatatatatatatatatatatattttaattttgcctgaatttggtgtgcattttgctgttgcggttcgaacacttcttcaatcagatgctgattttctctcatttttttgaagtgttgctaataccttgacttttattgctgctgcccgctccattgaccaaaatgaatgaacaattggctaagaaaaaccgcagaagagatggtgcgaaaaataattccataaatcagacagaatttctaagagaaaattaaaagctaaataaaatttagctcttaagaaaagcgaaaaattactttattaacttggataattatatataaaagaattttttaaagaaaaatcatgcaataaatctatatccattcaatttataatgagaaatgtagcgttgtcctatgggcattttgcaacgtacgcttggatgctatattggattctaaaaatataatttatattaaatatttaaatttaattattagtattcactcatatttgtagaataaataaatccataacctttgctcgaagtttatcaatttaaacaatcttaatatcgaaagatagctctagttcctcattaccatgtaaagttataaaaaaaaatgtattaaaaatttaacaaattactaaaaagattcttaaaacttaaatccccattttgccttttggcattttgtgccggaaagatttttggatttcttagcggaatacaataaaatgtaaaattggcatttctctgccgatttgctgttgggaaatttattaaaaaaagatttcaaaaaacccgaattttttgctctctttgattttgaaaaaaactatcgaattttccttattatttttaccttatttaagtgaattctaaaattatcaatccttattttgattaagttaaccaaagagaaaaaatgcattaaaaattgactatttaattgctttcaaatggacccctttcgcttacgaccataccacgttgaaaacacgccatcccgtccgatctggcaagttaagcaacgttgggccttcttagtacttggaacggagacgtcctgggaatcgaaggtgttgtaagcttttttcttttttcttcttttttcatttttattttttgttttgtaagaaaatgaattattttttgtttgtttttgttaaattattcatttgcttgaaattacttcttcctataactttgtggcttaaaaatctcttcttatttttaataatatttatttgttgcctatggaagtcgaaaatttaataaaaatttaaatcgctttgagaaagaaaaatagaatttgctgaacaaaaaatgtgaaatgaaaagtgaacaaattttaaaagaattttcttttaccctaagggccaaaagaatctttttaaattcgaaagaacagctataaaagtcaggctaaacatttgaatttaacttttttttaattcattaaattttccaatttaggcccatcatttttaaatgtcattcgctttatgttttttatcgtcataagcttgaaaaaacatttttagtttggttttgaactattaggatgaatttttcgtcccaattttgcctatttgtgcattttgtgccgaaattgtttttttttttggttttttatcggaataaaaaaaatggcaccttaaaaaagagtgacttaaaccactaagaacggaggatacttgtcttaaaaattgacaattaaaattaattttcttaacctattttctgattctctagcttttttagtcatttgaaaattcaaattttcgaaaaattacgtataggaaaaggcttatgtataggttttaaagagaatttgtgaagaaagtcaaaaaatgttatcaatttttctaaagacttgcgaatttggaaataattttgttaaaaaaaattccaaatttttcgctgattcattgaaaactaataaatttttctctttcaattctaaataccttatcaattattgttctgggttaaattaatcaaaaaagaaaaatggattataaaaaagactatttaattgctttcaaatggagcactttcgcttacgaccataccacgttgaaagcacgccatcccgtccgatctggcaagttaagcaacgttgggccttcttagtacttggaacggagacgtcctgggaatcgaaggtgttgtaagcttttttcttttttcttcttttttcatttttattttttgttttgtaagaaaatgaattattttttgtttgtttttgttaaattattcatttgcttgaaattacttcttcctataactttgtggcttgttaaaaatctcttcttatttttaataatatttatttgttgcctatggaagtcgaaaatttaataaaaatttaaatcgctttgagaaagaaaaatagaatttgctgaacaaaaaatgtgaaatgaaaagtgaacaaattttaaaagaattttcttttaccctaagggccaaaagaatctttttaaattcgaaagaacagctataaaaagtcaggctaaacatttgaatttaactttttttaaattcattaaattttccaatttaggcccatcatttttaaatgtcattcgctttatgttttttatcgtcataagcttgaaaaaacatttttagtttggttctgaactattaggatgaatttttcgtcccaattttgcctatatgtgcattttgtgccgaaattgtttttttttttggttttttatcggaataaaaaaaatggcaccttaaaaaagagtgacttaaaccactaagaacggaggatacttgtcttaaaaattgacaattaaaattaatttttcttaacctattttctgattctctagcttttctagtcatttgaaaattcaaattttcgaaaaattacgtattaattttcaaaatcaaatttttctgaaatgtttaatgtgaattaaaaaatttaatggaaaattttatctataataaaaaaagttattttttttaaattagtgaaatatttataacaatcaaagaacgaactccacaattaggttattccattccgtcactcatcattcagttcaatgtttgtgtgagccggtcaatccgggcatggaaatcacactgtccgtactaggcacatttcgttgggagtggtctccttgaattgtacgggataattaattaatgagatcttctctaattgtttttacccttggggccatcgatgggcacttttccaatgctaatgccaaactctgcacatttcgagtcaatttcagtgactttctgaccaaactgtgtactcaatgcctgccattcgctgttgttgctggcatgggaagaagcggaggcggcaatggcgaacatggcacggacgaagccgaggctgtgggcacactcatcaaaaaggggaaaaacataaaaatatttaaaataaataataattattggtaaatgatccattaatttgatccattccccacttattaccagcagaatgactggcaagagatgcttcgatgtcggccaaaagagttcgatcgccgccattcgagcagccgatcagttggcctttcaacgcgtccgcaacattttgggcatccgaacaaagcgatgacttggaaatggaattggcaaaagtgccaacgtaattggacataagtgaaaccactttttgactgccgggacagcacggatctgtcctaaaacaacaaa

SEQ ID NO: 3737 - DNA, 2604 bp, Heterodera glycines
caattaatgggacaattggcctaataattatttatttatttttatatcattttaaatatctcttccccctttttgatgagtgtgcccacagcctcggcttcgtccgtgccatgttcgccattgccgcttccgcttcttcccatgccagcaacaacagcgaatggcaggcattgagtacacagtttggtcagaaagtcactgagattgactcgaaatgtgcagagtttggcattagcattggaaaagtgcccatcgatggccccaagggtaaaaacaattagagaagatctcattaattaattatcccgtacaattcaaggagaccactcccaacgaaatgtgcctagtacggacagtgtgatttccatgcccggattgaccggctcacacaaacattgaactgaatgatgagtgacggaatggaataaactaattgtggagttcgttctttgattgttatccagcaattaattagctgttgtatttttaaattagtaacaaaataaatatttaattttacttttcaaaattatcttatcttaattcttctttaatacaataaaactcacctttgccctttcggtcgcccacattttaacatttgtcgcctcattctctttccctctcttagggaaatgaatcatttaaaatgggacaacgcattgaaatgagagctaaagcattttgaaatgcatttacctgttaatgtgtgcaaatacatgacattttttaatgttaattttgtatttagtgcagctgagacggaattttgtaaatttgtaaaagttttttttaaaaaactgaaattatagcagaaatcttatgaataaatctgattgtttgttaaatgttttgttcatcaaaatgctcgtttttcattttttattacaaaattttatatttttccattaatattttgggtgtaataattaattttgaattttataattcgagccttactttactattatattatccaccatcacatagcaaatgctacaatttgcacttctgctgctctttatggtgctaattattttttaaaaatatagtagggtaatttaatcaaataattgtccgatttaataggtgtcatcatttgatccctccgctgaatttatggccaatgaccaaattagtgcggtgcaacagcagcaagtgaattcaaaagattcaacttttgagtttaattatgctttttttcccattttaaggctgtaaaaccaattgttggctggcatttttggtgggacggacgaaatcgaaattggatagcaaaaaatgcggaaaatgttgaaaaataaaagaaagcaaaggaacaatcgaaaatggacagaaaataaatggcgaaacattttataaaaatggcagagataagtgaatttttgtggctttcttggaaaacgacgaaagattggataaatacatatatttgttgctttttaatgattagtgcacggagttgtagacaaacttaaaaatgaaccatttttaatacaattatttagagaccggacgggcccgggggcccggcgggcttttgccgggcccccgggcccggtcccgtttttttttggaaaaaaacgggcccgggacgcccggtaaaacgggctttttttgaacgggcggcccgccccggtcaattttcgaagcccggtcccgggcccggtcaatttgaccgggctaaaacgggcttaaatttcaccagcgaaactgcccaaaacttgaaaaaattaattatttatttatggcgaaatgtctttaattcaaaatttcaagataaaactttggatttttgaaaaattaatgattatcgacgttcgagattaaagccgaaaaccgcagaaatgttgatatttttgaacaaggccatcccaatgttggactacaaatactgatttaattttgttggatgataaaaagttcataaaattttccataaaattttggtttagaacaaagaaaaggaattacgcaatttttttatatttataaatgcatttttaaaatttgaaaaaagcccggtcccgtacgggcgcccggtcaaaattttggaccgggcccgggacgcccggtaaaacgggctttttttgaacgggcggcccgccccggtcaattttcgaagcccggtcccgggcccggtcccggtactttcaaaattccggtctctagtaattatacgtggataattgaatatgaatgagagaaacgacagatggaggggaggggtgaaaaagagggagagaacaaaagtgagacgagagagagagagagaaacaaaaatgaggcgagagagacaaagtgaagtagagtaggtggagaagcgtaatggagaaaaatttaaatttcattcggcaggcgaaatgtaaaaaccctccgagagcagtccagaaaaaacaacaacaacaacaacagttgcaattgatgcagaacggtgggccggatgcttatgagctgaaagaagtttttggctattataacaatggatgccatgaagcgtactatgtgtcgtggctcagtgagtccaatttgaaaatgattaaaatggagcggtggaggggggggggggggttggaggaaggggtagttgaaattttaaaattt

SEQ ID NO: 3738 - DNA, 878 bp, Heterodera glycines
gtccatcccgacccgaatcgagcaaaagttgaaaatcaattttccattttttattttggtctagaaatggtgaaatgattttttattggtgaattgtccaattttagttgctttctcgatattaagccatttttaaaccaaaaataaaaaattagaaagtttaattttcgactttttgctcgaattcttgtttggggttatatatatagatcaaaattaatgccatattcggattctccgacccttaaaacccttaatatgatcttttctcgaaaaaaattttcaaaaattttgtttttcgaaaaaggggcgggggtaccatccgtacttattacctttgaatgttgccaccgttggaatggcaaagaatttcgcgcccgctactctgttgaagcttggccaattgccagttaaagttaattacaattagtaattttattataattttttttatttattctttagttgattgcgtcaaaaaatgcggactccgaaaattacagaaaatggttcaaaagcactcaaaaattttaattgcttacaacttctttaaacttaatttgccgatgatgttaaattatattatgcccatgaaaatgatgaccattcgaatcagttggataaagcaattgaggctttggaaaaatggtcaaaaataaatgggttagaaatttcaactgaaaaatgttttgttttatatttagggaaaaataatatgaaaaaagaatattttattaactcacaaagaatttcagaatcggataatgttcgtgacttgggaattataattgactcgaaactgaatttttcagaacatattagaaaaattgtacgaaatgcatatcttagaattttccgaaatttcgagcagtgttgaa

SEQ ID NO: 3739 - DNA, 1603 bp, Heterodera glycines
ggaagggccgcgactaaccgggaccaaataagcactggtaagaatggggggtctgagtgaaaaatttttatttggcactttaaattcttggcaaaatgactataaattttcaaaattttcctgacagcgcctaatggcaccgcctgaccttacaaaaaaaaaattcttttttcaagtaaaagtcccggttggtccggtcccgatcgtaaatccagatcgcggtcccgacatgtcccggtcccggtttttccaagaattcccgaccccgctctactttaataaattataaaatactaattaatttatttggataactaattaacatcgatttattaaaaaaaacattttcaataattaccccctttatgtttcttattgctgtggcaacatctcttacagcaactttgtcctcgccatataaaataaattttttctttttaattttcattaaaacttctcgtatttgtttgtattcatgtgattcttttggcattgcttcaacaaatttttcaaattgtttaaaataatgatccgcctaaattttcaaacaaatttattattattttttcatttttttttggctgagtgatagataatatctaaaatttcaaaaatgttttccaatttctatgggatattaaaaaaaaattcatgacaatataggggaaggcagcccatagccagaaaaagatttcgtcggatgtgggaatccgaagcgctattttgttttttgattttcagaccaaatttttttttctttatatataaaaatttcagcaccggcccgaaaaacaggaggattttttgcggttttgcgccaaaaatgacaattttttgggaagggccgcgactaaccgggaccaaataagcactggtaagaatggggggtctgagtgaaaaatttttatttggcactttaaattcttggcaaaatgactataaattttcaaaattttcctgacagcgcctaatggcaccgcctgaccttacaaaaaaaaaattcttttttcaagtaaaagtcccggttggtccggtcccgatcgtaaatccagatcgcggtcccgacatgtcccggtcccggtttttccaagaattcccgaccccgctctactttaataaattataaaatactaattaatttatttggataactaattaacttcgatttattaaaaaaaacattttcaataattaccccctttatgtttcttattgctgtggcaacatctcttacagcaactttgtcctcgccatataaaataaattttttctttttaattttcattaaaacttctcgtatttgtttgtattcatgtgattcttttggcattgcttcaacaaatttttcaaattgtttaaaataatgatccgcctaaattttcaaacaaatttattattattttttcatttttttttggctgagtgatagataatatctaaaatttcaaaaatgttttccaatttctatgggatattaaaaaaaaattcatgacaatataggggaaggcagcccatagccagaaaaagatttcgtcggatgtgggaatccgaagcgctattttgttttttgattttcagaccaaattttttttttcttatatat

SEQ ID NO: 3740 - DNA, 3664 bp, Heterodera glycines
  unsure (1)..(3664): unsure at all n locations
tccgccggtgccgatagcgggcgccgggaatattttttggaaactntaatggcatatgacaagaaaaagaagaaaattttcaaaaaatttgcccatttttgggcctgagtccaaatacaccaattattcccataatttacccacccaatcgtgatcaaatgtggcatcgccagttacccaaaggtcaatcaaaattttgcttttggcgcttagcaaaacataggcccaaaatgccataaatgtcatcttgtcctccatttctctgtaatgactgtactcttttgagttgaatgttcgtggactcatcatcagtgataagcgacgtggtgaagaagacttaattaattaatatttaaaaaaaataataatttttatttaaataattttataatatttgctttatcagtcttttaaaatctggtattaatttgttaaaaattgatttcttaagtgcataaatcgcattattaatattttcaaaaaaaaaatataattacaacaatacattttataaaatacgaatttttcgtaaaacttattaattttaaaaaagaaaaaggaaaaaagatttcacaatttttaaatctcattttgtaaaaattaataaaagatctttttcttcattaataaaaattaatttaatttaactagaaaaaatttaacttttattgaataagtgcttcctctcaacatttttgattaattggaataaaagaatttggcaatcaattaaaaaataccgcattgccagaattggttttcacatgatatggtgatagtttggcagctggtgattttaattgtggactttgttgtgccgatggcgtttgaaacgtctccgactaattatcaattttttaaatatttactttaattaagagtcattgaattaaaaatttatttatttcatttaaattattaataattttgttttaaacaaaccgaggatgcttcagaggatccgtcaacctaataaatttagtttactgtgtattataagtatttttgcaaacccaatgtttattgggtgatgatggcgccgagaacgaagcttggcgctaaattcaattttatttattaaaattaataatcaattaaaactttttaaaaaaaaaaaataatttactacgaattaaaatactaattgtttgttctacgtttatacattaatacaaaaatgaacctgaaatttctttttgtttcgcgccttcgactgaacatatttttaaaatgtaattaaacgatcaccacttttgaattgaatttgaaattatcaccttgctgccagcagatgttgcaggtaattcttgatttttctaaaattaaaatgaaaaaaaaacactcaataattcgtctaatcttaatacaatccccccccccccctttaggttgtttttccgcatcggatgggtcccccgtacaaaagggcgctcaaaacattggcagcagaactcacgcaaatgattatccaagacgatggtatgtttgaatatacaaataatttaaattcaattccattcgtctggaccaaaaaattattgaaaaatgaaatttttttaaaaattgcgctagggctgggaatatttgttttttttttaatatcctaaaatgataaaaaaaattaaatggcccttgatctcaaaataaaatcatttgaaaaattgtttaacaattactttttttaaaaattcataaataattttctggccagtttataccctagagaatttttcggtctttcttatttcccacttcggtaatatgttagttttttttaaagtccacatttaccgattttggcagtttgaggtagggttaagccccgactctcggggagcaaaatgtcggggaacggggaggaaattttcataaaaagtctaaaaaaacaaaaagaaaaagtccagaacaaaaaagtcttaaaaactcatttaaagatacttccatcttatttcaagtgcactttacgactttcgtaattccccgaaacctgtcggggcttaaccctagtttgaggttccaaaaaacacacagtaatggaatcctacattttttatttaaaaaatttaaaaaacgcatttttatttatttcttttttgctgtttagagtccggccacgacagcaaggaggacgcgttggcatgcatgcgcataatgttgcgcaagtgccggggtggtgccggtgcgccatgagcaaagaacggcggaaaaacaaattaatccaattctacgagaattggaaatctctgtgaattctgttggacccaaaaaataataatttgccaaatttattgtccgtttcatcatcgtctccctcccctcactcccgtctcatcaattctgcaaatttggcaataaaattctgtgtcctttgatcatcaccgcttctacccccttttttcatgcgttcactattttcacatcaccattttttttacaatttcacaaatatataattggttttgttctctcttacattttaatctttattgttgtcattcatgttcatcggggatggaattctgacgctccaaaaaatttaggaaatcggaattccgagcccttctccacaaaaaaaatataatcgagaattcattattccatcccagatttctctatcgtcaacagtaaataaactcgacaaaagtttaaacgtaaatgtcgtgcaaaatgattaatgtacagttattaggtgtcagtcaaaaatttgggttctcatctccaggcacatttttatttctgctctgttttttgctaaaatgaaaaggtaatgaaatgatttggtttttttgagagttaataaaacggcggcgcgcgtgtgcgtcataatgtcaagacaaattaaaacaaaataaaataaaaatttgaaaacgaacaaataaacaaacaaatggatggatggatggacatagaaatggagagagaggatgatgattaattaattatagcaattaattaattaattgctttttgcatcatcggctcttccttctcttcctcctccttcagcagcggcggcgggcggtggtgttttgatggtggtggcactgctaatgccgctgccgttgttgctgttgttcctggtcaacaatgcccaatgcaaactgtacacaaccagctcatacgtgccgatggtaaacgccgtgttgggcaccgatcggatcaacttgggggaacaaattgaataaatttcgtaaaaattgcactcccaattaaatttttgatttgtggttttgcgacgagtgcatttggcttattatttttttgcactctcgcactgaaattttttggagatttcttcaaaaatgcaataattgtttttttttgaaagaaacaatgtttccagcgatcgcactcccaagccccaaaatcctaaatccccgaggggccgcatgggcgtagtcagaccagctcccccagaaatgaaaaattaaaaaattgtcaagaaatgggcaaattttccccgacaaacgcctaacggcacggccggactttattgtagaattattttatgaaaaattgacgccccaaaatggaaaaattgatcatttttggcatagaatcactgcaaaattttttttatgtttttttagcagcgggttcgagtcagacctcctatatatcaattatantgggggtaaacgaattncaaaagtgttttttactg

SEQ ID NO: 3741 - DNA, 815 bp, Heterodera glycines
acctctaaaaaataaaaagtcaaaaaatataaaatgaaaaaatgagggaaggggggaaattcggggctgttcaagatttcgtaacaagaaaagaaaattttttgttaaaaaaacgaagttcgaaaaatgaaattccatcaaaccgtcctcgattttctacccccccccccaaaaaaaaaagaattcgcgaaatccgaattgggtttttaccatggggaatggcgcgggaagatactgctaccctcggtcgcaagaccaaaaaaatttcaaacaaaattttttaaacatttttagagaattgggcggcgaaattttgtcctattccgacttttccgcctaccatgtgggtagcacgtgaagccggccaccagcttggccgtcccgccggccaccatgaattgccaaatgttctgcccgtcctgtttgccgatgaatgtcactgatgggtcttggattttgctggaaaaatggggggagggggggggggggggggtggggatgattaatttataaaataattttttaaattagcattcgttaatgtccaagggtagaggaaaatgaaaatcaatgaggactgaatttttttttttattataataatcttgacctttggggaaaaatgagtggaattttgcacgtctatggggaaatttctgcaatataataaattttttttttcattttcgcaatttccaaacccttgttaaacttatgaagacactttgcggaattatgctcggaacagaagaaaatttgactctaaaatgttttttttcgattttaattatgtgtatataaaaaatggactctag

SEQ ID NO: 3742 - DNA, 2886 bp, Heterodera glycines
  unsure (1)..(2886): unsure at all n locations
ccaaattgggttgattgcggtggcggtgaccagcgcttaaacaaaccatttggattttgggcacccaaaataggcaatcaaattttaaatttttttttcgaaacaagcggaatgaatataaaatcgaaaaaatgtttaaaaaaaacaaattcctagaccgcattgaggttcgaggcgaattcacaaatttttggcattgctaattttttttattattatttaatttttaaattttaccataaaatggcaaaattgtcaatttttggcgaaaaacggctaaatgtcctgcttttttttttgctgtcggcgctagatttttaaaataacaccgtaagaccgaattttttttcttttagaattttcgatctggagcaaaaaaagttttaggcatacctgcacaaaaaaagggggggggggtcgactaatcccgatctttgcccattttttcttgaaaatttgtaatttttcgtttcaaacacacaacagcaacacccacctgcactgccggctgacaacatgtgcacggaatgggagttggactgaatccattcagggtggtcgttcaggaaacgcttcatgcacgagtagcagccaaaatagacagccctggagggagagggggggggggggtttgaaaaattaaaacaataattttggaatgtcacacagaaattgtgtcaatatcacccaccaccatttgaataaacaaaaatgcacacagtagggagagaatgagggggtgggacccttgtattttttgtaagagaatttgatgaaaatttttttttatttccatcacaagaaaaatgtttgcctatgagccatatactcggattttttttaaatattcaaaaaataataaactttataagaacttcaaagaaaaaaaaattgaaaaaatttcagatttttcaaaattttatgatttttgaaaaaaattcttccaatcaaatatcgcaaaaaattttttctgttttttggaattttcaattaataaaattttttatgggggtaagggggaggaagtttaatgcacccaaaaaaaccagtttttttttgttggctcactttgacggcgccacaccgaccaaatttgggccaagccctttgtacagcgcgcgcaggcgcccctcccgccacacggagtgaaaggagcggaaaatgaccgattggtggagaagacgacggcacagcgcaaaacgggctaaaaaagagggcattttggggaaaaaaaaatttttttaggaataattttctcgaaaatgtaaaaaaaaccctagaaattgtcaaaaaataaaaaaatttaaaaaatcgcttgattttattttgcttatattaagtttaaaagaaatatctcaatttagttttttttccctgaaaaatcagaaaacattttttgtgccatttaaacaaatagaatttgaaaccgattttaaagtacacacaggtggcataaatccccggggcggatatatctaacaataagcacgcaaatttcataaaattttctaaaaaaacaaaaaatttcaatttgtccaaaccatgccaacaaaaagcatttcatttttgaaaaaaatgcactaaaaatctggagaaatttgtcatttacccttcaaatttagccaaacaaaaatttaaaaaaattctccgaaaacctgttgctgtgctgctcgacgctgccgtggttgctgtactggtcgaacttgttgtcgatgatgtccaccgctgcattcgttccagttgcacttgacgtcgcatttcgtgcccatgcgaactttgcagacgcgttttaaccacctaaaaaagcgaaattgaaaaaaaaaattgtttcaagaggcattgtggtcagaatttttcggccatgccccccaaaaaaaacggttccaaattttcaatggatcaattgtttttgttttttgagaaacccgtctctttattagcctttaaaatttgaaaaaatggtttcattaacagctagcattttgctcttatctttttctgttgaaattattttttttttcaaatttggtacggaaatacggactgggtcggttgggccccgccgattggccccggtacgattgggccccgccgattgggccccatagagcagtcactacatggacaagggggggggggtcagaataaaagttatattgtcacatgttattgtttgcgtgtttcattgcatatttgtaaatatatttggtttcatatttgttttctaatttttttatattttccaattcttgattgcctaactaaaataccattaattcagcttattatttaatatattaatatcacgatggaaaataatatcttatcgaagatgaaccacaaaaaacttgaacatgaaggtcatctttatgttttcttatcaaattttggaggtatgagaacaaaaacaataaggacatgaagtgccgagggcgaacattatggaatttttgattggtgtttctcgaaattaccagatggatgcttagaattttatgaataaatttttgggatgttaattaaatttttgacagtatgaaatggaaaatgtgacaggcccttggggcccaatcgacccccaccgcggaaataaacctattgttagcgttaccgattacgaccgaatttgtcattcggagactatgaacggatttaggtcccaaaaaagggatttgccctcccccccttccccacgcttttgataatactcgtcacccaaggcgaaatcctgggacatctctgccattttaattttcccctgacagccagcgcctattggcatgggcggaaccaattttttttttaatttgactcnaaaaatccacataaagatggataaaccctcagtgggacagtgattgctgtgcccgcagtgcccccgagagc

SEQ ID NO: 3743 - DNA, 4432 bp, Heterodera glycines
aggaaatgcgcgatttgcgtgcacctttggatctgctctttaagaaggacactccttggttttggggtcctgatcagcagaaggcttttgatcaggccaaacaggttcttcaatcggatttgttgctgacgcagtatgatccgagtttgccgatcattgtcgctgcggatgccagccaatgtggaatcggagccacgatcagccatgtgtttccaaacggagtggagcgcgtcatcgagcacgccagtcgaacgctcactcccgctgaacgaaattacgcccaaattgaacgtgaagctttgtctctgattttcgcggttcaaaaatttcacaggatgatttacggtcgtaattttactctgttaacggatcataagcctctcttggctatattcggtaataaaaatgggatcccgatctacacggcttcccgattgcagcgttgggccctaattttgtccaattatgattttacaataaaatatgttaaatccgctaattttggacaggccgacgttttgtctcgactgatttctgagcaccggacagacgaagaagtcattgtcgcccacacatcggacaacgacgtggacagcactgaagaagtcgaatatgctcttcttgtcaacttggagcagctgccagtcgatgcaaaagaagtgagcgaactgacgacttcggacgatttgttgcagcaggtggcacaattcgtacgttccgggtggccaaacaaatgcccagctaatgaattaatgcctttctattcgagacgtgatacgctcaccctcgtgggcggttcaattttgacaggaaaccgagtcattgttcctgcgccgcttcgtcaacgtgtactcaagacgttgcactttgctcatcctggcattgtgcgaatgaaggcgctggctcgcaaccatgtctttggcccggtcttgacagtgacattgaggcaatggtaaagcattgtgcggaatgtcaattcgccgccaaaatgccgccgaaagcgccacttcgaccatggccaattcctggtgaagtttttggacgtgtccatattgattttgcaggcccatgtgccgatggaaacatttatctcatcctcgtggatgcactttccaaatggcctgaagtgatgcagatgcgcacgacaacagccaagggcacaatcgaagctttaaatttggtatttcaccggtatggtgctccaaaagaaatagtgtctgacaacggaccaccatttacttcccatgaatttaaagacttttgcaggcttaaaggcattaagcacaagttctccccgccgtatcagccgcactgtaatggtcaagccgagcggatggtggacacattcaaacggcaggcaaagaaaaacgcaaaatccaaaaatcaacaatggatttcggaatttttgtttgcgtaccggtcctcgccgagtccaattttgaatggtttttcccccgcagaattatttttgggaagaacactccgcacgcccttgtcaatgcttgaaccgagacagcacacgccgaacgagaacaacaaccaacgtggacagtaccaatcgaggatgtcacagcagtacaaccgacatcatggcacaaaaagccgttcattcaattcaggagactcagtcttagtcttgaattatggtaggagtggtaagccatcatggttggaaggtaaaattgtgagaggtagtggtttgatttggaaaatcgaaattccaatccttggaattacagtaacgcgtcacgtcaatcaaatgcgttcattttccccttacatttcaagtaagattgtgtccgatcagattcaagccgctccgcaacaaccaattcctccaatggcgccaattcaaattgatcagacacctgtccgtgatcaaactcctgtccgtgaccgcacacccgaaccagtcaaatctcctcgtccgcagcgacagcgcaagaagccaattcgctattcgcccggctaattgccacggacggtctttccaaaagagggagatgttggatgtgttgatatttaatattattaagtttcgacacgaatacttttattgattagttatttgttgatgggtcctctcccatcgactcattcttcgcatttgtgttattttacatttcggtgtttatttttcggactttctaatttgactccgtcgttattttattattattttgtgattctaattttattgtttattcatttaataaatttatcttgtttgtgtgttagcaaaacacaacaacactgatgttgggattcagttggcgacaaaggcagcagctgaagaacattctcgtgaacatgctcgacgccgaaacagctgaaggaatggattttttgtcttcaacacatgaagtcaatgccctgcgccgacgtctgacaagtcacgctcgttttgaagtgcggcacagcgaaggaggaacaacactgatatgtacgaacatccgtcaggtgttggtgcaaagagtggaggcgttgcttggccaaggtgggagaactgattggaaccgtgcagagtaaagatttaaggacgaatgaaagaatttgagcaaaaattgtttgtgtcaattgttggagatcgaggatgtggaacaggcgacacgactagggcctgtactggaacagctctagcaaatcgctgatttgccatttggccgaaatttgacgattgaatggtcttataattttttgcattttttgcacattttttcttaaggtttttgcccggcgacatggctttcatctgcgcttggatgggacacatgggaccagcctccgttttcccttgtgcactgtgccgaattccatacaaagctttgggcaacaccatcatcgggcgaaggacagcaaagtcgatcgtcggtggcgccgcaatttttagtcaccgaacagcagacacgggcaagcacacaactcgggactcaatttcgtgtggaagtcagaaagacttgcctctctttttcgtgccgccaacaaatgtgatcccttcaccatttcacacgcttcacagtgccggacggaaatgcattgacttttttcaaaaaaatgggtgccccgcagaaaaacgccaattagaagaaattatggcaaaatcgggagcaattcggcatgccaagacgcaagagtatactggtcctgacattcccctctttctttttttcgaatcgattttaggcgaccacattaagcgcctacttctcgcctcaaccgaaatccgatcgattggaacacccttttcgatggatattgccgccctccttgacgaaattcgggagctccacgtttttggacgtgcggacctattgacaacagaacaaatcacagatttctcaaacaaatatctcggcattcatggctatttcaaggcaaaaaatttttttgcatttttctcacattccccttttaagaattgggagacctatccaactgcatttgacacaaacaatgccgctggattcacccccaaattgcattggcttctcgcccatggtccagactttgcaaagcgctgggggtggttcgcatggatcagtgaacagggcatcgaacaccttcaccacgttttgaacaagcaggttggacagactcaatttcacagttcaaaaacctattttttgttttagtctgagcgcttcatgcggtacaagggcgacgaactgctgctgaagatcggagaacatcagacattgctcaattctattttcgacagacaaaccggtttcctctgatcaacaattgttaggaatcattaattttattatccggttttgttaaaatattgttccttttaatatttttgataaaataaacctttcaaacacgaattatcaactaaaaattatgtttgattagatttgatcagttgggaataaaagatttttgaatttggcgccttcgtttcaatactcatttttttttataatgatacgcatttttattcaaaatgatgatatatgctgggctaaatttaaaaaggcattgaaaatgtttacatagtacaataaaattaaaatttgtcatttaaaaatgggaatgaaaattcaaagtccattagccattccggtaacttttttgaaaatcgcttcattcttcaacgccaaaatgaagcgtacccattccaatttgccactgaactggttcaaatgctcataattgacgttcaaaatgtgtatgatttgcatataggtgttgaaaagtttcttcaaacaaaaaaaaaatcggggaaaatcatgaaaattgggctgtttttttactaccgaaaaaacagttggttcgatgccgttgatcaactgttccgcattcatttcggggttctgtgccaacaattgtgtgacctgtaataagatgaatagaaagccaactatttttattttatttttttgctaactgcatgggcctgaaaaatttcggtctggcttggccc

SEQ ID NO: 3744 - DNA, 848 bp, Heterodera glycines
agtcggtagaagcaatcgaagaagcgaaagtgaaaagagctaagcaaaaattgttgtggctaaaaaacgggggggggggggggagaaaggctttttttaaaaaataattggaaatataaattatagcaatgtttgtgaaaaatggaccaatttttggctttttaaacccaaaaatggatttctcaaagtgccgttttctctcaataaatttgttaaaaattcaaaaaaaagtaaaatttccaaaatattcgttgaagaaatcatgcaaaaaacaaaaacacacacacacacacaaatcggcccttggaaatttgattttcacaaaattttttaattgagtaattttttttttaaatactattttctctcaacaaaatttgatgaaaattcaaaaaaaaagagaaataaatgtcccagtccaaaatatttgttaaagaaatcatcacgcaaaaaataaaatcatcccaaaaattggtgcccttgaaaatttgattattttttcataaaattttcaattaacacgatacaaataaataaataatttgcactgcacttcattgttggtgttgttgtcgaatggactgtccgttgcgaattggaaattgcttctcaaatagcgttgtccgctaattgtgaccaaaacggcagaaaatgagtgtttgttgaccatcactgttgcacgtcgttgcaattgttgcccgaattggtcacattcggtgcacagctaaaaaatttaatgcaaaatttttttacggttgtttctgatgtggccagccagccacaggcatagcctttggaaaatttttgttgagaattttttgggcgccataatatttcgaaaattcttt

SEQ ID NO: 3745 - DNA, 2805 bp, Heterodera glycines
ggccataaattttcggtttttttttgagtggagggcgggggggtgtttagtttttgaaaattaaaaaaaaatttttttcgggcgccgagattttgtcgcccccattagacagacaaatgacgaccaccaacttcgcatgagcggccaacaatttgttgcatttcccatttggtgcgcagctttgtgcggaaaatgaacgggcgaagtgccgccgtttgcagcggaattggcacgttgaaacaggcgacaatgttcgtggtcagcacgcgtttcaagtcccggaactgggtgtacgcgctgaagtagggatgttgtgctgcaaaaaatgtgttgtgtggaaaaatttttaggaaaattcaatcatttttttaaacacattagattgcatttaattgacaaatttcgtcgttttttttaatggtatcatcgcatcgagaaattttcgtgaaaaaataaccaaattttttggacatatttaatcaattttcttaactgaaacccaccaaatcgttgccccgattttgtctttttttttttttgaaaatatgactccaaaaaaatgacacaaaaatctgagaaatttttagggaaaagcataattttttttttgaattttcggttcttatcctttttttcacccccccccttaaatttttttttaaaataatttttctagggtaaatttatgcgttgaacacgtatatgacatttatttttagctcttatgttttttaggtgtgttacgtggaattttttaccagtcaactacagtatatcgtggtaataatgtactttgtcccctccaccccatttttcgaaaaaataaaaatttaaaaaagtcgtataaaacgccttccctggggctttgtgaggtcgctgatcacgaatctgacattcatttatattaattccgaatcctgaacccgaattcgaacaaaaattaaaatttaaaaaatttttcacattgccctaaaactgattaaaactagataaattagtcacaaatctggtcattctatacaggttctaacataaatgtaattctaaaaaaattcgaatttcgactttttgttcgagttcgggtccgggatgcggaattggccaaagctaatgttagattcgtgttcagcgccaaaattaccctagaaaaaaatatttttaaaacattttcagggggggggggtgacaaaaaggataaaaaccgaattttcctcgacggcgtcactaattcccttgtttgtttgattttttgttttcgaaaaccgctctcaaaatttgtctattcgtctccgttatacgaataaataaaaataaatccgtgaattttacgtcgattcttggcatagtgttggtcggcgttcgcgtcaaacactttaagcgcatggaaatagaggtaattgagcagcgtggtttccagctcctccttgtcatataccaagatgagctggacaaaaaaaaaaaaaaaattcccgaacccgccggagttctgacaaaatttgagaattttaaaggaattggtgtgccagggtgacgtgttatagcccaaattttcataaaaattttttgaaaactcacaatttttcgatggtaaaaacttaaattaaaaattttctttgaaaatgaagaaaaaattacccaaaataaaatttttttttttttatattatttttttccataaaggaccaaaaaatgtttggagaagggcgaacttttccccggatggacagacagcatcggcctaaagttttgcaattttgaccaaaaaatacgcaatttaaaatttttttttaaaattttgtcccatcaaataccaatttgttgttgttgttacctcattttgtaacaactttctgactattttgcaccgtctgcacgtgtgttgccggctgtacattaagaatttgcgcaacggatcgcaccgatatttgagacaggcgttgaagcacaacgtggactgtttccacttggccaaggcgtccaacgtgtgcaacattgtggcatttgaagtggactgaataaacacgcatgtgattttgaattttttttccaaaaaattttcgaaatctcactggaaaaaaattttttttttatttctatgtttgaatttttttaaaattttttcgggggggaaacgacatgggagaggggaataaacccacccaaatgaactccgaatttaaaattacatgaattgctttttctgaatggaaattcccaaaaaaaaaaattgcggtaaatttttataaattgacgcaaattcattcaaaaagtggctaattttttggccaaactttaagtaagaaatctgctaaaaactcctttctcattccatgacgatacgaagaatttagaaacaaattttaaaaaataattggacagtgggaaagaaatttttagatttcccccccccccccccccctcaaaaaatctgaattttttaaaaatgccagtaaaagtaattgaatatttgaaaactctagggggtttgaattaaaaaaaaaaaaaaactcctcctgcctgtatttggcattgctttttgacttgcctgaatcggtgaacattcgcaggcggccgcactcaatctcttgccacttcgagtctcaattccaccgacctcatcttcctggaaatgaaaatccaaaaatgaaaaaacaataaaatttccgtcacttcatctttttcatcggggaaaaccatggcacttcaaatgcgttgtataaaaacagaagaggaaaagcgttttttatgaattaaaggcaatggagagagcaaaaaaaaaatttatacaaaatttaaattttgctt

SEQ ID NO: 3746 - DNA, 1720 bp, Heterodera glycines
gcttttatatcgtctcttttgcgtcccttaattttcactctgatccgagttactgcggtctaaacacgtttttggtagaattgcggccagaattaaaaaatacagtttgctatggcttcgcatcacccacttcaacgggtgctcagtgtaaatatagactgtccattcaaattctgcctttccagccttatggaaagatattatggaacttttggttccatctcagttgtcaacaccgcgactgcatccttattatatcattcgatagaatattcgactcccttttgtatcatataaataccgtcccgtactattcactatgataataaattttccggtccacccacttttcatatagcgccaatatttggcagttattcatttttagattaaaagaattgatttgtgaaaaatgacccgcgtgaagacccatgaacttcgggccaagaagaaggaggagttgatgaaaatgttggaagaacagaaaacggagctggccagtctgcaggtttacggattttgaaattttcacttgcgattcctagtggatcaggattaggattaccaagtgctaatgtgctaaaaccatattttgttagggttttttgtcgtaggctagaatgggtggacgacttggcaaatacgggtgttctaggttttcatttacggtccaaaactgactggaaaagacgaatttttttttttttgcgaatggcgactgactaaactagagctcggcctggacctggatccaggtccgggtcattttttgacagcctgggtttttcctggagtccaggaaatccaggtccaccttttttcaaaataccgagctcatgggtaaacaaacatttctttaacaatactgcacaacatccgtttgttcattttcatgtttcaatttcccgctgtgttttcaggtgtccaaggtgacgaacggggcggtgtccaaactgtccaacatccacgtggtgcgcaagaacattgcccgcattctcaccgtgatcaaccaggcgcagaagatgaacttgctcaagttctacaaggtttttctaatttatgtttgactgactgtcgtcaattgttccgacccctcggggattggggtccgtaaatccgggatcgccgtatattgtgttgccagcttaaatctctgaattcattcacgcgaactggttcggttggcatacactctaaattggcttgatagatcttgttcatccgttccgtacaagggatggttggtactcagtttcaattttttttttttgaccggaatgccgttttaaatttttgaggctctcgaaacactagcttttgtgcgagtttgaatttaaacgtactttagcaaatcatttgttttaatttcaaatggtatgccaaccataacaaaaataggacaacatatgagacggcctaaaacatctatcctcaattttttttttttttcaaaatttccaatcaatcattttttaattctttttttacagggcaagaagtatcgtccgattgaccttcgcttcaagaaaacgcgtgccatgcgcagagagttgaccaagcatgagctttcattgaagacacacaaacaggtgggccgccaaaaccaatggtttttcatttttgggaaagaaaattatttggctgaattattggagtttttgagtgcggaattttggaaaaaaaccttaccccgggttcagatttctgagatggagatccc

SEQ ID NO: 3747 - DNA, 3264 bp, Heterodera glycines
ttcgtataattaaaaaaaacaaaaatttataatttaaaaattctaatatgcaatttaaaattgaattaatgtttttaattaaaattatatgccatatcggttcacatgaatggtgtaattagtagctaaacgaaaaaagtgttggttgatcggccccgtgtctcggccagatgtgttgccaattttggaccaaaacaaaaacagcacaaaatgggctgttttcgcgaaaatgaatgactaattggacaaggaaattttgtcattggaagaacacgatatttttttgcattattttattcaatttaattaaaataaatgaaatttaaaaattcggttctccaaaatgtggtcataaagcggtcagaaaagtttttgggtaattattaaaaaaatgatcatattttaatttagaaaattttttgagcattttggttttgaactctcaatttataaaaaaaaatggagcttaattaatttattaatttttatttttcaattttaaaagaaacttcttcgaaaaatgatacattttcgatgggtatttgaggaagtttttccgttaaaactggccttttaatgagttttgaaaaactaattatatattgtttctccgtgaaaaacaatctaacttagttttatggtgaattttgttgtcaaaatttcgtttcttaataagttaaattcaaaaaatgttttgctttaatgagttgccggcgccttttctgctggaaaatgtgccaatttaaatacagctgtgtcacgtgcttggttggcagtttttattaaatttttttaaaaatcattcttagaaatatacttcttcaattatagaaattcaaaaaaaaacaaacaaataataatgagaagtaattaacgaaataattcatcaaaatgaatcccaccctcacaaataatggaaaattttcattcattggggacacaaattaagcttaatttgtatttgaaattttcaaattttctgatttgctctgagtttaaaaagaaaatatgtataaaaaatgtttatagaaaaaacaaaataataaaaaaatgatttaatttaaattaaaaaatatataaaaaataataaattaaaaaaacagcaaacaaaaagataaattcttcttaaaaaatatttttttttctcatgctcaaataaaattaatgaactttaatcaaaaacatcttttctacatatttatctggtttcaatgttaatgaatgaataaataaaaataaccaaagaataataatttttactatcataataaattgaaaaaaaattcattttttcttcaattttcttttttcttcgtaatccttccatcccctcttcaaatttaatcaattacttaataaaaaataacttataatgttagatatcaacaaaaaaaagtcgtatattatcattttattatttttttgttttaataggttttgcgcgtcccaaaaaaaaaagtttgtttttcgaaaaggaaactggtacaaataaaaaaattcaaaataaacctacgcttatttcacgaattcgcaaaattgtaaaaatgactaataaattgcacagcaaaactattttaaaataagaaattttacttaactcaccaacaaaattaagttccgctcgccatttttggacatcatctaaatcaatagccaaaaaatccgctattttagcatcagagttaaagggatatttttgcctgagtcggtcgaaatcattcatcaatttctgccattcatctgtcctcactaaacgaataggccaattgttgaaattaaattttttttttttttattagaattttcaaaaaatttttatgccaaaaagctggcggattgaaacaaaccaaaacaaaacgaaacttgagactagacaactgattcgaccgatatttttcaataaaacattcaaaaaaatcgcaatcgaaaaataatggaaaacaagaaatttctcgatcaattttttctggaatatcgcaaaatttatatcgaaaatttcgtacgataaatcgatatcgtaacggtctctgaactaaacatgcagagaaattgaggtccaattaattcagagttaaaaccgattgggctaggttttcaaaaatttcaagaaaccgccaactcttacgcatttatatagatttttaaaattgtcgaaataaaatggaaatacttttcttttctttatcatgttgttgtggttcaatcttttgtgcttttgaagacccagcagaagtgccaattttcaatttttttgccatggaagtgccgccgccaattttcactttattggctcttcttttatccatcattggcgctttgccagttatggtggtgctcaatttttccattttgctcacattgtgttcattttgaaatggggcaagttgcttttgcgcaactgcaattaggtggttagcagtacagaagattttttggcttatttttcgacaaatttgagaggtttttttggcatatttttcaacatttcacaaaatattcgggaactgcttaaggcagtctgaaaagaaatgccacaaatgtctaaatcctaataaaagtcgaagaaaaatgccaaaaatataaaaaaaggttccaaaaaaataaagcaccataccacattctgcttcatgcttcttcttccacgtgcacagtgtttttctggtgatgccaaactgttcagcaatttttttgtcggtaatattttgtgcatttttaattaaataatattcattaattaattgtctccaattctttaatggatgatgctttcccccatcaatgcttcgtctttttttatttgtcagtgattttttgttggaaaattcctgatcagaatcactttccgattcttcttcttcaaacaaagaagaagcactttcatcagatgattctgatttaaattgatcctcttctgctgttgctgctactggttcttccatgaatggtggcgccgccgcgtcaattagcatctttttttctgaaaaaaaaacaaaaattcttccgatcagtcatgaacggcacaaccaaaagggcacgggtttttatatgtctaaaaattcagaaatataactaaaacactcccaaaaaaatgctaaaatcaaaaaatgtaattctgtaaaagatatgcaaaaaactgttgatacttgtttaaatgcaataattttaatcaaaattttgtaaaaaagaaaatatttaaattcttttaaatgttcgtaatttcggcaaaaaaaatttagaagaaaatcaatgccaagaggaacggca

SEQ ID NO: 3748 - DNA, 3533 bp, Heterodera glycines
  unsure (1)..(3533): unsure at all n locations
aattttccaatttttttatttggcatttggtgaccatgcattcagacaaaatttaattttactcaatttatttcctattttttccaaaaatgaggctttaaaaagttacgttttttgtttttctcgaattccttcttccaggaaagaattgtgctccgttttaagcccatttctccagcaattctctcctccatttcaatgaatgggaggtcataattttcatcagttaaatgtaaatatttcttttttaattcaatgaattggtggacaatttgtcgtttttcttcgtcagtttctaaaaatattttaaaatttaattaaataataatttatttattattttgtccaacttggctcttcttctgcgctttgtggttgctcatttttgattacttttgacaattctttgtattttgattttgtaaaaattattttaattttcggatatgctcctaatagtgaataatatgcaattattattttaatttttctttaatttaatacagcaaggtgcctttaatataaatcttaaatccttaaaattcaattcaaatttccttggccgtttcggcatcaccgggccaacaaataattttcgaatttaatgaattttaaatttgtaaaatccgaacaattcattttattcgaagttaattcaatttttttttacttttcgctggctccgaatttgatctggacatctgtttttcggtttgcttatcgtttcctagcaaatctgatttagttcggttgaattttggctgatcattcagttgccttttcgtttgtttttggcccatcggttccgtttttgatctgcttaggttcgacgactgaatgggatcagtttgcttttccttcaatttacgattgtccatcatcggctggggttcaatttcgctaatttttgactgatcagagcctttcgtgctgatcgttgactgatcagagatttgtctttccatttgtttacgttcatttgcgctgatcattgactgatcagacgtttgttttcccattacaatgcccttcgtcgtgatagttgactgatcagaggccattgaccgatcagaaacttgtctttccattacaatgcccttcgccctgaacaatggctgatcagttctcgttggctgatcaatccgtcgagtttgcgtttgtttattgcgctttggttctgtattatttctgctgctggttggcttttcaaagatttgcctttccgtttgtttattatccttcatggcgattgttgatagatcagaaacttgccctcccattacaatgcccttccctctgatcattgactgatcagttcggtgggtcgttagctgatcagtcggtcgattttgcgtaatttgcgtcagtttggtttgcttcggttctgtattaattctgctggttgttggctgatcagaaatttgtcttcctatttcaatgcccttccctctgatcattgactgatcagtttggtgagtcgttggctgatcaatccttcgagtctgcgtctgtttggcgcgattgggtactgtattaattctgctggttgttgactgatcagaaatttgtcttcctatttcaatgcccttccctttaatcattgactgatcagtttggtgagtcgttggctgatcaatccttcgagtctgcgtctgtttggcgcgattaggtactgtattaaatctgctggttgttgactgatcagaaatttgtcttcctatttcaatgcccttccctttaatcattgagtgatcagtttggtgagtcgttggctgatcaatccttcgagtctgcgtctgtttggcgcgattaggtactgtattaaatctgctggttgttggctgatcattgcgttgctttccagccgagggtttaatcgggatttgtggttttgcatgcgcataatttgtttgaaataaatcctccacaaaatcatcaaatggcatattttcgacatgcttttgtggcaatgtaaataaatcatccacaaaatcatcaaatggcatattttcgatatcattttgtggcaatgtttgttccttaatgcccataaattattggtattaaaaaatattaaagccatttccccagagtttcggtatttttcaacatttttttaaattttttttacaattttcaacatttttaaatgttttccattgtttgtcgggatttgactcacacttgaccccggctcaacacgatctcggcggttcttgtccctatcaacactttccaattcaattgtcaaaaataataagccgaaaatgattggccataacattttaactaaatagtgtaataataaaattgagaaaaaataaaattaagaaaataatagtttataatagtaataataaaataaattttctttataaaaatgatttggcaataaaaaaatgtcaataaatttataatactttttaaataaaatgccattataaagcttcgtttaatagttaatgcaaatgcaaatatatatttattgattgccaacattaaaatttattagagtgccacgggaccgggaatttttgcaaaaaccgggaccgggacttgccgggacatgagaagccgggaccgggacctcgattttttttcgggaccgggaccaaccgggaccaaccgggaatttttaaaaattcaaaaattttttaaaaaattcaaattttaattttttttttcaactgaaaataatacaaaattaaatttttattttgttttttatttaataaaatccaaaggttaaagctaaattaaattaatgaaaattttcaaacaaatttctttaattatttcaaacaattaatcatttttggactaaatgatcgaatattatagaaattcagatttacgtttcacataatttttttcggcgcgctttttccaaaaaacttttggggaagaagggggtccggcggtgccgataggcgccgccaggggaaattttgaaaatttgagtgtaatttattaacagattttcctcaaaaaatgataaaaatgtgttaattaaaataaaattatgagtaatcatattttgtcgataggaaagccatgaatatacaaaaagaaaattcaaaatatgttagtttctgtagagggattgaaccaggggaaagaagggaaagcaaggagactagccactaggccatccgcacaatttacagagttacttttaaagaatatattaatatatttttaaaattttttctttttaactccaattttcttcactaatttttcactcagacccccattcttaccagtgcttgtttttcccggttcccggttgccctaccgggaccgggaccgggacctgagcttttcaaattccgggaaccgggaccgacaagcactggtaagaacggattcccggcccggtcccggtcccgtggcactctagttaaatgcgatccaaaatgatcaaagattgacaggagcttcccagctggtataatttatatcgtgttcaattgctgttagtctgagcaaattgaatattangatgacttgtaaatcattaagaaagaaaa

SEQ ID NO: 3749 - DNA, 4550 bp, Heterodera glycines
ttcataccggtcagggacggtcccaggattttggcttgggggggcacctccccccgggcgacgaccttttttttttttttgcttttcacacccgttttttatgtggcgcggtttttgcaaaaaatttttggggtacagggggtccggcggtgccgataggcgccgccgggaaaatttttgcggttttaaatgcggtttgttaacagattttgtccaaaaaatgaccaaattttgtgattttgagctatttttagcagattttcattaaaaatttgtggattttttgaaaaatttagcgacatttcttggaaaatttgggtgaggccaggtctgtggggtggggggtaccagcccagcaaggaaaacctaaaattttcagccaaaatattatttttccttaaaaatttttggacccggggaggtcttgggggggtacgtaccccgcgtacctccccccctgggaccgtccctgccgggaaccgggaccaaccgggaaattttaaaaattcaaaaaattaaaaaaaaattcaaattttaatttatttcaagtgaaaataatataaaattaaattttttttgttttttatttaataaaacccaaatgttaaagctaataaattaatgaaaattttcaaatcaaattttcttcatttctttcaaacaattaatcatttttggactaagtgatcgaatattattagaaattcagatttacgattcacataaattttttcggcgcgctttttcaaaaaacttttgggaaagaaggggtccggcggtgccgataggcgcggcgccgccggaggaattttgaaaatttgagtgtaatttgttaacagattttcaacaaaaaaggctggttttcgggattaataggctcaacaatttgtacggattttcattttaaaaaatgataaaatgtgacaattaaaataaaactatgagtaatcatattttgtcgataggaaagccatgagtatacaaaaagaaaattcaaaatatgttagctttgtagagggattgaaccaggggaaagaagaaggcaaaggaaaggagactagcaactaggaaatccgcacaattgcaagagttacttttaaagaatatattaatatatatttaaaattttctttttaactccaattttcttcactaatttttcactcagacccccattcttaccagtgcttgtttttcccggttcccggttgccctaccgggatcgagaccgggacctgagcttttcaaaatccgggaaccgggacctcgggtaaccgggaattcccggtcccgggcccggtcccgtggcactctaaaatttataataaaaaaacataaaaaatatttgttttataatttgtattaaatttcaaatataaaacaaatttaaaatttataaaattccttttcctcctattcttcgaacttccataatgggcagacagctccaaaactttattatttgttctcctcgccctttgtttccatgacagcgccgccgccattctctcgtgccattcactcattttgtccatggccacaaatgttgccccattattgcccgagggctttggattttattgttgtttaaaaatgccgaaaaaagggcattaattaattatttataacaaaaaaaagtggataaataaattattgtttaataataaggcttcagtgtgtccttttttaagaatttttattttttgtaaacattcttaaaaataaaaagataattttaataaaatgaatgatgaaattttagaaaaatttattagatttttagagatttttaacgtttctgttgttaactcatcaatttttatttttgataaaatctgtcaacaaatcttaaattttgaaattttcttttgtcactaagcctcgagtaaattaaacattttacgataaataattgttttttatatttatttaattttaagggatttttttttctccatataaacattttttaaactcaaattcctattttttgacaaaatctgtcaataaatctcacacaaattttcaaaaaaaaaattttttctttcgacagtaagccacgagtaaacacttaagctttaaataattaattttatatttcatttaattttaagtagtgcttgatgatggatggatgattcatcttcttttcttcaattcattcatccgatttattttattttttttcacttcgattttccaccccccccccccccaattctccgctgcgcgacaatccccgaaaacatttttaattgccatttttatgggttctctccccaccagcccctcactttgcttttaagcaccgatgaagaacaagttgagaaattcaacaaaaattggaaaaaatgatgctttacattattccacattcattttggccccgaaaatttcaattctttcgaattttaaattaatctttacaaatttcccaattcattttagccccgaacatttgaattcgttcgtttaatgtaccgatgaatttattaaattattattttctttaattttgtctcatatgattacataaaagttgatataccggccgatacatagtttggttaaaaagtaatttttgttatgaattttcaaattttacagcaaaattttttggcataggcatgtctctctttccttccttgaaaatatcaaatttttccgaaatttcaacccgggaaattatgtattcctgagcctttaaagttttaacgcgaccttcggccattattgtttctctctttacacatacacacctattttggatttttaaaaacggtttttaatctcatttattcaaaaatatttgtttaaaattcggagcagagaaaaaagatacgaattttttctaaaaaaagtctaacaaactcgttaattttttttctgcgtgattcgcccctccgggcacatttccgtctgctgttgtggaagtgaaaaagcacacgacaatttgtggtgcaccacgacacaacagcaacaacaatttctgtgggggttgtgctccaatttcatcgccccatctgtgctgttcgttcgttcgttcgttcgctttgctttgtgttgttgagacggtcggtcccatccttccgcccgaggggcttttatttgtcggacggatgagtcacacacactcaacacacatcagtgagtcatgcgcccctcctccgggcgaggggaaaaacgaacgaaaacaaaaaaaaacctgttttttgagccagctccagcccaccttccgaaaattttgaattttacaagcaacaaacaaagcagcaacatagtttaaaaaattaattggttctttatggaatttttgaggatagacggctgtcaacaatttttaattatatgtcaatggaaaaccattcaaaaaacttagttgttttttaaaactgttggggatagcgcagggacaaacaaatcggcaaggtttatatatatatattgtataaaatccaaaaaaatagaaaacatgcatgacttttgaacaaaatcttattaaaaattgggtagacaaaagctaattgtaagacataaaaaattcatcccttttccgatttttattttttcatgtttcatttctaccttttgaagcttttgttttctcttgagagatgactccattttcaccccccccccccttgggagggggcggcggctttattggaggggggttataatggaggcggctggcggctatattaggggaaatacggtctaaccctcacggcacattttgcttcaggcggttcttctttttttcgctttttatatttttaaataacttataaaatcatttcaataaacaattaataattattttactccgacaattaattccttttttcctctctttctcatgccgtccgtcggctggcacattgtcgctcgtcataattttttttttcttttgtcttttcgctgctgctggtgacaatgtgacaattttcagcccggaagctactgaaaattgtattgcgcccagccgaccgcccccggcggggcaaaattccgtgcaaattgatgacgacggacgaccaccaccaccaccaccacaccatcaaaattcaaaattcccccctcaaattcgtcgccgtcggcgatggattttcatacactctcatcattcatcagtttctcgcataaccaaccattgcacacattcatcccattcgcacattattattgtttttgtacctcacacaaattatgcaaatttgaaatcgattccatgtattgaaaagtttcgtcaaaattttccgggaattattgttttaaaaatgcagcacagaacccggttttttcgcgcattccaaagcgacacataattacttttttcatgaaattaagacaacataatcaattagagattcaaaatttcttgaatcaaattgatccattaattttcttcctctcggggaagctacttctcttctatctcagttcgatagtcgaaatttagattcccgaaacaatttttttcttaaggacaaagtctaaatcccatttgattaaaattaattctcaaattcgaaaactttttattttat

SEQ ID NO: 3750 - DNA, 4859 bp, Heterodera glycines
  unsure (1)..(4859): unsure at all n locations
gctcccatcattctcttgtcgaacaaatagcgcaacaacgagttcaggtcggtcggtcgcttggtttgcctgcatttggctgccctttttgcaatggcgccgcctttaatgattaacccaacaacaacaacaaaaacaattactattctataaaagagacacttcatagggcaaaagctttccatattttaacaattggtctttactaaataacatttaaatggcatttgtttgatcagtgatcgggagcggcaagcagctaacaaaccaaaaattaaagaaaacaatccgattttgaatttccccaaatatttaaaatttcgttttccatttttttttcatttgctttccacttatccaggaagagtccgtgcgtctttgtgtgttctcctcttgaacagtgaacgagaatcgggcaccggcacttcgctttgcggcagcaacaaaagtggagggaaagaacaatcgaagaggaaaaataaaatgggagggaggaattggctatgattttcattagagatctgaattttgaaaaaagcctgtacctgtacctgtacctgtatttcccgattggcctgtacctgtattctgtacctgtatttcctgtagaaaagtacaggaaaatacaggttttttcgtgtttagctgtacctgtacctgtactaaattctaaaaatggcctgtacctgtacctggatccaggaaaaatacaggcctggatccaggtacaggccgatctctaattttcattagtagaatgtttatttttttgaactccccccccccccctttatacaacacaccgaatcagtttccttataaccagaagccattcctccaaaaatttgtgcttcaaaattttacggcaaagatgatgctccgattttgaaggctttttaatttagaaaaattttcctaaaagcatgtcatgcctgaaatttcggctctaattttatacatttcatttctattgccttctttaaacaatactaatcttttaattaagaatggatctgacacctgaacaagaacgcgagttgtataacgcctacaatcgtcccaatgtcccggaggacctcaccgaagcagaactgtcgcatgaagttcatttgggggcgtttaatcaagcgatgcaaatgcgtcatgcattgtctacaacagatttgaatgccgcgccaaaggacatcagcattactctaccattcacaccggaagtaatcagaaataaaaccattttttggtttcgggctgtgattttttaagcattttaagccataatttgacaatttgtgccatttaattgggtacttttacacttacgccacataaatttttttaattttgttgttttctggggtattcgggtgcgctgatcacgaatatgacattcatgtccatctatttagaaccccggaccagaattcgaacaaaagccgaaaattaatttttcacatgtattgtccaaaaacgattcaagtgcactaaatggccgtgaatctctattttttattatatgcctgtctatttgaatcggttttggacaataaatgtgaatttggtgaaaaattaatttcgccttttttcgaattcgggtccgggatttgaaatgtgtgaaaatttggtcgttttggggtatttgttttaacaatttcgcgaacttattcatttttttaactagaacattcgtcacatcgagacaaggccatcattgacttgcgtccgctgcccttgcgtacccatgatgtggatgttcatggttcaacaagtgaacatgtgccgccccacttcgaggaggtgccagcgctgtacactgaatattttgcgtggctcaacaccgaaattgcaaaagtgcaaacattttggttgaacgagtgcgtcacttctcgctttttcaggtgaacggaatgtccaacgaattttggggctggggcctggaggacgacgacttttacctcagattgaagtgagcattttaagcattccgcgaaaaaaaaacatttggaaaagccatttttacaaaaattctagagatcggtattttgaaaggagccccgacatttgcggccccgacatttgtggcccgacatttgcggcccaacatttgcggccccaacatttgcggccccagccaataaccgacatttgcggccccagccaataaccgacatttgcggccccagccaataaccgacatttgcggcccgacttttggggcccgacatttgcggccgatttcttaagtgttatttcccgacatttgcggcccgacatttgcggccccaaattactcatttaaaaatttaacaaaaattaaccactttctagtttctctatatatcacagtgaggtcagatatagttatttgaaaattccaatttatttgattttaaccaaatttttcttttcaaaatttaaagaacattattctaatttttcaacaaaattgggcttgctcaaggccccaacaaagcttgaactttccatccattctactaatcctgaatttctacagtatcggccagtcgatactgtagagctctgaggtgccctaataacgtttcgtcattcctattttcatcgttatcataacgcaaaatcaaatttttgatcgctctgtcattttccacatattttttcttccttgtttcagtcaggccccttgtggggtccaattcaaatggccgaattctgtttcgctgatattcctcctcctctttaattccgtttatgaatctttaaaattaaagtctcgagattagagctcttaaaagcgaccgtccaatttgagcaccaatcggtccaacacacttctgcatttgcacacgcggaaccgacggaggaatttcgcagtggatgaatacaggaaaaaggcacggaaaggcaaaaagtgcaccggaaaatcggtcaccaacggatttcccggaacaaaatttttttagctattttttttaaatttcaatattttaaaatttaaaaaaagggggggagactaagtgctcccctggctcacttccctctctctcctgccccccccccctaattgaaaatgaatgagttttgagaaatttgaatcatttaaacttttccattgaaaattattaaaaaatggcagtcctgatgaatgggcgtttctaatttaacttttttattttgtgcttacaattagtttctgggggttatcgagggtaatgattacgaatctgaacttggatttccccaatttcgaaccccggacccgaactcgaaattctgcaaaaaaaaattttcaaaaattgttttcactgatttcgagtcagcaaccgccatagcaagcattttagcgatcatgattctgtctttcgtcattttggtctcacgttgttggactgtacccatgcgtatggcggttgttgactcgaaatcggtgaaaatcaattttggaaattttttttgcagatgttcgaattcgggattagaaatagcacggttctgagttaagattcgcgatcagcgacctcgaaaacctataaaaattggttttaaaaatttataaaaaaacaaaaatttaaggggcgtaaactgcagaagtgcccagatatttcaaatttccattaaaatttacaactcaatctccaacaactgttttgattccccccgccccaccaaaaaagagaacccaggaaaaatccaccgacggaatccgtccgtccattcggactctacaaaatatgctttacatattacaaatttggccatttttaggctttcgtcgcggtgccgagccgttgccgaacggcgaaattgtgccattgtcaatcgcatcactcttttggggctgaacttttggcgtgtgatgtttgacgcggacaaaatatattttcaataaaaaacgagcaaatgttttttgttagtgcttttgataaacaatttttccatgtttcttgcaaagatttcattttttgtcgccaataattgaaaaattctgtgtatattttgacatttttcgtccaattattgcattttgtacgccgaactaagaataaaatggttctcttccatcgtaaagttcggcggaggagctttttggttgttttcgtcgttgtgcttttgctattgctcatcacttttgtacagattgctttttttcgtcaaagttgcatgggtaaaacaaattttagtgttgtttaccccccccccctgattgaaaaattttaaaaaaattccataaaaaagttttcggagtatcatccttcggcaaatttcctgcgagctctactcattattaatgaggctttttgaccacaacaattggtagttttcatctgcatgttatattctagacataaaattgtcaattaatttgattaattagccaaaacacaaaacaataaattaaaaggaaaaaatatgtgtgcgaaattatttaagcatcatcacttttctgttcatcttcagccatttgatgctggaccaaatgccgcgggtgcaattcagcaaaaaagcggacctaagctcagtgtctctgttccattcctggctgaaaaagggaaaatttttgaaaaattatttggcattttgtctcatttctatggcttaacgtaccgcacaattttgagtgccggaaggaattgccctttttgggcaaatgcgagcgcaatgtacaggaagcagcgcgaaatcagcaccgggtcaccaatttcgatggccaaacggagctgacgaatggaaatcacaaaggcatgccgaatctgtgggaagaattgggggagggggggaaggattttggcgattaaacaattaaaaacaattaggggatcgcttgccgtctcgaatttttcgggagagatcgtttccccccaaaaattttttagaaanattta

SEQ ID NO: 3751 - DNA, 783 bp, Heterodera glycines
gggggggagacagatagaggggtaaacgtagccatattttttttatcagtctttaccaccttctcccaccccagctccccttaattggatgatgtaaatgaaaaaagtcgggattttggcaccagtccagccaaatcgcagaatcccgaccaaccccaaattaaaaaaatatatataatttattacaaatttccgactaaaaaagcccattgcggacacagcgccgccaagcgttgaaaggcgccaaagctcttaagaaagggtgaaaagatagataatgtaggtacataaagataggcgatggtcaagaataacaacggaccggtctcgacatgcagaactgtaaatgagggggaaaattgggaaattgtggcaaaatttgtggaaaaattttacaaattcgtcataataaattaaaaaaaaaatcgtttttaaaatttctttttagtaattaaaaaaaaatagggggggggggatgacccagacaaatcaactccaaattccttttctgagcctcgaattccgatcccgagattttagagaagtggaaatgcgaattccattctcttccctgtttttaggcaattaaaaaccccaattaagtaattaaacgcgcctataaaaacagttgggggcacattttcaatatgtttttaaacggtgaataaatgcaattatcaccagtgcttgtcaatgtgaaagtccgtcgctttctttgatgtcggccgccgacggcgaagggaaagtcgcacaaatgatgaggcccaaaagtgaggggggggg

SEQ ID NO: 3752 - DNA, 1618 bp, Heterodera glycines
cggcgcgccgcaaccgcgccttcgaatgccaacagatgagcatttgacctccgcaattgtcattcatttttatgcctttctcttatttggacaattttgtttgattttttgtttgcttgcccttttcttaatgagcataattaatttttttttgttagccccgtcccctccgaattttcttcgccttcgccactcccgcgcttccctatgctggtaattgcagtacggccacaattccgcgacacatccgcactccaattgaaggaccaactccggcacaactgcagaggtcgcacagatcaaagggtatggtctaataaataattgagaaataattaggccgctggatcgaagccgcgaagtgcgcactgatcaaaaaaagtacgagtttgggtctgcgagagttttgggtttcgggggggggcaatgttcggtttttatattcttgattaatgtgtgaacctccaaaatcaattaaaacagtaatattatacaaaatgggtgctactgaagcaataatttttaggggaatggcgcatttcttcgctttcggtcccattgaggaattcggcttcgatttgcatgccgaaaggggcaaaagccacttcatcggtgccgttgacaaaggcggcatcgccgatgagtccgtccgattgaccgtttccattctttgcatttcattcggtttgtttagtgccggcctcgaaacatggcaaagaattgtcggcgataacggttgtttggtctccgtacaaacggcgcaaaaggtgaactcagaaaagaaaacaaaacatacatggaaaatgaggcgagggcagcgacgtcccaggatttgggcttggtttatacttataaaagaagttttttgaaaaaagtgcaccacaaaaaaggtctttaaaaagcaaaaaatcgtcggtaaacttggccccactccttttgtaaaattgctgcctcgaaatttgtggtcaaacttttgctgcaatcagcaataaaagatattagcggcccaattttttcgacaccaatcaaaatataaacctcaaaatttttgtccaattcaatataagcgaattttatgttttttttttgataagcggattcaaattacaatactttctcgaatccattttaactggatctaccaagtataaaaactgaaaaaaggaaagtataattgtggagaaatgtcagatcgatcagatcaaaaatctattgtcttgaacaaactcagtttttgaaaacaatactaagttgaaaaagtccggcgtaatttgaagaaaaaaaagtatttttaatgttctattttgattggggtagaaaaaatcgggccgtcaatgctcaaaaatggccttagaaatggccgcaaatgtgaagcaaaagtcggaccgcaaaattagtgacacgataaaattaagggaaccaaaaggcgcgaacgaatgcaaacgatcatttcggtggatgaaagtcgcgagccggcgacccctcagcagaaaaagcgcaaacaaaagcagcaagcggtagaacattgcttgtggaagtgccggaagagagcatcagcaagcggaagaagccggcgggagggaaggcgaattggcgagaaaacgagggacgggcggaa

SEQ ID NO: 3753 - DNA, 4856 bp, Heterodera glycines
  unsure (1)..(4856): unsure at all n locations
ccctcccccccccccgagaaatttttttttgaaaatttctgtttggaattttttttttaaattttggagatgggccgaaacggggcaactgattggaactgatacggggagatctaccgtctgtaaaacttttatgtgacgggctttttccgcctttgttgaatttccactttcaaccctccccccccgccagcttatccattcattaaaaatccggtttcaatttacaaacacatccctccttcattccctcccccattcaattaatccgccgtcatccgcctcaatcctggaaaatcaatccgcaaatgatttctctctgtgtctatgccctcttctagcgccggaggcggcacggattagtcatcaccggtcggatcggcgccggacggcgccgctggatttgtccatggtcattgaatcttctccgtctctccttaccgcccccctaacaaattcgtgttgtttttaaataaatatttatgcctcggtgaaaattttcatttctaaaatagggttagaccccaatttcccccgggtttttttttttttggcatttttcggggaattccccgacccgacatgtccccgacagtagcttccccaaaaatttccatccccccgatttcgggatgtgtaaatttttaaattactcataatttagggaggcccatgggtttaaattctctcccaccattaaaaaaaatcaaattttcaaaaattaaataaaaattttcttcgtctcttctaattggctcattcagcctgtattttgtacaagaaattttgagaaaaatgcgctgaaaattgactttgattagcatttttttatcccccccccccccccccccgaccgtccctggtattgtctaattgctttttctttactcacaattgaccggttgctttgttttcaggatatcacaccgtttggggtgtcaccccggccctgcacagtccgttgatgagtgtgaccaacgcggtttcgggcatcaccgccgccggcgctcttcatttgatgggagggggttggtggctctgtcttttaacaattgtccacttttgttccttttaggctattgtccgacaaattctgctcaaatgctggcccttggcgcggcctttgtttcctccataaacattggcggcggattcactataacaaagcgaatgcttggcatgttcaaaagaccaagtaagaaagagaaatggctaaaattgataatttacacatttctcacaatcaattgtttatgttcaaattaagctgatccaccggagcacaattggctctttgctttgcccgccggcgctttaattggctcttacgcttttggcgcgttgaatggttttgaacagattcatgccattggcgcgttcacttcatctctctgttgtgtcggagcaatttcgggcctttcttctcaacactctgcccgaattgggaattctttaggttttaacagcaaacattattttaatgacctgttcaattaggaatgattggagtcagtggtgccttactgaccacgctgggcacattgaacccggacccgcagacattgagccaaatgtgtgctgccatcgcttccggttccctcatcggctcaatcgtcgccactcgcataaaagtcaccgatttgccccaattggtggcactttttcacagttttgtcggaattgctgccacggcgacgtgtgtcagcaattacctagccgagttttcgcactttttggccgaccccgcaggcacggttgcggtgaagacttgtctctttttgggtgcttacatcggtggagtcactttcaccgggtctttgatggcctatggaaaattgcagggttattatttttagtttaatcaataacatgtcaaattggtcaattccaggtcttcttggcagcgcgccgactcttcttcccgccagaaatatgcttaattttgcacttctcagtgccaatgttgccgccctcggcttttatctgacaacggacagcatggccatgggcttgtccatgctcggcactacgtctttgctctcctctctgatgggcgtcaccctaacaatggcaatcggaggtgcagtcgattttttttttttttgctaaatttcccaatgcttttgcatttaggtgctgacatgcccgtagtgatcacggtgttaaactcgtacagtggttgggctctctgtgctgagggattaatgctcagcaacaatttgctgaccattgtcggtgcgctcattggcagttctggtgccattttgtcccacattatgtgcaaagttggtgattttttgcgttctgttcattatttcatcgttttaggcaatgaatcggtcgttgttcaatgttattttgggcggcgttggcacaaaatcgcaaaagggtggcaaagcacaggaaatcactggcactgctcaatttgcggaggtggaccaggtttgatgatggatacagtgaatttccatttcaaaaattctccataaatcaggtcgttgacatgatcaaggatgccaaaaacatcattattgtgcccggttatgggctttgcgctgcccaggcccgatacccaatcgccgaacttgtcaaataccttcgcgagaggggtgccaatgttcgctttgccatccatccggtggccggtcgaatgcccggccaattgaatgtgttgctcgccgaagctggtgtaccttacgacatcgtggaggagatggacgaaatcaacgacaacttccccgacactgacctcactttggttatcggagcaaatgacacggtctgtccaattgcgttcactgattgtgtgaaaagttttctcgtgcggtccaatgcttttcacacttcccttaattaaggttaatcgcgcggctgaggaagaccccaactcgtcaatcgcgggaatgcccgttttgaaagtctggcacagcaagcaggtggtggtgatgaagcggactatgggtgttggctatgcggcggtggacaatccgatcttcttcgaccacaacacgcagatgctgctgggggacgcgaagaaagtgtgcgacaaactgttggccggtgtcaaaagcggcacttaacgcattttttggccaaaccaaaaacaaataaaagatgtaaaactgtccattttaagcttaataataataataatagggcatgctgacaatttatattttaccaatttatttttgtcaatgattcgaatttctctgtgactaaatgatatagccaattcccttctctgtaaatttttgacaattatcttgctcaatcccttttctctctgcccataacatcttccacctcaaatccatataattctaattgttaattcgtattttatcacggcatttttatttgtactggtgacttttacaggtttctttaatcccaatggcttgcctttcgattgtacgaattaatagaaaataatttaataaaaatgcaaatgaatttaattctcttattttgtactaaactttagtcatcccagaaaaagaaattgatgttttttgtccgtgctcccaaatttttatggtggtctcttctggcaaataaacgtcagaaaagaaaatgtattattttccctctgcaatttcgggtgccaaatttattatggccgttggctaagcaaatattggccacattccttgtccctccctttctctctcggtcctcctcctcctctctctcgaggatggtttgtccctgcctccctcactcaattgccccccccttcatccatcgatccatcccgactgtctcttcccccccccccctctttttccagactctctctctcctcgttttgttccgccttctccctcctatccattgcttctcccaatgcttttccatggcttcttctttcttcttccactgctccccttcccttccctttgcttccacaattccattgcttttcccccgccgccgttctttcacgtgcacaataataaaaagcggtcacaacaattattatgtattatttgctatttttatttgtcgtctctaaaaccgtgttgacgtcactttcccgaccattcgtccgtcgttcttcccattctctcatttactcatcgtcactcactcactctttcattcgttttcgtccatttgtgccataattagagggattagcattcattccctcttcaattttgtttgttttccctttctttcccttttattctttcttcctttttcgattaaacaatgccttctttttcagcgtttctttcatttccattgtttgaataacttttcttttccttccattttctgttgtccttacgaatggaccgtaatgacttgcagcggacggtggagagtatgtacgccttcaattcggcggcggatcgcgaaattggcactcgctgaaggaaaagcaaaaatgttaagcaaaaaactctaaaaaaatttatttttgcgatcatcgaatttcccagcagggcccaatcaagggccacccaattttacatcaaacttttgtttaaaattgggtacttatacagtttgacccacataaaatttttttttgttttaatgataaaaacgtgtttccaggcgttttcggggccgctgatcatgaatttgaactctatttcacgaatttccgaacccctaacccaaattcgaacatttttttgaaattttttttcaaaaatcggttttaaatgtgccaaaatttcttcaagaaaaaatcatattaggggttttaagggtcggagaatccgaatctgacatttattatgacctaagtcgaacccagaacccgaattcgagcaaaaagtcgaaaaatcaaattatcgaatttttggcgctagtgtaaaaangttaccctnttttgaaaa

SEQ ID NO: 3754 - DNA, 1752 bp, Heterodera glycines
attttcgtgcattatataagaaaactttcttggtactgcagtgtccattttctctgggactcagttgtcccagtgcttagatggcattggttcgagtttataccttgttttttagacttagctcatcaagagctttcgaatgataccaaatttgtccgaatttgagcgttttaaaaggtcaggaacccccccccccttttcactcaaattttcgagtttaaaccggttaaaaaccggttttttggcatttccgcaactcgatacatatttttccgtgcttagctcctcgagacgaatcgattggtatataatttgacccattttttcacggggcgttcactaaagcttatccatggcttacatattgagaaacaaactaaaattcgacaattcactaataaaaaatcatttcaaccatttttagaccaaaaataaaaaattcgataatttgatggcctttctcgcagcagtgatgaagaggcaggaattatctactttgagacggctttcaaagaaatggcaaacactcaaaacaacacctgacagtaacgtcaggaggcggaacttcggacaatttggcgcgccattcaatggaaatagcgcatacattcgccataaatttcctcaaaacaaagggaaacacatcgctagaaaaagcgcatgtgcatatcaacataattagcactagcacggtatgtatttgattaattaacaaatgggtggagattccgcaccacatccgaaatgaaattccttaggaaatgggttatttttaaatttaacttttaaaaaatctcgttaaaatttgcaaaaattttcaaaggtgtcatataggcactgccgtatgacgattgacattcccttaattttttttgggaaatacactgtagaaatttttgggaagagcaaaaaagctaggattttcactccgaacgagaagacctttttgttgttgatcgcaaaaaatggcacgtttttttcttaaacagtagttattagaaatggaatatcttccagattagtctcccttttaaagttgaacagctttttggcaggtcgaaatcgcaaaagtgaacggcaaatcggccattccgtccggttggggtgcagactccgcggggcgtccgtcgactgatccgctgtcggtgctcgagcggactgttgccattgggcgtagtgtcggaggaggacggctcacacaaaggcaccggaattggtcggtggagattagcatcatttgtgccaattagcagaatgaagggccttccgaatttagcgatgatgggcgaacttttttgcggtcttttgggaggcgcaagttttggcaaaaacgtgcgatcgtggcgagaagtgcaaaaggcagccaacctggtaaatgccgactttgcttgaccagtcgcttgtcggacgaattgccaaatccaatggcattattttcaatattttgtcccccagggccaatgcttcgtggccattgaccccgaatgctttgctccaacatttgtggactatttgcagttgttcctggaccaaacacgtgggcttaagccggttatcactgctcttcctccatggcattcgatcgcctcccttccctccttttagcgcgacccctccaaatcggtgttagtgcccggtgaccccgaaagaatgaacagcgaacggagcgcaaaggctggcggagttatttactcagcaggacaaattcgggatttgctcagtcggaggagcacttaacggcaattatcactt

SEQ ID NO: 3755 - DNA, 1597 bp, Heterodera glycines
attttttttcctggattctacgtagtctaattagtaggaaaaacatcttctttttcgtatttacgtctaaaagtcgggttgggttttttaccgattttgcctagactagtaagaggagttttttgccatttttaactcatttactaatgatatgtataccatttttcattaatattttatattatcagccggctttatattttacaaaaaatctatcaaaatgttcatccgtctccaatcctccatattgcctgttcggttttttttcacctcaaatcatccacctctattgcttaatataactaccaaaaatccaaaaacatcccggtcattatgtgtgataaagtctgagtcagttttcgtcaacaaaattcccttcaatgagttggtcgtttctgcactgagagagtcgcatcctggtattaatatgatggaattatctttttttttgtttcgttttcattgcagaagagcacagagtttctctgacgccatccgctgctgcaaatttggtcaaaaagggcatgaaagtgcaggttgagcaaggggctggtgtattggcgtcagtaatggatgaagacttcgctaaagttggtgctaaaattgtgaaccgggaagaggcacttcgtgctgatgttttacttaaggtgaactgacaaagatttaagtctctcacaatttttaaatttccattcgctcagatgcgttgcccagaaacattcgaaatcgactcgtttcgaccaaattcaactttaatttcgttcattgggcctgcccaaaacggaagtgttgtcgagctgcttggcaagaagcaaatgaatgtctttgcgatggattgtatccctcgaatatcaagagctcaggtgacagacaatctcattagcaagtaattatatgaaattatatttcatttggattataggtttttgatgcgctttcttcaatggctaacattgccggctataaagcggtgattgaggcagcaaataattacggtcgttttttgtccggccaaatcacagcggcaggaaaaatcccacccactaaagtgttggtggtcggaggtggagtagccgggctgagcgcaattgcaaccgcaaaaaatttggtttcaaagtttcactgtattactcaacaaactcgtttttaagggtgcgattgtcagaggtttcgacactcgcccggcggtcaaagaccaggtcaaatcattgggagctgagtttttagaagtgagttttaaaactgttatttctcattaaatttttgttaatttgattcaaatacaggtcaaaattcaagaatctggcgagggcgttggaggttatgcaaaagaaatgagcccggctttcattgaggcggagatggaactttttcgtcaacaatgtcgcgaagtggacattatcatcagtacggcagcaatccctggaaaaaaagcgcctgttttgtttacaaaagtgattttgtttaaaatggcagttctttttatgccgatttcaggacatgatcgccctgatgaagcccggctccgttttggtggacttagcggcagaagcaggcggtaattttgaatcaacgaagcctggagagatatacacgg

SEQ ID NO: 3756 - DNA, 2259 bp, Heterodera glycines
  unsure (1)..(2259): unsure at all n locations
taatttttcaaattctgtccaatgcaattcgcaantccatcggaaaatttcctccgattcgtcgtcgatttctgtgccccgcttttcgaattctcncctaatagccattaatttgtcaaattcatccgctgtgttttgtccaatttggcccttcttttgctcaattaattttttcatcccccaaaacatttccctaaaatatccttcaatgtttttcagtttcgtctcgtccatgtcaaaaattttgtcataaatttcttccgcttcttttttgatccgatcaaaaagtgcgttctttttccgctcaacagtgagcttttggccaacccatcgcataaacaccgccaaatcggcgccgattttgtgacttactaccaacattaggtcttcttcctcaatcgcacacagaacattcacataatggtcccaaagaaggtcgtcatttgtgagtgctaaacatttgagatagagaagagaagctttccaagccgggaggaagattaagggactaattgaggtgataatgaccttaatgaccgagcaaatttgattaatagggagtgccggtaattcagccggcggtgggacgacgtccataaggctagagaggccggttctctctgactcaccccgtttttcctcaatagctccttgcttgtttattaattacatatttaatcaattgactttaataatccattgcctgctcaattagttaatgatgataaccctatttaccactatccgtaaattcttctcccgtcagtccgagcttttcccaaaacttttcaaacagttctgccaagccgaccagtcgcaaaaggcgagtttttgctccgggatgcttcagaagttgcttcagggcgttcatttcgctgaaatctataagaagggaagtgagcatgttgccaaagtgctcgcggttgaactcctccaacacttccgtccgtttttccctctcttcgcatttgttcgtctgcaaattcttcagcaccttttccgtcaaagctccacaataatctgcgttgaatgtcaaggaaaacgttgtgattttgatcatcacacaaagctgcacatgggagccaaaatgccgaaaagcgtcgcgtttggccatgttcgctttggcaacgagtgaatcacaagcggacgaacggcgcttctgttgggagagccgcttgacgagcatccgtatctctctgatcataatcgcggtcaacaagacaattttggtccttttgaactgctccgagtcgctccggtttaacaacaattggcaaatgcgttcaaaaagggttgtgctcaccatcgtatctgaaatggacaaaaagcttcccgctgactgttttacaattttttgattagccatttaaaaaaactcgccaattcgtaaaacttccggaaattcattctccaaaatggtctgatagatggcgttggttattttgttgagcgtcgtctttaccttcggaacactttcaatttcatagcacaaaaaatgccgtaagccttcgctttcttccaaaagttccatcaaagtttgtccaatgattggcttaatcctcggcggattggccaacttttgcaattgctcgttaaattcttttccattacaatccaccacgtctaactttaattgaaaatgaattatatctaattaatcattattgtccttatttctatttgccttccgcatttaagcctattgtccttattttgtccttaattctcaaaatcctctttttccacctctataatttccagcactcggtttttgcgcataaattttccaaattcctctgccatgtttttgttttccgaatatgacatcattaacaacagaattgacaccccatggacgtacattaagcacattgacgtttcgatgtcgcttttcgtttttggcactttgccgactgttttatcccatgtgctttttcgcttttcaatttccttcaaaaattcgttgtctccaaatttttcgccaagttcactcacaaaatccaccattttaccaacttttcgtttcaaaagccatttaatagaatttgtcttaagctcccaacatccgtttatttggtcacatttgtgccattggtcattattcagaaaaaaatgcttgaaattgtcctctaattcaactatttctgaagcttaatgtattaaaagaaataaaataattttatttatttttgctttttctgcgtgactggacaatccgacaaaagtggacaatccgacagtgaggacaatccgacaaaa

SEQ ID NO: 3757 - DNA, 421 bp, Heterodera glycines
aatttttaaatctcctaggacgtccatcttttggcgacgaatttacaacttattttggcatttttctgtctttttaggcaccagaaagttttttttttgaagaatttaaggtaattaagttttataaaacttattttaaaccataaaaagaacaaaattaagttttttgattaagttttacgtggttttctcccttaaaatccataataaaaaaaatttaaatgccttttcgggatttttgtgcttttcatgcttttttcaatttttggtgcctattaatgtgcctttttcgggattttcgtgcctttttagcgtgctctatttattaaattaatttttggactgaaacggtccttccctcacaaaggagaggtacccaagtgacggtgggacttccgaaccaaactttcagggtagatag

SEQ ID NO: 3758 - DNA, 2792 bp, Heterodera glycines
  unsure (1)..(2792): unsure at all n locations
aattntagtgtaattgttaacagatntagtaattaaaatagtaaattaaatgaaaaaaaacggtaaaataaagtgcgggcatatgggatcgaacccatattaaaaaaacaacaaaaatctcaagtgcgcacgactaaactacaacatacaacagttcaatgaaaccacttattttttttactaaatttttgttgaaaatttccatttgatggtttttatataacgccccttttgatggtttttatataacgacatagcacccatagcattacctcgttcgtttggtactgcccagagcagatgggtttactacgacacatttactgaatagtcgtcagagtaagtggttctcacccttctgatgacttttatttttacgaataaataaataactaaaataaataaatatgtttttgtgcccaaaccccaaatgttacagtaccacaccaaaattacagaataatcctctacgatcaattaatttttctctcgtttatatgtacgaacgacggcgatttttttttaccatttcattatttctttttatttaaaatgaataattttattataattattaatttatgtagaatttgtaaatgtttcaaaaaccgaacgcgaaaattaaaccgattcaattttaataaaaacaatttaaaaatgatataaagtgattggatcaaaaagaaaacagcaaatgatcaaacaaaaaagtgatgagaaaatgccgaaaataaggaatgcatatttttgttaaagcacaaaaatttgtaaagaataagcaacagacagttgaagtcacaataaattaatgaactcgtcagtcaattaacgcataaaaagacactaattaatgaactcattaaacacacactaatttccctgcagtttttttttgccaattatcaacattgatcactgcggcgtgtggtaaggaggacggccaggaaagtaattgccaatatgaccttggctataattggttgtgatgccgtaggttggtgccaaaggctgtggcaaagtagaagctgcggaagccaggagacgtgcagcaaaatgattggctttaattgagtaattaggtaagtttactgataagaataatgacaaaagaaccagaagcctggcctaagaggccataattagtgccgtaactgggtgccaaagactgtgccggaacagaagcgacggaggtcggcggacgtgctgcaaaatgattgccttcaatttttaaatcacgtttactgataaaattagtgaaaaaattacctgaaagatggcctaaagggcgttggccataattaatgccgtaattgggtgctaaatgcgattccggagcaaaagtgacggaattcggttgacgtgcgggaaaatgaatgcctgcaatttttaattaggtttactgataaaattagtgataaaaggacctgaagcgtggccgaaagggcgtaggccgtaattaatgccgtaattggctgccaaaggctgtgccaaagctgaagctgcggaagtttgaggacgtgtgacaaaatgagcgcctgaaacttattttgggattatcacagatgagatcaaatgataatgaccaggaagatggcccatgaggtgttggccataattagtgccgtaattaggtgacagcgcagaagaggcggaagttggtggacgagcggcaaaatgaaggcccaagggttgctggcaataattagtgccgtaattaggtgacagcgcagaagaggcggaagttggtggacgagcggcaaaatgaaggcccaagggttgctggcaataattagtggcgtaattgggtgccaaagactgtagcggaacagacgcgacgggattcggttgacgagtggaaaaaggaatggctgaaagttgtgttaatttatcaatggttaaattagtgataaacggaccaggaggatggcccaagggttgctggccataattagtggcgtaattgggtgccaaagattgtaccggaacagacgcgacgggattcggttgacgagtggaaaaaggaatggctgaaagttgtgttaatttatcaatggttaaattagtgataaaaggaccagcagaatggcctgataggccaaaatttgtgccgtgattcggagccaaaggctgcgctggagcagaagcagcggaagccgggggacctgcggcaaaacgaatgtctgtaaattcatttaaatgccatttactgtaattatttggaccttggcgctcaactttggccatttgttcgttgtaacggcgatcaatgacggctttttcttcgttataacggcgactgatttcggctgattcttcgcgataacggcgttcgattacggcggtttcgtcgccataacgacgctcgattggggcacttttttcttcataacggcgatcaatttcggcaacttcttcatcatagagacggtcgatttcggcaattgcttcatcatagcgacggtcgatttcggcactttggtcgtcataacggcgatcaagttgggcaaattcttcatcatatcggccatcaatttcggctatttcttcttcataacgacgctcgaccgtatgcgtggcgacatgcatctcgtctaagcgctatcgacaggtgaaaactgcaaaaaaaaagaatatagcaagtctagtttactgtatttactagagagcgattacggtatgaacccgtaactgtatttattcgaacgataggtgttttttacggactacagngtatttagcccganagtctgtaccccgtatcaatgcacagcccgtaaccctttgtcttatct

SEQ ID NO: 3759 - DNA, 2358 bp, Heterodera glycines
cgttagtagaacatgcgtcaatgaaatttttattgtcataaaacaagttccttgggttttcaagggcactgaccatgattccggtatccattaaggggcaatttcgaaccccggacacgaattttgtatcactgacgcattttccggtcacgccccgcggcagtgccattccctttgaatttcgattttcggctttaaatgtgttttcctaaaatcgctcgtgttcacaaacggtgtggaagcccatgccgtgcagcaaataagtcaagtcttcggtggccaaattgccggtggcgcctttggcaaagggacacccgccgaggccgccgatgctgctgtccgccacgcgaatgccacgctaatcaaattaatgcgcataccgtatttcctcgattataagccccggggcttctattgttcaacccccctccaaagggggcttatattcgagggggggcttccaatcgagggggggcttttattgttcaacccctttccctatataaattcttaaaattttttgctttctgcataatggtacaatttaaatcttaatctaaatttttgaattgaaaagatttttcattttttggcccttggaaatttaggcgaatgtttgaaaattcataattcacttctaaatgaatcaattaaagtgcaaaaaagcattaaaaatagagaaaaatctggagcattttatacttttttagaattttctatcttcaaaatgaagaagttattacataaattttggaaaaattcgttttttgagaaaaaaaaattaatagtgctgttctgaaaaggttttttgaaaaacacgaaattcttcctctataagcttctgtttattctatatttttataagacttttgaaaaaaagtacaaaaataaactgattttggaattcgggatcatagatggaagcaaatggtttttttgggccatgggttcagatccacttgcctgtaaaaatgttttttagggtttttgggaccactaatcaagaacttggcatccattttgcccaattccaaagccttgatccgaactcgaaaccccaaaaataatttttttaaaatgttgcaggcatgtggatttgaacccatggcccaaaaacccatttttaacaaaacaaaaaatatattgggtataatatttctatatttgcttgaaaattttttagtgattttcatcaaaatcttttccagtgcaatttattaacagaaattttttctaagctattgcttcgctattagacaatttccaaaaaagttatacatgaaaattgcgaaaattcgaaaattcgaaatttttgaagttttttcgtaataaaattttttccaggcttgaaaatcttttcgcttttggtaaggctaatagagcatgttaagagctttcgagtgataccaacaatgttgtatttggatgtcaaagaaaaaagctatcgtagaaaaagagctggcgccgaaacgcgagcgccgaaacgcgtgggtcccgtttgtacatttagtctttctaaaatattttatgaattttaaaaaaatactatttttttcagaaaatttttgtgttttaaaagtatttaaaattaaaaataacagaaaattttttgtttataaacacgaaaatatgtatatttttgcttttcccaccgcttctcccaccactcactttatcgtgaacatcattcggctgtccgtgttggtgacacttggctgtgcagttgctgctgtcgttgcggcgccgtcctgcgactgttgctgcggtgccgtcgttgttgtcgtctccgttgctgttttgtcgtcattggtggcagtggtcgctttcgttaacagtcgctgcattcgtcgcacactgtgtggccattgccatttgctggcgttgagcatcagcacgggctacaaaagtggggaaaaattttaaaatttccagtggcgcctatcggcacccttccgccggtcctcaaaatttttttccaaaaaatcgcatttcacacacctgcacagcatacgcacttccaagggtcatacgacgtacgatcgggctcagggggggtggtcatatgcgattttccttatgacggggtccgaaatttttgacgacctttttttttttttgctttttaaaatctcttttttttgcggcgcggtcttctcaaaaaaatttcgcgaacgcgggagccggcggtgccgataggcgccgccggggaaaattttgtatttttagtgccatttgctagcagattttgactaaaaaatgcccaaattttgagattttgggctaattttgttaagaaaaaataagggtttttgaggccggcggggccgataggcaccgtcggaaaaaaacatgcagaca

SEQ ID NO: 3760 - DNA, 2899 bp, Heterodera glycines
  unsure (1)..(2899): unsure at all n locations
aaaataatttttttaatgtttgcaggcatgtgatttgacnacatggcccaaaaacccatttntaacaaaacaaaaaatatattgggtataatatttctatatttgcttgaaaattttttagtgattttcatcaaaatcttttccagtgcaatttattaacagaaattttttctaagctattgcttcgctattagacaatttccaaaaaagttatacatgaaaattgcgaaaagtcgaaatttttgaagttttttagtaataaaattttttccaggcttgaaaatctttttgctttttgtaaggctaatagagcatgttaagagccttcgaatgataccaagattgttgaatttggatgccaaagaaaaaagctatagtggaaaaacgagctggcgccgaaacgcgtgggtccctgatcttacggaacgggccaactccgcctgaaccaactaagtctgaccaactccgtcttagtgtatatggggccaattccgtctcagaaaaaaaccaatttaatttataaaaaatatccttacataaattcaggaattttttaaaaaacctccttttaattcatgaattatagaattgtataattgagatctcctatttattatttattgaaaaataagaacttaataaataattagggctgcggttcttaggtttttactaatactgtgcctcttaatttgcatattggaaggtggccagtctatgtctgatacttcattaaccgctaaaaaggcaaatgaacaacattccatcactttaatcgagaaaaaataaaacttcttgaaaaatatttagcaaaattaaattaaattgaaaattactaatcaaaatattggttttatatacaaaaaatattatagttcatttaaaaataaaaaaatgtcactgaaaaaattgctgactgttcccgttgaaaaaagaaatgaaagaaatgcacaaaaatattaaagaaataatataaatgaaaataattatgtcgaaatattgagaaaaaaagaaaaaaattgtcagattacgggatatatgaaaatatgataaaatctttcttaacgagccaaaaaaatgaaaattgaaaagagacccgaaaatttagaaaaattaacaaagagattgatcgcaatgttcgtacgaaagctcgtgctaaaaagaataataatttgatacgtcgcctttaggaattattcaatttcaaataattttgaatcaagcacacaagattcagcattcggaataaataaataatttttgaaaatgctgtaagaaatgacgagaaagttaatttttaggagtggtatttttcaaattattacattttccttacaaatttttcaattgtaaaatatgtgccaaacatcgaactatgtgcgatatgtttttatgtgccaaaacgttaaaatgtgcttttatgtttttataagtggctttaaatcgaaaattgtttagagaaaatgcaaaaaatgcttgtcttgggcttttctagtaatgtaaaaacataaaaatcccatccgcactaattactaacaaatttttatgaaaattaggcgcaaagatttatagttatttccgttatatccttccccataaatcgaaattttgttttgacgccagactacactagaaaagtttaggtttttgagatatgactttttatgagggtgaggcatgatggaaaattatggattttgaatcgcttggtacttcgctgatcattcattggtcttattgtcctccgctggaatgccctgctccactgctttgcagaatttgttgtttttggcccattctatctcactttgcgccaaattcaccagctgtttgataactaattttctgttctttggtggatccttggactttgcagatttgttgaaaatttgaaggcagtcagtcattttgacttggtcgtcgtcaccgtcgccgatttcggaaataataaagtattcattaggcagttctgtgcggtttttacagtactcgaagatggtagggatttcaatgtatcgaaataagaagctaagactaaatacaaaaatcggttacgggggaaggaagggagtaatggatttaaaatttacaatccacttgcctcttaatttgatgctgctttaaattgatttgctgaatgtcgtaagttgtgtcctcaattgcatgtttaatattggcatttttcttctgcaccgccaaatcattttttatggcattctccatggctttatggttaactgatttaatgttgtccgactcgtccacatacaaatagggccgatcaagcgaagtgccagcaaaagcaaaaatgggtcggaaagactcttcggagaatttgaccaaaatctttttgctaattttcgtagacggagcatggggcaaagagatgttcaattgattgagggatgagttattgcgtaagaccaattcaatgccacggcattcactcaaaagcagcgcaaagagtggaagaagaagaagaagaaaagtggggaacattgtgatggggagggaaggggatgaaaaatttgatagaataataataattattattaatgatattaaatctgtcaaatgccaattcttagaggggggggggaggagggtggcaaatgatgacgaaaagcgaatgatgtaaatgccaatatttaacgaaaagagggggaaaaaattattcttgcttaatctctttgttttccttttaaaaatcagttagcataaatgcatagcaatattgatttatttttgggggaggggggtagataatccagggtcggagttacttcggtgcggcgttttccggtgcggtcagcaggggcctattcaaattgctcgcatcgtatcgatgctaatttgaataggccccagttcggtggcgccgtcattatttattttattt

SEQ ID NO: 3761 - DNA, 4649 bp, Heterodera glycines
attccctcccattttggcattttttagtcgtggaaaacggccaaatgcttgggcttcgaaattggcggaatcggatatccacatttgatcaaaaaaccatgcaccggtaacattaaaccgaccccaattgggaggggtatacattaaaaaatttccgtaattttttttttttgtggaaatgagtcccgttgaaattgggcgttttgccatggctcaaaaagtcatcctatctacctgttcgtcctgtgccgatttgtccaatgccatggccaccaaattgtttttggcgaagaaaatccgcgaattctgcttgaaatgttggcggaccttcaaaagcaaaaattaaaaaaaaaatttttttttcaatttttcgggtttcccaagaaaatgataattgcacaaacactttaagggcttgaataaaaggaggtatatcgaaaaaaaccacggattgtcacccatttgtcccccctccctctccccattgtgacatttatgccgccccttccctaattttgacaaaaaattgcatttttattttttatttttacctccgccagccttgcagagcgtaaattctccgtcgagaagacaaacaaatgtttgtactgatccacgcattctctgacctaaaatttttgttggaattttcaaaaaaaaacaaatttttttcccgcctctttcaaaatgttttctttgccctcgcggctcttcttcttcacttttgtgagagaaactgaaggaaaaaacaaattgaagaaaattatggacaaatttggctgaagaataataaattgctgaccaactaagtcgcgcttcgattttggcatttgctaaagtgcggaaaattggaataaaaagaattgaaattgaaatacaatagctctgaaatgcttacaaattagcgtttgaataaataacgtgttaatttttagagtcaggtactaaaaaaaaacatgggaacggcagagtggaaaactgaaaaagcagacatttgcacacctatgtcttttttggctattcatgttttttaggtctatgaacttcgaacaaatgtctcaacaaaattttggccaaagacttttgcgaattttcacttttggctgcccagagaaagccaatttggttttgcgtgcacagcctcgacaaatggtagagataaataattaataaattggcttctggactaaaaatgtttttgttaggtagttagcaatatgctggcgatgttcaccaacagagaggagacgaggccggcgcaggaaatactcattcaggcaaagcggaaattaaagaagcaattagtgctaattggtttacgaccattgaatttatatgcttgtttgttcagccacgcttatgccgccgtccgactcggaagtgaatttggcacataaaatgaactcggacggatcggaggacccattcgacattagcgccgcgttggagggcacaaagcgcgccacagggggcgagccattcgcaccaatgccaacggtggacgaaaatgattaaatgcctttttaaattggaaattcggcccctttcagctcgaatcgtccccctccttcgacccttttgaggttattcccgtggaggaactgatagcgaaagcgcgagaaaaagccgagttggaaagggccaaacgcgaggccaagcacgagggcgaatttgtggccgagaattgaatagcgttgcctaacgaccgaccacctgtccgcctcgcacctttcgtccccaacgccggaagggggcagtcccttgtcttccgtggcacggccggtcggcttctacgacgacttcaaaggggcacaggtgagcattctgctgatgattaataattgaaattgtttttataagaatttaatgcgttttccctcttttaaaagaccgctgatgacgaaagtccgttgttcgacgcggacgattctcttccacttcccgaatttccgcttccgttcatcggcgatggatgggaattgttcttacggtatcctcccaagaagaagctgatgaccgacagattttggaagccaatttacgtgcggatgagtggcaatatgctggcgatgttcaccaacagagaggagacgaggccggcgcaggaaatactcattcaggcaaatggcaattaaagaagcaattagtgctaattggttaacgaccaatgaatctatttgttgtgtttgttcactgatcacttccgttgtgcccaaattcaggccaattattcgctgtcggacattgtgctgcaaccgtacgacgctttcaccaaaattcacaccgtaaaattgcaacacattctatacaatgagcgcaatggtattcgctccggtcaaatctcgcacctcgtcgaaggctatttgaccaaatatggccttcctcttgagcacgcggctcacaatcagtgcacagtgctggctaagtttgggtcattgaacgaacggaccatcgccagtttcaccgacgcattagaaaatgtgctgttccattacccgaaaaagcgcgagacggcgccgacctacaaatatgacgaagtgcaggtgaaaaaaagagagaggagaacgatgcgagagtgaaagagcaatagtcgagaatgggtatgctggtcaagagtttacgacggaaaaaattggcactttgaaatgggagggacagagaataattagtcggcaatggacatttagtactttgaatattgacacatttgcattcagattaattgttacgatgagtgcgaggcttcggttttgataattttcggaatcataagttgctcgttgctcaaaatatcttttactcacccggatccgaacctaaccatcccctcccccctcagaatgtttctttggggcagtacgatggcatagtatgagttgggtttcgtccgtgcacttctccttttctggtatttcatttttaagtaagaaaaccaaataaaatataaaattatcccaattttcctttattttttaagctttgttacactaagattgtccaaccctgaactgagtatgaatttacaaaaattaccacaaatttcccgggcccaaaaaataaaaattttcaaaatttaaaaaaaaattccaactttctaaaacgtaaaataaggttcatattccgatttcaatattttggggagttttaactggaatttttcgaatttttcatatataattcagaaatttaaaaaatgcaataaaaatgatttttttttgcgcgattacatttttggagacatattcaaaataaattttcaaaaattttccatcgaaataaatcagttgaaattggctttattttgtaattgggcgccattgaatatttaaaaaattaaaagtaatcttgctgatgatttatttaatattaggtaaattttaattattttattcgagatccaaaaaactttaagaataatgtgtatttaagcacaatttaattaaattatgttttaatttaaaaaaataataaaaatcataaaaaaatcaggtttttgatttttcactttttttgtgaggcgcccaaatttgcacttttgtgaagtggccaaccacgattaataaagtattggtgctaatttttattttttcaattaaatattgttttaaaatatttttttggattaaaatgatggcattaatctccaaaagttaacaaaataattgttttcaccaaatattcatgcactttttacattacaaatattttaaaatttaataagtatatatttaaatggaaagttttaaatgaattttttttttttgtattaaaatattgctttttctattcactcattaagttatttttttttgattgttcataatttttacaaaaatattatgaataatttcaaaaattctattaaaaatggttatctgttctgattatatcaaactttgtgaaccagtcataattaagctggttagcgtagtaataaatttaaaataaatcattcttcattaacttaatttttgtttaattgtatttctttcgcataattaataattaaaaataattctttgcacggtttttgatttttaattttcatttacattttttataatgtatttttaaaatattgttattaattattgtttttaagtattttttccgttactttatgaaactttgtgataataatattatatcaaaatactatagaattttatgaaaatgttatttatttcctttgtttaccttttgacgtttacagaagctgatgaccgacagattttggaagccaatttacgtgcggatgagtggcaatatgctggcgatgttcaccaacagagaggagacgaggccggcgcaggaaatactcattcaggcaaagcggaaattaaagaagcaattagtgctaattggtttacgaccattgaatttatatgcttgtttgttcattgatcacttccgttgtcccaaattcaggccaattattcgctgtcggaacaacggacggaagaaaaggcggaggaagcgaagcgcggagcagcggaggaattcgaggcggacttcagcaaaatggacgctgagaacccggcccaacggttgggcggcagccgttgagcaggccccgcttatgccgcccgccgacctccgaaagaattttgcacataaaatgaaatctgaacgaatcgaaggacccattc

SEQ ID NO: 3762 - DNA, 1629 bp, Heterodera glycines
  unsure (1)..(1629): unsure at all n locations
tacgcttcgtaccattgcgcgagtgacncgctctgttctcttttggtctacgacaattttttaaaagcggtaaacaaaggatcatgattgcacgaatattgtttttgtattaatatttttttttcgcaatgatttttttaccatttgaatgggattattttggtgcataaagcatagaattgaagcactcttcggaggcatgcgaaagtattgcctatgggccagtagaagctgaaaaatgattgtggttgagtgagcataataattaggttttcaatgcttttaaaaattaaatcttttttatcaataaatgcatttaaaatctaaatttatcaaagtaaatctaacatgaaaaatttaataaattaatttcattataagtttgtttgggtgagttttgatttaaaaatgtaaattttaatttgttttataatttgaatttaatagatagaaaattgaattaaaagaatttattttttatttcttaagtttaaattaaatatatttaaattaaaatgaaaatattattttattaaataaattctttcttcgacttgccttagcgatggaattttgcgggcttttctcaatattagcatgtgaaatcttaattttttcccaatccggaaaccggttccggcaatttgaaaatatgctttgaccggttttcgggattgaccagttttcaagagaccggatccggaaaccggttgcttttgaaaatatcagtacggtccgacatttcgaaacgtttggtctctattaattataaaacaacatattacattttttgaaaattactgttttatttttttaattataaattaaaaaaattattatataaaatatttggtggcaaaaaagaggcaattttgagaaattacatttcaaaaaataaattatatgcaataaaaaagtgaatttattcaaaaaatgatcataaatttatgattacttttttttcaaaacatctttttttcacggcgcgctttttctaaagacttttagggagaaagaggttagacactttatccgcttcttcttcttctcccgctggtggcgaaaatagcctaaaattaatgaactttattttccgacaaaatcaaatgctattgctgtgttcacccaatggatttatcgaaattccacagattaaatacgttaattaataaaaaatatttcaacttataaattattatttttttcttttttaaacagcataaaattgcaaatttaaccaaacatttggttattttttgacaaaatctgtaaacaaatcgaattatataaattacaaattttttcccccggcggcgcctatcggcaccgccagacctcttgttcgagaaatttacattgaaaaaacgcgacgcggaaaatttcaacgtatttttccctgattctttcttttttaatgtctttccaaagtaattttcgatagtcaattggaacagcgaaagtgggcggagcaaaacaatttagaaataataaaatttataattttattttagcgattttcttggcaatgccaccgcatttctgttcacaccaaaatggacgaaccgtttgggctcggaatgatcgaagcaatggccacggggacgccggtgattgccattcaaccggggg

SEQ ID NO: 3763 - DNA, 2236 bp, Heterodera glycines
gatgattaataattgaaattgtttttataagaatttaatgcgttttcccttttttaaaagaccgctgatgacgaaagtccgttgttcgacgcggacgattcacttccacttcccgaatttccgcttccgttcatcggcgatggatgggaattgttcttacggtatcctcccaagaagaagctgatgaccgacagattttggaagccaatttacgtgcagatgagtggcaatatggtggcgatgttcaccaacagagaggagacgaggccggcgcaggaaatactcattcaggcaaagcggaaattaaagaaccaattagtgctaattggtttacgaccattgaatttatatgcttgtttgttcattgatcacttccgttgtcccaaattcaggccaattattcgctgtcggaacaacggacggaagaaaaggcggaggaagcgaagcgcggagcagcggaggaattcgaggcggacttcagcaaattggacgctgagaacccggccaaacggtgggcggccgcgtttgagcaggccacgcttatgccgccgtccgactcggaagtgaatttggcacataaaatgaactcggacggatcggaggacccattcgacattagcgccgcgttggagggcacaaagcgcgccacagggggcgagccattcgcaccaatgccaacggtggacgaaaatgattaaatgcctttttaaattggaaattcggcccctttcagctcgaatcgtccccctccttcgacccttttgaggttattcccgtggaggaactgatagcgaaagcgcgagaaaaagccgagttggaaagggccaaacgcgaggccgagcacgagggcgaatttgtggccgagaatcgaatagcgcggcctaacgaccacctgtccgcctcgcacctttcgtccccaacgccggaagggggcagtcccgtgtcatccgtggcacggccggtcggcttctacgacgacttcaaaggggcacaggtgagcattctgctgatgattaataattgaaattgtttttataagaatttaatgcgttttccctcttttaaaagaccgctgatgacgaaagtccgttgttcgacgcggacgattctcttccacttcccgaatttccgcttccgttcatcggcgatggatgggaattgttcttacggtatcctcccaagaagaagctgatgaccgacagattttggaagccaatttacgtgcggatgagtggcaatatgctggcgatgttcacgaacagagaggagacgaggccggcgcaggaaatactcattcaggcaaagcggaaattaaagaagcaattagtgctaattggtttacgaccattgaatttatatgcttgtttgttcattgatcacttccgttgtcccaaattcaggccaattattcgctgtcggaacaacggacggaagaaaaggcggaggaagcgaagcgcggagcagcggaggaattcgaggcggacttcagcaaattggacgctgagaacccggccaaacggtgggcggcagcgtttgagcaggccacgcttatgccgccgtccgactcggaagtgaatttggcacataaaatgaactcggacggatcggaggacccattcgacattagcgccgcgttggagggcacaaagcgcacagggggcgagccattcgcaccaatgccaacggtggacgaaaatgattaaatgcctttttaaattggaaattcggcccctttcagctcgaatcgtccccctccttcgacccttttgaggttattcccgtggaggaactgatagcgaaagcgcgagaaaaagccgagttggaaagggccaaacgcgaggccgagcacgagggcgaatttgtggccgaaaatcaaatagcgcggcctaacgaccacctgtccgcctcgcacctttcgtccccaacgccggaagggggcagtcccgtgtcatccgtggcacggccggtcggcttctacgacgacttcaaaggggcacaggtgagcattctgctgatgattaataattgaaattgtttttataagaatttaatgcgttttccctcttttaaaagaccgctgatgacgaaagtccgttgttcgacgcggacgattcacttcccgaatttccgcttcagttcatcggcgatggatgggaattgttcttacggtatcctcccaagaagaagctgatgaccgacagatttggaagccaatttacgtgcggatgagtggcaa

SEQ ID NO: 3764 - DNA, 1226 bp, Heterodera glycines
ctatttgttgtgtttgttcactgatcacttccgttgtccccaaattcaggccaattattcgctgtcggacattgtgctgcaaccgtacgacgctttcaccaaaattcacaccgtaaaattgcaacacattctgtacaatgagcgcaatggtattcgctccggtcaaatctcgcacctcgtcgaaggctatttgaccaaatatggccttcctcttgagcacgcggctcacaatcagtgcacagtgctggctaagtttgggtcattgaacgaacggaccatcgccagtttcaccgacgcattagaaaatgtgctgttccattacccgaaaaagcgctagacggcgccgacctacaaatatgacgaagtgcaggtgaaaaaaagagagaggagaacgatgcgagagtgaaagagcaatagtcgagaatgggtatgctggtcaagagtttacgacggaaaaaattggcactttgaaatgggagggacagagaataattagtcggcaatggacatttagtactttgaatattggcacatttgcattcagattaattgttacgacgagtgcgaggcttcggttttgataattttcggaatcataagttgctcgttgctcaaaatatcttttactcacccggatccgaacctaaccatcccctcccccctcagaatgtttctttggggcagtacgatggcctagtatgagttgggtttcgtccgtgcacttctccttttctggtatttcatttttaagtaagaaaaccaaataaaatataaaattatcccgattttcctttattttttaagctttgttacactaagattgtccaaccctgaactgagtatgaatttacaaaaattagcacaaatttcccgggcccaaaaaataaaaattttcaaaatttaaaaaaaaattccaactttctaaaacgtaaaataaggttcatattccgatttcaatattttggggagttttaactggaatttttcgaatttttcatatataattcagaaatttaaaaaatgcaatgtaccatggcatataattagagaaaatacggtacataattccaagcataaattttgtgtgttgcctttaagtcaaaatttaatatacataattcccgagacttttaaacagggctgccaagtgtccttttttctaagatttgtcctttgttttggcattccctccttattttaggcttatacttggatttgaaataaaa

SEQ ID NO: 3765 - DNA, 3608 bp, Heterodera glycines
tgaaaagttgaaaatttgagaaaggaaaacatttttatacgcttttccacattaaccaaatgcaaaaatattttcaaattcaaaatttacccccccgctaaaaatgttttgcgtataaaaagttgttgcaattttcaattaaataattaaaatatatttttgagggtcaatcagtgatttttctttttccttttacgtctgtgcgtgtcgcgcccgccctcctccagcagcgcactctctctctctctccctcggtcggtcagtcattgcgccaccgctcgtctcacttggaacagcacgtgccgcgccgctgctgtgccgccgcctccgccgcggagatgtccacgccgctgcgtccgtggcccgacggaccgccgccgccctccgtctttggcagttttttggctgaaaggggacaaaattgaaaaaaaataaaaaaatgaatttaaatttgaaaatgctgaaacttttatttttctatatgatcgacagatgatgattaaactaaatcagaacgaactgtcaagttcagaatatttcagtgctaattttgcttattgacaactcgtgatggcaaattatttgtatataaccacattcatgttgtaaaaaatctttattgaaaatgggctttttttattcttttaacaatttctcaaaaattttcccgtcggcgcctagcggttcttgttgccggaacagtattggaaatgatcaatttgaaatggcattcaaacttcaataaataagcatcgaaacggagaaatcgaaatggggtgctgtcgattgaaaaacaaagtctgggattttagtttgacatttaatgataaatttcgggtgggatagggaagacgaaaagcactgaaacaaaaaaaaacaacggaccaatggcaaggaaaatgtcgttgacattcatcgacgacttggcactggtctccatgaacaacagtccgttgtcctccgcatacgcttgtgcctcctcgtactccaccatgcgtttggcggccaagtccgccttgttgccggccaacgcaatcacaatgttcgggctggcctgccgctgcaactcgcgcacccaattcctcgccttcgcaaacgattcctgacgaaggaagggacagagagcgttttatggaagcaaaaaaaaaggaaattaatttataaaaaaatataaacatatttatagagcataatatgaattcaggcctggatcctgtccagaaaatcaaggtccaatatgggataaaatccaggttcagatgcaagtacggcacgaaaaaactggcttttctctacattttgtatgtcggttaaatgacgaataaggtccaagtaattaatagacgtaaccgtaacgaaattcactgagaaaggtcttttttgggtagtagtgaaatatgggccacaaatccatgcctattaatttttatgatcactaaccaactgaaatttgggaccgcaaatgttagatttggacgggtttttgcaagagcccaagtccaccactgggtttaaaacaagcctggttggtgatgtcgtagacgacgatggccgcctgggccccgcggtagtacatcggtgccaacgagtggtagcgctcttggcccgcggtgtcccaaatttcgaatttgaccgtcgcgtcgtccaggcaaattgtttgggtgagaaaggcggcgccgatggtggattcttggtactcgtggaactgacccttgacgaaccgcaacaccagcgacgatttgccaaccgcactttcgcccagcagaaccaacttgagggggaaaacagtcaaaatttgaaaataggcgggggaggggaaatatttacaatttgaaacgaaaatcattatagaaatattatagcgcattacagaattattttatggtcctgaactgcaataaaaccccctgctcttcatcttaatttagtagcgcaaattcaatggaaaatcccaaaattttgggggtgacaaaatatacaattaatgccaatatttataagcattcaaaatgggtcaacaaatggattaaaaatgttttaaaccttgaattgacaagttttcgtgggcgctcctccgttccccgggcgtgtgcgctgcgcagacattttcagtcaaaatgaaaaattgcttagaaaaataagaaataaattatttgctaaacaattttaaatgatgcaaaagaaaaaatggaaaatatgcgcagaggaaacaccaaaaataaataaatagaaaacgctccttaagaccagattttttgtaaaatctgattgtccaaaattcattcagcttcaaatttcttcaacaatattttttctcaatgagaaaaaatggaatttattggccataaaatccgggccctattcataattaggtaattaatttttaatttaatcgaataaaaatgcaaaacttccgactgcagaacagagagcccccaacagaaattgaatacataatgtgataaggggaagaaaggaatctaatcgaacttttcaaataaacaattgaaaaaagagatgagagaaaaaaagggaggaaatgtgcggtgaaatgaattgaatgacaacagcggaagagaagagagggacgcgcgacacaaagggaagaggcgaacggaagacatttctaatacatagcgcagcagaagagattcatcggattgttcgaattgcactccgacagttcgaacacggtgattttgcttcccaagaaaattgaaatggagtgaaaactcgaaacgaaaaaccaacttttaccatcttatttttaatcctcggcttaactttgcacaagttacgcccctctctaacaaagcatttgcttacattaaactcttcgttcaaataagttcgtctttctttgttaaatgataagcatgaagaaaaggataatgataatttcgttctacgaatttttttcggaaacatttccggtttctaaaatttttattttcttttcattttcaaacttatttttatgtatgttttcgcgcaactctactggggatggacggccaaaaatcgctgcttttatacacttttttacattgcatttgcctacatttacagaagagtgactgctgcaaaaaattctgtcttttacagaccgagttgatttgtgtttaaatatgccaaaattcagcaacaccttcattttctcatttttttgtctccaacttctcgactattctctttgcaattgctacgctccaacccaactctccattcatttaaagccttgttttcaagtgacatttgctcctttgacttttgcgtctcgaacatttgcgcccaaaacaattacgcttaattgttttcggctccaatgttcggactcaaatgtccgagttgctaatgtacgcacactcactgttctcgccatcactcatcacggctttttttttcttctcccactctcagttttcccttcccgtgtgccgacaaaagaccaacccgacaaaagaccaactaacacaaaaatgacaaaagaccaactcacccaaaaacgacaaaacaccaaccgacaaaagaccaactcgacaaaagaccaactatgctaaaaaacgacaaaacaccaacgccaataaaaaacgacaaaaaaccaaccc

SEQ ID NO: 3766 - DNA, 2534 bp, Heterodera glycines
  unsure (1)..(2534): unsure at all n locations
gataaagaatctatttcttattcttttagagttcgagtccgttgtgcaacatgaatatttttatttatttttgtccaaaatattaaaaattgctatttttggaaattgtttttggaggtttttcccaacaaaattggacaaacttggtatcattcgaaagctcttgatgaggagaagctttttctaagcaaatgttaagtaatttgatgagttcgaaaaaagatatgaacgttcgaaaatttaaattaaagtttgaataattgtggtttttttattgctttttgcccatcacactgtcctattgccaatttttttgcctcacttttttgttgttttattacttatttcaactaccttttttgttacaagtaataaattttaagataaacgttaacaattggtattaatagttgcaattttgtcgttttttggtagagttgttttttgtcgttttttaggttagttggtattatgtcggattggtcttttgtcgggttggttttttgtcgttttttattggcgttggtgttttgtcgtttttgggtgagttggtgttttgtcgggttggtgttttgtcggttggtgttttgtcgggttggtgttttgtccgcgcgccttccttccttctcttcccattcccaacacctccctttcctcccctcccattcgtcgattaacgattaacccactttttgctttctctcctttccacatgtgctagacatcgctgcatctctgccttaacatttattcagcgcttattctcctctgagtttcatttctaattttctcggtctttccaatttcatcactttttctttcccaatgtaactgtaatgtcatcatttttatagtggccttaatacataacatttgaattatcttttagcgatcgaattcaacaccctttcaatttggctatcatgcaaatcttcgtcaaaactctcaccgggaagaccatcacccttgaggtcgaggcgagcgacaccatcgagaacgtgaaagcgaagatccaggacaaggagggcatcccgccggaccagcagcgcctcatcttcgctggtacatcgacttttgatatgccgaaacaatcatttttatacccaacccttattttcagggaaacagctcgaggacggacgcaccttggccgactacaacatccagaaggagtcgacgcttcacctcgtcttgcgtcttcgcggagggatgcagatcttcgtcaagacgctcaccgggaaaaccatcaccctcgaagtcgaggcgagcgacaccatcgagaacgtgaaagcgaagatccaggacaaggagggcatcccgccggaccagcagcgccttatcttcgctggtacaatttgatgtgccgcaacttttaatcataaacccttgttttcagggaaacagctcgaggacggacgcaccttggccgactacaacatccagaaggagtcgacgcttcatctcgtcctgcgccttcgtggtggaaagaactagaacgacgaacggaggagatgattgatccgtatcgatccatattttatgtaacttgagaccgtcctgtattgtgttccgttttattcatcatcatgaaatgtatttcaatgatcacggaacgataaatccatcaaaactctgtcttatcttctcccgtcggaaaattaaggttttgtctatgaaaaatttgggcttagaatttacaaagtaattggtagaagtaaacatacgtaccacaattcgttggtacacacccaacttgtactttgagatgagttccagctttaaagtttacttacactcaaaatggggtggagcaataaatctgtaaggatagcagagctagcttggcactttttagagcccaaatttgaatgtatcagcgcgggtttacattagaattattgtacgaaatgccggaaaattatttttgtacgagttgcctattgcgtgtattgtcatggcacaaaaattctactaaattccctctttttaagctaaaatgatatttacatgtacacaccgtttcaaaaaacgagacatgtgtcaataaatagagagtgcagagaaaaatacatttctctcaatttggcgtactatttctttacagagaaagaaaaaactgaagaaatgacgatattcaagaatcttttttgagattttttgccaaccaaactggacaatgttggtatcattcgaaagctcacgttggggagaagctttttctaagcaaatacaaagcgatttgatgaattagaaaaaatatatgggacttcaaaattttattttttgaataactttttagctgaccctttttttgcttttaaaaacccttaagttttgttcgcaatttttttctctatcgagatgcaaaatttggtgttgatttaacgtgcagaaaaaaagttaaacgtagcgaagtaaattcggtttttctctattaacagagataaagaaatagtacgccaaaaagagagatgtttttttctttgcactctctatttattgacacatgtctcgttttttgaaacnggtgtgta

SEQ ID NO: 3767 - DNA, 931 bp, Heterodera glycines
  unsure (1)..(931): unsure at all n locations
tttattgttatttttttgttcataattttggttgttatcaacaatttctttctttatggcattaatttctccgaatttttgttttttgatgtgttttgtggtcgattgttttaggtttttccacaaatcatcaaaaaaaatcttcatcaattccatcaattaaaacgattaaataaaagaagaaaaaaataataaaattaatttgcagcattttttatcttaaaatattttcaaaaacaaatttatgaataaaatatttcgaaacgaatttttgaatttctgcgtgtataaattattttatgattaacagaaattatttaaaaatatacattttttaattttcccgcccccaccacaaattgcatcaatattttgctattatcttaaaattaccatgtgattttaatttttttctatatgaattttgtcattatagaaaaaattattaaagataattgatttaatcttaacgtgttgaagaataattttaattttaaattcaaaaatgtttgttaaatttaagaagaataattttttaattttaaattcaaaaatgtttgttaaatttccataagctgaatgaatgtggtgccaagatgaacataaaagagatttaccagactctcaaatatacaaaacctatacgatacggtaagctcactaccgtataatgcttaacataaaattgctcttagtaaatgggagagaaggtgccatatccatatttagtgatcctgaaaaccctgaattggattgattttctgngtttttataagtagttagtatccgtatctcatcgcagggtgtgaaatgataaaatggggttttttttccctttgatctttgcgcgnccgccggggggggggggggggggtaataaataattaaggggagggggggggggggggttaatttatgggggggggggggg

SEQ ID NO: 3768 - DNA, 1248 bp, Heterodera glycines
ggggggcgtcagcggcgaatgatgatgccggccgtgcatatattatgcaggcaaagaacaaaatgagagaagagaataaaagagagggagaggcagacagtggaaaataagagagagtgtgagagggagagagaataaatgaaagagagaggcagagataaatgagagagagagaggcagacagtggaaaataagagagagtgtgagagggagagagatggagagtgcgaaagggaggggaagagatgagacagcagacaggcagagaaaattggggaggagtgggtcggagagagatggagagtgtgaaagagaggggaagagatgagaatagcagacagacagagaaaattgggggagcgaaaatgccgataagcgaatgagggggggggggggggcgtccaccctttgccatagcaaggggaaatgttgcaaataataaccaaaaacatttaggttaaggggaggggggcataaagtcagcaaattatacgaaaaatgggggggggggtatcccaaaaacttgtcaatttgttgatccagcaacattatgatgttgttgatgggcaaagaaaaggacagcaaattatgataaaaagttgaaaatagatcaaaacgggtagagggggggggggggaggagaattggatcacttcacattattttgccattcagtggtttcccttcatctgcagtgaatgtgaaccggggctggtatgctaccatcccggtaactaccgtaaacccatcctctgtttacattccagtattaacaacctaaccgagtttttgagggagggcaagactgaaacgacatgtccaaccgagacaacagcaacggtcagcagccctatcatctgtcctccgcctccactaacgacaactcacagcattctactgttgttcatcacttctctgcttcttttggtctttttcgcgcaggtccaccccccccccccctcccccgtctaatcattaattattttttaaatttttttttcaatttacaggctttcaaaatgggcattgtggcgcggcgtctgctcaaaaaccgggccattcaaaagcagttggaccgtcgacaaaaaagtcggttgaattatgtggaaaaactttaaaagataaaaattttttttttaaagatctgaaaacgcttcgccgtcaacacgcggcagctggccggccgcccattgttgtgcattcggcggtccttggtttgccaggaccgcggccgtacatcaagtaaaa

SEQ ID NO: 3769 - DNA, 4159 bp, Heterodera glycines
  unsure (1)..(4159): unsure at all n locations
cccccccaataaaaaaaatcgttttgtgttcgccaatttttgccccctccaaagtactttgctcccccaatttgtagtgatcggcccattttaattgtaaatttaacaatttcacttttggtccccattttttatctctttccctattccatatttaaatggcccccaaatcactcccaaatcattcccaattcacattcacttcgcttttacgggcaatcaatgcctatccctttgccctctctcacacactctctctctctctttctccctttgcccatccttggaccacttttgaccatttcttttcctggtccctttctctctttccactttttgcacttctcctggcccaacatttgtcccccttggattgtcccggtgaatcccgcatttctgtgattgtccccccggtgacggcccctctttctgtgattgtgatcatttgtccccccggtgatggcgcatttcatttttattttttgtattgttcacatttaaatatcggtttaattacccaagtttgagagggaacaataaagcattattttgttgtgtgaattgtgtgttcgaccaattgcccccgacccatcagacgagcccgaccatccctgaccggaccccgttggcactaccttgtgcaaatttttgtggaggtctccacaagtggcgctcctgggtggattcttcgtccgccagcaacagcaacagcaaccggtgacaaaggggagagggaaagcatcggaaagtggataagttcgtgctcttcgtggccggacttagacacataggaagggaaggggggaagcaaaatttgggctttgttgggcactgttcggtctccgtgccaacagtgactcgactaattacagttcggtctccgtgccaactgtaatttgactttgggggttgtaagcgcaggtctaggaataactgcctggtctccgtgccggtagttgttcagttactgggcgacctccgtgacccctgtgacaaagtactgaggaagggaagggggaagcaaaatttgggctttgttgggcactgttcggtctccgtgccaacagtgactcgactaattacagttcggtctccgtgccaactgtaatttgactttgggggttgtaagcgcaggtctaggaataactgcctggtctccgtgccggtagttgttcagttactgggcgacctccgtgtccccagtgacaaagtactgcttgctctccgtggcggcagtacttcgtcggcgcagacaagtcaaacggccgacaacaacaaactgctcgaacaaaaagcagtggtcaacaaagcgcagtgaaacgcacattgaaaagcagcagcagaacaacttaacagagcaaagcccacggcaaacaactcacaatggcaagcctaatccagaagggcatcacattcatactcaaggcgctggataatgccagaacaaccacggcactttcactacatccagacgccgacctctcaaactgggaaaacgcagtcaaattggagactcaatgcactcgcgtgaacagataagtccaaacaatcgaagcacaactggacaatctacgcgacctctccaacaattggattgacctgctaaaccgcctcgaaggagcagaaaaagacaaaggcgagaaagaatacgtcaaattcgacacgtatgagaaaattgccgaacgccatgatgcagccacaaccaaactccgggatctgcgggatctcgaagcaacgctcagtgccgatgccaaactttaccgaggcagagcagaaagacaagcaagagcggatcagcaagcaaatccgccaccacaaacggcaatgccaccaatggaagcacctacattcacggcaccgctctatcaattcagccaatccagctggacaaaattcttcggtcaaaatctaaaatggccagaattctacgagtccttcaaatcggccatcggcagccaattaatcagcaaagcacagaagctgaacttgctccgcaatcttctgggcggagaagcacgggaactcatcgctgggttccgcctggaggaccaaaactacgagacggtccttcagttgctgaaggacacttacggcgcacccgaagagcacatcagggcgctacactttgagctggccaatctcaagacgtgccgaagtctccgagacacaaaagacttcctgcttcagctcgaacgactgacaagagagctgaacaatgccggagaggacatcgagggaccgcaggtgttcctcatgttggagaaaaagctgactccagcattcctacgcaacatcctcaacaaaaagggagaggatccggcaaattggacaacaacaaaattccgggacgtgcttaacgaagcagtccgcaaggaagtccaaattcaagaggtgatgggtgagtacggacaccaccatcagcaactcaatcgaccagcaaggccgcaaacacaagcacatcaaactcagcgagcacgcatgccgacagcaaatttccggaacagaaatgcatctcccgccaatcaggaacgcactttcatgtcctcaacaattgaggaggttcagcaacgaatgaaccacaggccgcaactgcggaagtcccaacagaggggaccaaggccaactcaagcgccttacaacgtgccaatccggaatggcacagcacaagcagggtcaaggaatccgccttcaccctgcatcttctgctatggcactcactggaatgagaaatgccagaaactcagtaccgttcagcaacggtcagcctttgttcgagaaaaaggcttgtgcttcaagtgcatgaaaacaaatcatcgggcaaacgaatgcccccgaccagcaaaatgcatgctacaaatgcaaacggtcacacccaccagcactttgtcatgaagccgagcgctgttaatgacagcgagggccacaatttacaatccggcacagccatgcctcagcatgatggcaacagtgttcatagacccgggaagccaccggtcattcgtctcatgcaacacagccaagcagttggaactgaccaaccttggaacggaggaatgcttcttcacaagctttggcgagcgagagccaaagagatacgtaagcgaccgcgtcgctattggctttttgtgtcccgacggggaccgattcatcttcaacctgaacgcactgaagttcttgttgaacaatttgccagtcttgcagctcaatgcaatggacaacatgcagcttcaacagaagaagctttacataccacatgagtcaagacagcctgacgtcatgctgggtatggacgtgtgacacgaactgcaagtgcaacccgtcgaacgactgccaagcggcttcacgatttgtcaatcgaaaattggccaaatcatcagcggatccggacgcattgaactcagtcaaccgtccaacgtcacattcgtcgtcacagtgacggacgaaaatgtcttcaccacagaggaagacttgaaagccgacgatgactcaacaagttctacggcttgaaatcatcggcacggacgattcatcaccaccgattgaccacgacgaagtcatgaaaaacttcaaacggaatttgtcgttcgtcaacgaccggtaccaaatcgcattgccgtggaatgacaaagtgacacagttgccaacgaattatcatcaggcgaaagcaaggctaataagcctcgtccgaaaactgcggacaatcaacttggtcgacgagtaccaagtcattttggatgaacaactgcagaatggcatcatttaaagggctaacccagaccattcttgtggaccagtgcattatctgccacacagggcggtaatccgcacggacagagccacaacgaagattcggatcgtgatggatgactcagcaaagcccaaatccactccatcggcaccatcactcaacgaatgcctgcacacgggtccgttactgctcaaggacttgacgggaattctgttccgcttccgtcaaatggaaaaagtcgtactggncgacattgaaaaagcattcctgcaatttgggagtacgagagcaagacagagacgctacacgatttnncctttggtggcaaatccnaagggaggcaacctcgaccaactcagaaaagaggacatcaacattctccggnntctgcgagtcagcttcggcttgacc

SEQ ID NO: 3770 - DNA, 3926 bp, Heterodera glycines
  unsure (1)..(3926): unsure at all n locations
aaaaatggaagacactaaggtgttgggcatcaagtggacgccaagatacgaccaactcgttttctccatgccacacttcgacagcccaatcaccaagcgaaacattctttcgcacattgccaaagtatatgacccactggggctcatttcaccggcacttctgccagcaaaacacttccttcaaatcgtccaaaacgcaaactacaaatgggacgacccgttggaagaggatttgaaattgatgtggataaaactgatgcatgcgtgggacggatttggattcaactcactcgtcgaattcccacgccacatcatcgctgggataagcgaagagttccattgctattgtgatgcgagcaaatctggtctgggtaacgcgttgtaccaggtcgcagaaacgcattacaacaaaagggaaagcaatttgatcttcggcaaaagccacgtcaagccactcaaggtcgcgtaccacaattcgaccatacccaaattgaaactccaggcactcactttgggagtcatggctaccaagttcgtccaaacacagctcaactttgccgacagccaagtcactttgtggacggacagccaatgctcgattgagcggttgaaggaaaaccgcacccacgacagattcgtagtcaatcggctaaagaagataagagaagcaaacttcaaagtccgacacatccgaacagctgagaatccagcagacatcgcctcacgccgcacagacccgcaaagcctccaagcctcattgctttggcgatatgggccagcctggctcaccaaaacacacaaatggccagaaacgaacgtcacttacactcccggagaagagacacgggaagagctgagccaccgatcgtcgagtggagtgcagcactccaagaagagcagaaattcagcccgtcaatccaatttgaaaggttttcgaattggaaccggctcaaggcggcagccgcctatgccattcgtttcgctttggcacttcttcaaaaaagaaatgtcgttccggcgatcgattcacttctgtatcagcaagaaagacaagcggggctgcttacggcaaaggaattggaaaatgccgaaacatggattttgttggaaacccaacggcttcactcgcccacagaaacagccacaaacaatttaaaattgtccagctcgagctccatcgagccactgagatgccaggggcgattggaaaacgccgatctgcccaacgaaagcaagcacccgacctttttaccggcagaagcctggaccaccaagctcatcgttatccactacgatcgggcgctgaagcactgcggcccacggacgcttctctcaaaacttcgagaaaattattggataacaaaagggcgacagacagtccagcacatcctcaactccaacaaattcggatgtttgaagtgcagactggtgagactcaagccatacgcttatccggacgctcctgacctgcctgaggactactcagctgaagcatttctgagagccttccggcgatttgctgcacggcgcggcattcctagtttgatgatgtccgaccaagggacaaatttcaccgccggcgccaaaacgatccaagaaaattggacagtgcaattgttcccaaacgaaatcagtggacaattggcccaccaaggagtcacatggctcttcaacacggcacacgcaccttggcgaggtggtgcctgggaacgacttgttggcataacaaaaaatgccttacgacgaagcatcggtcgaaatctcctcacgtgggaggaattctgcacactcaccgttgagattgaaacgatcgtcaattatcggccattgatattcgagtcggaccgtgaaccgagccccgtcattcgaccaatcgattttctgattccgtactggcctgcggaaacgaatttccaagtgatcgccgtggatccagaggatcctgagtacacggagcacacatgtcgccgctggcgactgaacgcgtggaaattgggggacagccctgaggatcgctcggaggacagcccggaggaccgctcggaggaccgtttggaggaccgcccggaggaaagaaatgaggaagtcctgtggaggacggaagaagattctcgaatgttcccttgtgatctttgtgattaatattcccgaagtttccccatttttcatttcctttcaggtgtgttttagaattttccctccctgtccaaatcccatatataaacccgaatatttttccctttagaatatctctcgaaaaatcattattccatcctttgattgtgcgctattccgacaaataaactacttcttgtctaagaagttttttgttccgaaggtgttcctttttctctacggtttcgacattccctgaactcagagttccgtgtttgcatttgtctaagctcgattgtcccgaagtccaccaggacagtccaactaagtctaaaggggctgtccatcccacaagtccattccaagagtgaaaaccccgtcccattcgctaagttcaataacattgtcgcggagcgtgtgcaaaccgacagccgaagcgcaaccgaccagtccagcaaacccgcacctcacccgcctcctcgacaagtggcgctcctgggaacgcgataactggcgctcctgtaaaacgaccacacaacaagtggacctcccgaaaagaccatcatgagcaacctaatccggatggtactgggcccacaagtggcaattcttcgtcaacgagtaaacacggcacggacacatgtcgaccgtgaggaagatgaagaagtcaacaacgctgcgctgatggaagcaaaagtattgctgttaaaagtattgcagcgtgtggaagctgaactagcgaaatgggaaaacgtgatttctggacttcaaggacaagaaaaacagacagagcaagaacgactcgagacattcatcaacgaaagagaagtagcgaatttgctagccgacgcacatgctacgatggatgaaatactagtggcacttgcaggagagtcagaatacgatggttccgaaaacggggacaatgccgtgcgagaaaatgcccaaaggcaacggcaatcacctgctcgagaggaaaggcaactcccttctcgagtacaaaggcaatcacccgtcagagaagtcctgcatcaaccaaggatcagacttcctgaattacggatgccgatattctccggcgatccgttagagtggccgacattttggcaatccttcgagaatgcggtccacaatcaggctcacctgcagccaatcgacaaaatgaattatttgatgggatgccttaaagggaaagcctctcgtgcagtgataggctacagaggtggccaaaattacgaaaatatggtggaaacactccgccgattgtttggcaatccgcaagttatcgtcgaagccttgcaagccgaacttttcaatcttccaaatgtagaagataacccnnactccctccacatnttctccnanaacttcnaacnaatatntcnccaattaaatnctttnncacatcccnanaattcnctcatntncatnccantcaanncaaaactncccaancaaattctcaccnaattnattaaaatnnancnanaatannnnttccattatcanatntcacatctnatacttcactanncataantcntatcacttctataaattctcatncnttcctctctatcactaataacatatnttaatccanttcctacacaaaacanacacctattccanctctaccaactaanccaatcatctaaaataaccanaccctttntatccacacaanataaacnannaatnnantcancncctcntnnnaacccactcttaagattnttcttctccntctnnccccattgggtcaccctagtaggaaaagaggccagcgttcagcaacgaacgaaaatgct

SEQ ID NO: 3771 - DNA, 1381 bp, Heterodera glycines
  unsure (1)..(1381): unsure at all n locations
cgaatatgttctcaaagtgcgaggaatgacgctcaacccccctgagattcagaaccaagggcttcgatatgagacattccctgaaaaagttctgcgatatggtgagaccggagagccccaaccgatcaatattacttatccaaactttctccgtcccagcattaaaaatgggagggtcacgtcttatccccttcacaaaatttataaaccctttgtcggtaaaggtattgtcggagccgaccttagtgttttagattttggccacacattgtaatcatattgcgcatttcctttgtattttttcattatattgtatacatattatgaatggaaaataaaatttgaaaataattaagtgaggggaggtgttagttttaggtgaaaaaatgcataattaagtgttataagacacaattttaaaaactactaaaatcgtatttttgctataaacataattagggaatgggagttgtcaattttaggtagaaaagtgcataattattgatttgaagatgaaattacaaaaaaatacacagaaatgcggtaaaatatcgaatttaacacccaaatatgcacatggcgcgtgtaagtatgcgtatgtgtgtgtgtgtggtgtggttgtgtgtgtcaccaaaataaatctggcgattgtgtgcactgattgcggccaacatcttttaacgtttcatcatcatccacatcattttcaaaccggcccgaagtgcgtggtggggtcgggtccctctctgcgaataagggtcctgaccattgctgccaaatagggttgtcctcagtaagctcaagcaattccatgggatagagtcgatcctcttttccttttgagaatcgttcaattatgcagactatataaggatgatgaagcttaatgcgatgtcgagcatagaaatgagctgcgatgttgatgttgaaagggcgagagagacaaccgtaggccattgtaagtgcagcacccttttccgataaacctccaatgaagaaagtcttggtcattccgtttctgtccttgtatgttgtcgtgaccttgcgaccctttagtgaatttaatatgtaagtgcggtcttcaggatggttcagtcggtcgcaaagctgtgaaactcggcaattgagaagctcagcacagaacacactgagaanaaccatttttgacaagaatgagcttatctgctgaaggagtaaagcttttatactcatcacccccctcataatcccaagccatactttaattttcaattattttatttagcatcacagttacaaataaatcggggtggtgaatttgaagtcaagaatttcgtaaataatttggaaaatgaatgttccaataaaaattgtggtaaataaataccaatgcaaatgatgt

SEQ ID NO: 3772 - DNA, 5194 bp, Heterodera glycines
  unsure (1)..(5194): unsure at all n locations
cccctagcgtaaaagcacaccaatgagatcctttcttgtgtgagggtctcgatttacattacngccgctgatactccaaagtgtctgtgaaggtattgatcgctggcatacattcccgaaaagatntggccgatcgacgattttgcatcaaaattgacgttaattctattgcatccatttcaatgccttgtctttatccaaagaaatgagcaaaattgttgtaacagtaagctaacaatcagcattaaatagagaacgagaagaccccaacagattgcttgttgataaaaattatcaccttccgcacggtctttgcaaagctgaatcagaggaggtagaagagaggagactggcgtgttttcgctcaacaatttttcattctttggaaaaatcgtcaaaattgtggttgattttgtagcagaaggcgttgaagtagtaatggaaaaagatttcctttttagaaattctgggaggcgagtagtgatgatagatgattttgtagtcctactcattgtcagtcttcttatgtattcagagtattcagggatttgttcctcggaaacaacaggtaaataaatccgaataaagaataaaattatagaaagctgtttgtaattcatatttattcaataagaatttttataaaaatggctccttaaatagtgatatcggtgcttattgatcggttcttgtccaacatcaccagagagtcgcattcacccatcaccaccagcattatccctccggcgggcactgcctggttgaatttgatgctcaccgctgttgtcccattttttataagatcaaacagcgcagcttgatcatcgccgctgttggtcaaattgaacacataaatgcagtgggtttttccgaactgttcatagctaattccattgctttccaatgagttggcgaaccccactgcttcgttcatgtcattgaaagggcgaacatatttccagttagggaagtctaagtcgtatggcgcttggggaaaggagcgtccattagcaataattgagatctcgcgcacattaaacggttgaaaattgaacggactgcgcgaaattgttccaatataatcagcattagccaccaatcccattgtgatacggcgggggatttggtccatgaacaaattggctgtaaactcgaaacgtccatgactgatgaacattgatttcatcagcgttttcctcacagcatatcgtgccggtttcacttcaagttttcgcgcaacgtccaacgccagtccatccatcaatgagacttttttcacatacattttcaaactgacaacctcgaagcggtaacgaggagcggctgcaacaccctgggcaacactgggcgtagtgattaggacaaagtcgttatcatttggtaaaatttcaatgtctagctcacagaagttgatcaagtaaagaggttggttgaacaaatcggcgtcaattttggccatgaattgcgctgttctacttcccgcaaacaggttgcgtcgcgcaatgcatccatcccctgtctcaagcgtgccgccggtgtcacggtaatagcccgctgcattcaaatgcgagtcctttgctgtattggaataggatagttcgtgtgaaaagtaagttttgtaggccattagagaattggaattgaaaacttcgcgtccatttatgctcattttgatgtttcgaatgaaagtctgaccaatcatctggatcggtgcaacctcgtcagctgcgaggtcaatcagctgaccatgctcattttctttgcgaattcggaattcactttgtaagtagcatttggataaatcaataaagttttggctggaatgaagcttgaagtggtagggagtgtccgtcagtggattactaggcagcagctcaaacacttttgctgaagagacgctcacattggtgggtggaattcgaaaaaagtctaaggcattagttattgagttagcactatcgttgtcaattttatggaatgccatttatttagtaaagtccaaatgcgtctgaacgaatacgtttgtttcctgtttttttgattgtccttccaattatggtctgatgtgttggggcttgcgttctctttctttttatacccattcttgcaccattcccaaactgttttggtaggccgcccttctccaataccgtgtcaattcctttctttccctcgttcataaacgcctctttaaacggcactccttcgtttcccactctctccaacactcgctgtcccgtactcagagcctctgaccctactgtagtgccaacacgacgaagaatgggaagaaaaaatctccaaagtccacgaaacacatcccccaccccagcacctctttgcccataacctcgttggaaggngctagtccctctgaagtaatcctcgctttctataccgctaccatattgcatgtattcatcatatccgataatgcttgggtcgaacataatatgaaccattttatttaagtaaaaaagttaatgaatacaaaaatgagtgaatttaaaaatttatcactttcttaaatattaataccaccatggtcgtgccataggcgaatgggaccagtcgacccttgtccatcgtgcgtagctcaatgtcaatttcgttgatctcgcgcgacagcactctagcgtatattggcgaatcataaatcttctcattgtagtcaccgggtgtggcaccgctcaccgacacaacgcgaagcagcgagctcagtgagttgccaatgatcatgttctcagtcagtccttttgagtagacagcaaaacttgagaagccaccccgtaagtcacagccgtattttgccatttcttgaggcccaacgtgttgaggattttcaaacccaagcacatagcccagctgaggtgaaaatgataagtggctgatcacaggatttttgagcaccaccttgaatcgctcaaagtcatcaagatattgtatttctacatcatcgagaatgtttttaaaaggctcatatggccactcggactctttgtcatcgtcgtcaggaaactcatctccggcggctaaaccgccaaaaaaccgatcatccacatccaaaattctcttagattcctttttgttttcgtttggagcttcgactgagcgttttatgtcctttgctatactctttgggggcggtgatggtgttgacgttgaagacggaataggcttaataggaggcggtgatggtttagttgttgttggtgatgattcgatctgagaagttaatttatcaatagatgttgtagatactaccgttggtacagtgggtttttttgctgcgctaggtgtagttgatttagttacctgaagtgatgataatttagcaattttctgcaggttggtcgatgaagcaggcattggaatagctgatttggatgctggagtcggtgttggagttggcttcggtacagcctctgttttggacggagaaggtttcgggagcgatggagtttgtttaatggttgtaatgggagcgggagcaggtgttgttttggttgtagttatagtagatgttacttgttttgggggcggagctgtagcagattttgaagctgtctgtttcggtgctgtgactacctttggcgcttcagagggtggatgagaatgagaagaaactgctgccgctttagtttgcttctcgtctggcttctctgtttcattgtagacaggctgagactgaggcttctgctgcccaggctcttcatacctcggtggcgattgcagtgaagacatgtcttctatcgttgctctcttaaggcgcttggcgtgtggagtgagccgatcactaacaatttatcgaaatagccttcttcatgtgcaaggggcttaagtcttactttttcttgactcttcaaggttgcttgtaaaaaatccctgagctgctcaacctttttatgtgacgcctgcggtacaggtactctgatgacacgctgtcggtcctcatcaacggaatggagattggtgaaatgaatgtctatccattgctcatccaatgtaccaattgttgagtgccatgaatacggataactgatgctatgcagcccacaaacccatgagccactaaaatgcagaggttttggaaggcgtactctgaacttattcggctgattgtctgggtaatccgtaacattgctaggtaaaaacacaaagaaactatttgatgtcatctattaaatttattcaatgtctaaaaatgaacaaagtgaatgcttttatacaagctgagattcattaatccactccctttctgggtatcctatgaattttacgagcatctcagttgatccatccggtttccttctcttcctaatcactttctctattcggtagcttgtctcatcattcttgcgtacgcgagccaactcctgctcataaaaagtgcccctaaacttttctccgtgatcatcgcgaagtctgtatcgaatgggacgaacggtcttcatcacttcatcaacctcaagaatttcatcgccgtaattgggtaggtaccccttctcgaactgccccttctctctgctcatgcgcacaaattcatttttgcggaatcgtggtgcaagcttttgtgtaatgttgactatttgtggaccgtaaattcgctcccacaccttttgagcgttttgaaaattgatatctattggcctcatccgatgaacacgagatggggcagtgttaattccagctacaatttgctgtacaatgtccacccagttgagagtctttttccgcaaaatatctgtataatcgttgcttcacatttctgatggctcgctcagcaactgacgctttccctgacgaatgtaactctcatgctctacaacctcatgtctcctctcaaactactctgacaacctacaccaatccctccgctcaaaatgctcatcggttggtccattaattcactaatttgattcctcttggattgacaatcatatgaataaacgaattctattccttcttaaaatgtataacaaattatagctatgaccttatttaaactctgcgaacgacgaaccaaacccttacaaaaaccgattttattaatcctctcgctatgaaatacaaaagttgaaatgtccagagaactcctttggaaaaagcgatctaccaccagaataccccgtttattcactttgatctttttcaaattccactttgccttttgcaaaaccgcttaaaaatgaaa

SEQ ID NO: 3773 - DNA, 2423 bp, Heterodera glycines
  unsure (1)..(2423): unsure at all n locations
aaattgggtcttgcctaagcctttcttccataggtttgctcccggtggtttaatggtggggcggcctgctctcctgtcaattatatacctgatggccattcgcaaattgctatgcgccagcggcttgccgtttgcggtgttaattgtatttcctcgaacgcccatgcgatccgcataacggttgcatttgatgtacaatcgttcaatccgctgattcatggtcagctgatttgaaggaatggcaaacaattcacgatgttgttgttcatcacctcgtgcagatgttgatggacctggctcgggcgagtactgtactctcacccttctcggttgcctcactcgttttctgatgtgcacctcatcatcattatttacggggtatgtgcgtttggtccccctcctaggtggaggaacatagggcattttctttcgacgacaacagctggaggaggaggaggttgttgctgctgctgctgctgctgctgtaatggcttttcttcaatttttggctcttttttcgggatacggtatggcactggcctctttgtaggttgcaactcatgttttggctcggttttgattttcgggggcgggaagtacccggcttgcttcgatgtggatggtcgtgggtcaacttcaatttttggttcccttttggtgaagtgacgaggaggaggaggagctagttcaattttcagttcccttgtggagacattgcgaggaggtggaggaggggcgagctctatttttggttctctctttgcgcgatgtggaggaagtggtggaggtgggggtgaagcagattttttcaactttgttggttgtggaccccttttcagttcaactttgggtatagaacgaggcggaggagggggatggtctggtcgtttgtacacgggtggtagtgtgggagatggtggaggagaatagtaaattttgtattttttgtttttatctattccctctccttttatctttcttctgcttgcaagtctttgttgggcggtgtccatttcctcaatttcatctgcataatcaggcaatattggcatgtctccataattttgtgatggtgttggcagcagatacccaccttcgagcatttgttcatcgtcatcgtcactttcaggtaaaggagcagctgctgcctcagcgagtagatcacgtactaccggttgttgttgtaagtcacgtcgcctttgcttccattggttcagtcgaccatattttatagaagaatgatggtttttctttgttcgctgaggacgtggtggacgaggagggtgaggcggatgactatcgtcagacgaggaagattgctgatcgggagggctgggatggcgacggtggtattgatgaggaggtggaggaggtggtggtggtggtggtggagcgggaggccgtggctgagtgttgacgacttcgccgtcgtcatcatcaacacctccatcttgctttagcaaaacactcaagcccttggttaactcaactttggtaggcctatcggcaagctcccgtctcatttgcagatagcgcctaagctgttgattgtatcggacattttttgttgtcggattagtccgttcacccctggcacggtccaggtcatgccttaccgcatccaaattaatgactcccgtatccgacgctgaggttagccctcggtaaatttcttgtggaacgagcaaaaatttattagccattttgcaaatatgtgagcgtgaacactaaaattgtggggtatttatgcgtttttggtcacaaacgattttgctacttcaattagcacgggtgttaggagggcggcaaacaaccccccaaatcccgatcctttctgaacaagcacacgtctcgcgccgcgttcacttctcgctctgctcatccgtcgcacagtctcaacatagggcatcaatcttcttttctgtcgtgtagtcagccggaaacgtgaagcaacgagattcagacaaatttccactagcgctaatagctgatcgctgttcgcgtgacgtaacatcttcctacattttttagaggatttggtcctcgccaaagcacatagccagtccgagttgtcttttattagctgtcctattattatctgttgttgttgttgactatggtcctccatttttgggaatgaaaacaacaatgccttcgtcttcctcctgctcttccttaaatatgtttgcgcgcagacgcaacgatgggtccgatgatgcatgcatgtcgatcagcaaatagccgtagggacgggcggtcgcttggcggtacgcatccagaaagaagtcgagttggcgcgngaaaagttggattccaacatttctgatcgacaacanngagagtgngtgctcgcatcagtaccagntactgggagggacagcgcgccactttgatcttttcttaacaaattttgagtgacaaac

SEQ ID NO: 3774 - DNA, 3301 bp, Heterodera glycines
  unsure (1)..(3301): unsure at all n locations
aaaaattaattttgataatataaatctaaagaatagcggaactaaaaatgccaatgttttccctattaggtgcatttccgcgaaattccctcccacgtgctgcagaaggtgtgccattactttgcgtacaaggcgcgctacacgaacagcgcgacggaaatccccgaatttttcgtggcacccgaagtggcgctggaactgctgatggcggccaacttcctcgactgttgaccaaacaaacaaacaaaatttgatgcaaaaatggtagcaacgacagacagacgaaccgatggccagacaaaacactgactgattgtgattggcaccgatttggaatttttgtgccaaagataaagccaattattaatttgtgaacgacccacacaaaattgttttttgcggattcgtttttttatatttatgtaggagtgcagacagtgagaagttagacaacgaagccgcgaaaaaagagttggttttttactgttttaaattgacttttcattcatttgcccttcgccgctcacagttgagacagtataaaaagcacacgccaatgctttatgttttggcacttttacagtgcaacgactttagcatctcttttttggtttttgataaaatcgtggaaaaataaaactaatattcagagaaaattttctaaattttctctcggttttttaagattttcatttaaaaaaatggcaacttttggtgaaatttggtcgtggaggggataacaacaaggaaaatctaaaatttaagtaaaaacactttatttaattgctatttaattaggcttattccgtaattatctaattatatgaaactccacaaaagtgtcgaccaaagttcgcctttttttattccgtccgttttgtgttcctccgttttctctgaccaaaatgcattcagtcgatcgaacgataattactcaaaccaaataatgcattcattaattgacaggaacgccaaccaccgaattttgtgggggcggggcatggaccgacaattcccccaattccctcctttttttgttcgcccattgaaaagcgatggtttggaaatgcatttcactttttaaattcgatttttggctgaattgaaaattgccattttcatatccatttacaattttattttattttttggaattttcattttccatttacacaatttttaattaattcattgatttatttataaaaatatttcccattttcgcgtgccgttactttctcagtccggcagattcaatctgaccgcaacaagtgattacaatctctctccacggctcagaagcggcgaaaaatgagccaacagaaaaaagaaaaaatcaattaatcccatccaaaaaaatgaaaaatcttttcaattaaatattttaaaagtggctaattttatattttgggcgaacgaatttctacattatcttctctagagctcgacattttgaaaaaagcctgggcctggatttccttgacaaaaatccaggaaaaatatctcaaaatatatctaattacaatgataagcgtgttaaatttattttttcattttttggaaattgaaaaaacatcggtcacttgaaatacataataaattctaacattttgtgtagaaatccaagttttttcgtgcttagcctgggactgtaacctgtatttcctggacaaaacccaggttgccaaaaatgccctggacctgtaggcctagctctaatcatcacatttgtgaattgtctcctctctttttttgttgccattttgccctaattatccgacaattttaaaaattttttccattttttggggtaaccaagcattgaattgatttatttatttattttgctgctatattcttccaattgtttgctctcaaatggtgctcaccgactcggcccatgccgaccccaaaaatgccgtgcccttccgtctgcgcatcgacggccattgggtgcgcgtggacgagcggctgctgcgcgcgcacccgggcagcggcgcaatgctcgcctaccgggacagggaggcgagcactgtgtcagtgggggatttgaaattcggaaatttatttgaattttccaataaatttttcatttttcaatgccctcggggctctctgaggtttttgcagttaacaataaattaaagtataagtatttaactctctctctctctcccccccaatttgatcacatttttaatgcgccgaaaatggacgtgtttttcttaattcgcttcacaaaatatttatatatcccgagcagaattgaaccttggccccaaaaacacagggtttaattaaccaacatcggcggggccaagtaatttttacagaaaatttaaccaattttttctcagaaaaagccaatttaatgaattttgctgaaaaaactgagaataaaaatttttaggctgttgattatagtcaaaaatgtttttaatttggatttggttgcttctgagaaaggcatttttcgaagcgttttgtcaaattgccgataaaagtgccgttgtccccgcccgatttgtcactttttctctcagttttcattcgttccatgccggctcaaagcgtgcctaccgatggatgacggaacaccgtgaaaatggtggtgccaccgccgaaactgaggcgacaacagaggcaaacggaacggcagcaaaaaacaaagtgattaggccagaggcggaggaaaatggcaaacaagtgccaaaaatgtaaagaaaatggttctacaaaatggatattttgaaaacagaaaagcaatggcacgggcgccgccctttggccggacaaaatcgacgccataaatatgggcaaatttgggaagagtgccgaggcaaatgaaaaggtgggaaatgttgaaaaataaattttatgcttattttcacttgctacagaaaaaaatattattttaaatttaaatctttattaaaattatttataaatttaaacataaaaaattatcatttttattttccttaatttaattatttttttaatttaaaaaatatataattaaataatattattttccatggttatgttacactttctacaaaaataaaataatattttttttatttcacaaattttgtgaatatttttaaattttaaaaatatattaattaaataatactttttgtattaaaatttcttttaaaaattatattgatcattttttattttatctaattttacttttttatatttttaatagatttaaattatttattttatttntaatttcacgctatcccccaacccccttacacatcccattaaattggtggagtgacaa

SEQ ID NO: 3775 - DNA, 3584 bp, Heterodera glycines
ggcacggggcgcgggcggggggagaggaggggcatcccccctgggggggagattctgattaaaacttattaccacggagacggacagtcccgagtttactgtcccggctggcaccctcacgagggccatccccagggagaagttcgtggctttaccacggggacagtccctacatttgaggcccctcctccaggccccaaatatccattttaaacagttttgtttgcatttggccaactcttagtaatatttaaacccaagtgccatactaatcatagcaaaactgagggggttgggtggttttgtcctgccatttgcatttgtgacggtgtccgccggtcccttttcagtacggtcatcagcagcactttggctcctggtggtggaacgacgtttgtggctatgtgtgcggcaatttgatgcagggcttttcgctcggcggatggaaagtgtgtcggaaggagaagcatttttctgactttttgatttattggcactcggaaaataaaatttcctggggcaatctaagtgtcacactctttcttgtccaggaacagcacaatgtgcaccacgcggcgcccaacgtggacggaagggacggcgacttggacttgttgccgttgtgggcgaccatcggcacacaactcaaagtggcgggggaggggtggaaattagggcgctaattggggatggcatcggtgccaaaactgacatatttcgaatttgatttccaaattccttccagcgcattgacagtgcttctccgctcgcccatctgttgcccttccagcatttgtattggtccttcgcgttgccgttgctccgtttctcgtggctgctccaatccgtccaatttgtgtgccaaatgcggcacagtttttacgatgtgaattcccatttttggcattttccattttcggcatttttttgctcagatccatcgccagagggcacttgttgagcagtgttcgttggcattgcattggtcgttggtgctcgttcagctgtactttttgccggacaatttggtgaaatttgagacacacttttttattactactctattctatgcttttgtaattgtaaatttaattcatttccccgccctctaaaaaatgaaaattcggcaaattctccggcagattttcgggatcgttgaccaacatcaatttcgactaattccgaatccctaatccgaattcgaacaattcaatatacttttcggtcccccccttttcaggcccgtctccaatatttcctcgtctccaatctgttcgccggtttcctcatcgcacacgtggtcacctacaaccactactccaccgacaaattcgcatgtgcgtgaaaacggcactcactgatttttgggccaaattttcgcgcgagaagagaggagggggtgtcttgggtctcggaacttgaaaaaatttgggtcgcgagtctcggcatttttctcgttccgtttcaaatttatacccgaaggttttgggccatcccttcccttacctaatacctgtttttttcgattttgggccaatttttaagaaaattaagtttttcggatccgacggtgtcgataggcacagccgggagaaaaattgaaaattttgaccacattttagcagattttcatcaaaaaaaatactaatttagtgggttttcggagaaatttaacgaacttttttggataattaggggtgaggtaggccttggagggggtgccaacaaagaaaacgaaaattttcaggaaaaatactattttttccttaaaaatttcggctgcgaggctgggaccgtccgtccctttacgcaatttgggaaatctttcggcttccatgcttaattccgtggtgtttgaattccgcctaatcccgccagatgacgacccaatcctggagaactttgcctgtctgcagctgtacaccacgcgtaacatgcggcccggcccgttcatcgattggctttggggtggtctgaactatcaaattgagcaccatttgttcccgacaatgccgcggcacaacctgaagaaggcaggcaaaaagagtgcccgttagcgttgaagcagaaattgccagcccttttaatttgctggcatgtatgtttaatgtttagcccatcccccttgtcaggtgatgccgttggtgaaggaattctgtgccgaaaatgacatcccttacatggtacgtatgtacgacatggcacggcaccgtgccaaaaataatttaaatcgttaaattgtttttttcttgagaaaaagatttctaaatcttttagggtgcaaaagtgcacccaattagcgggtctcgtcacatttgccttttatccaacttggtcagatcaccccttgattgtgatcgggacacccaaaaacacactgaaaatctagaaattttcggaaaaaaaacatttttttattaatttttcggtggacgattatttcacgggctttcgcctggtcatcgaacatttgcgccgagtggcggaagcggccacagaaacgctggtcagccatcacagccaaaaattgccatgaacggacacagcagcagaaagtgatcgtgtggaatgggagagcttttcatatgatcaatccgatcactcactcactgctgttaattactattttaaagagctgaaagcatttttcctctgacacattccatcgttttgttatttttgcgctgtcatttaatacaacaaatgatacggtttctcttcttctgagactgttatattcacactttttgaattattatttataagggccataacatatgtataagcatataaaaaaaagaaaaatttgcacataaagtttccttggagtatattgaattgaaaaatgccaattttgttgcgaaaaactgtaaatgaatctctaaaggcataagcacgggccatagggtgcagcttcgtacattacaacactcgctttatccgcaaatttgatttttttgtgcgggatccgcggtatccgactgaattttttaattaaaaagacagaatgccaaatattttgagtaaattttaaaaatcaaattaaaaccattttccatcgcaaatttcatgcaaaatttatgaaaattttgcccatctacccctctgctcccattaaaaaatttgaccgccaacctatctcctatcgtatgaccctactgaaaaaaattttttcgaccctccgccctttttcatttatgaatcgattaattatttagggtaaaacaatttttggccgtgcccgcatttaattatttcacacatttacatttcatttgttgccaattgtcgttcacttaagcttaaggcaaaaaagtctttaaatccttttacattgccaggaagaaaataccgatttcgtttttcgttcattttcaatttttactctgcaaattccaaaatatggcgtctcaacttcaggaaaggaaaaaacaattggacgcaggcaaaaacttatttttaaaaattcattttgttaaaccgagaaatttccagagattgaacagttgcaaaaggaactgaaggaaattgaagcggacaatgaggaaaaacagaagcaactcactgatggttggtacggtttc

SEQ ID NO: 3776 - DNA, 4160 bp, Heterodera glycines
gagagagagggggcaagagagagagagtgaagggaggaaaggaaggataggatgagtaagagaaaaagagagggaggggtggagtagcgatatccgatgcagatgcttaattggcgtatttgtgaattttgcgtttgcttacgcccacaaaaagtaaacgaccatcggcgtgtagcagagaaagaacagtgtgacacaaaccatcaacattttgacctcgttgcgccttgcttaatcatatagtatcgttgtaaaatactatattacgcgagacgccgattggggatcacatgtggtcttcttgggaaggagagggtgggtcttgtagcttttttcaggaaattgtattttcggagtcgcaataaatctaaaagtcagaaaaatgtttctccttccgactcactttccatccgccgagcgaaaagccctgcatcaaattgccgcacacatagccacaaacgtcgttccaccaccaggagccaaagtgctgctgatgaccgtactgaaaagggaccggcggacaccgtcacaaatgcaaatggcaggacaaaaccacccaaccccctcagttttgctatgattagtatggcacttgggtttaaatattgctaagagttggccaaatgcaaacaaaactgtttaaaatggatatttggggcctggaggaggggcctcaaatgtagggactgtccccgtggtaaagccacgaacttctccctggggatggccctcgtgagggtgccagccgggatagaaaactcgggactgtccgtctccgtggtaaattaagtcatcagatccttcccccgggggatgccctcctctccccccgcccgcgccccgtgccgtgccatcccatgggcccacttcgtggatcatccacccgagctgttgccaggcgatgcccatgcaaaaggcggaggcaaggaaaaagtcgcgcgactggaggaacacggcgaacgcaatcagagcaacgcattggacaaatttgagcacgaaaaaggcgtcgtccgcgcgaagaaggccaagcgaacggacgcgggagcggagaacatcaaaggaacggcaaatctaaacagcagaggggggggcatcatggcaaagtgttaatgggggtaattaaagagaaatggtgacaataaaaatggaaacattgggatgggcaagggggagggtgcaaggcagaggttgcattgggtcaccgtataatttaccttttcaatcgcctcggtttcgccaccactttttgcgttgttacgtcgtccatcggcatggaatgagcagaaatgaatatgccaaaaatcaaaagaatatttaaaaaaaaaagaatgaaaaatattatgacaatttcttaggggctttttaattcaaaaagggggaggggtgagagaatggaaaaattttttattacagattaactctgcggttggcaatgcaaatgcgatgtttggtgctcaaaatgaaaaatcttgatttagcttacttatctaatttaacaatggaaaacaatcaacaaaataacaacaaaaccatcagaacaataacataaccagcttaatcttaacaatggtgtgaatgggaatggacagcaagtggtgccagaagcccagccagtgagtgaacgggaaatcagaggcttttcggggcactgatcgcggatctgacatccaagtttcctacattatatttttgttatataaaatgaaagtgttaaggattccgatttagtcgaaatgggtatcatttcgcgatcaacacccgaaaatgctcggaaatacatatctatgtgttcataactaaaaaacaagaaaaaaaagaggggaggcggcacgacctatcaggtgcagagataaaaggcgggtgctgaaaaaacacctattttctcaaaaatggaggctgctgttagaaacttcacaacccccccccccgttttcgaaaagatttttgtattaaaaatcgtgaaaatatgttaccaagggctgatcacgaatccggcatccatttttgcattcccgacctactattcaacccatattactttgcctaacctaaatcactatatatagcccatttgggcgctgaattgggtggaacccacccccactgcggcgctgttccctgcctaagggacaggggtatgacaccttttttgaaaaatttttcaaaattttcataagtcttaaaaacatgtttctaggggtttataggtacgctgagcacgaatctgacatccatttcgaccaattccgaacccggacccgaattcgaacaaaaagtcgaaaattcatttttcatcaaaattcacattcgtgcacacaccgtttcagttttggcctcccagttccaaaaagatttgcatatgtggctcagtggtttttgtaagatagtaaagggacaaagggtgttggttcgagtccgttgtgcaacatgaatatttttatttatttttttgcaaaaaattaaaaaatgaccatttttgggaattatttttggaggtttttaccaaccaaattgtacaaacttggtatcattcgaaagctcctgataaggagaagctttttctaagcaaattctgagcattttgatgagttagaaaaaatatatgggtgttctaaacttgcaagttttgaactaacgtataaacaaaaataaaatcagtatagaaaaatgcagattttttttctctatcgatatgcaaaatttgaagcggatttaacgttaggaaaaaaagttaaacgtcacgaagtaaattcagtttttctctattaacagagataaagaaatagtacgccaaaaagagagatgtttttttctctgcactctctatttaatggttcatgtctcgttttttgaaacggtgtgtgcaactaaagcaatacaaatgcacgaaaagacgcataaagatatattttgcgttctcttttatgtttccagcttattaattaatatggctgcgttggaagcgtttcggaatttctcatgtgaattttgatgaaaaatgaattttcgactttttgttcgcgggtccggggttcggaattggtcgaaatggatgtcagattcgtgctcaggcgtaccctataattaaacgagtgccacgggaccgggaattttgggcaaaaccgggaccgggacttgccgggacctgagaagccgggaccgggacctcgattttttttcgggaccgggaccgggaccgcaagaaaaaccgggaaccgggaccaaccgggaattttttaaaaattttaaaaattcaaatttttaatacaaatttaaattgataaaattgcttttgttatttcaaaaaggcaaaccaaaaataaaagttttaaattttaaagcaagcaaatagtttgtaagaatatatttggatcagatttaatcctcaattatttccaactcatcaaagttcagcaattcttcatcatcttcatcaggttctgtcgatggtgccaaattcaaatgacccaaatttccttttataagcaaaatttgttctgccatatcaccactcagactaaaaagaacaaaaaacaaaaatttttgatactttttcaactaccgatttcgcaacttgttgccatatatcatccctgcttttgaaaataatcgttcggatgacactgatgtggccagaattgattgggcaattcgtgccaggagaaataaatcaggaaattgcacgccaacatcgttccaccaattaaaaatatcacaatcaatttgagtgcggcctaagactttgtaagtgaccaattgaagctgaatacgcgacgtttgcgtagactgagaagtccctgaaattgccgacggtaatgacacacttccaggcgatttgggtgcttccaaatgtcgacttaaagaataaaaaatatcgttaaaaattttttggtatacattttatgctttcgtcgcttatttcttctgcgtcctcaagaaattggtcattttcgttcaaggggttctcattttcagcttcaacgtttggagcaggatcgctgttaactaaaagataaggatttttggtcgtcctttttaatgaaaagcacttttttctcgcgcgtattcgattaaatcttcctcaataataccccaattggcctttgaaaaaatggtttcgtcatacgcaaatcgagggtccagcaatgaacaaattcgaa

SEQ ID NO: 3777 - DNA, 4730 bp, Heterodera glycines
ataaatataatttgtaaaagcataaaaaaatatataataaaaattaaattgcaaaatgctaccggaatggaaaatttcaacgcaaataattgcaacctacaacggtaatggaaacaatgccacaatctattcaagtgaatctaagtatttttttacattcaaataaataaattttaaatttctagctcggaagtaaaataaaataaaagaaatgtttcatttgtttggacaaaataaatttaactaattaaaagactttaaaattgttgctaaaaaaagaaaaaatttaaccctaatattaaacttataaaatttacaacaattgcaggatgtcttttcatagccaatatttttaatcatttttaaaaaaatcaactatataatgaatgatattttaatttcctagttaaataataaataaaaactttgaatttcaattcaataattatgcattatttcataatttttattcaatagaataaacaaaaaattcttaaaaataccaaattttatgagtgagaaaagataaatgtagagtactcaattgttttattacaaattttcaataaaagaaactgaataaactatagagaagaccttattttttgaatatattttaataagaaataactaaaagatcatagaagcacaagttaaatgataaaatgagaagcaaagaattataaatatatgaaagaaagcgataataaaaattaaagtcaagtaactgatgtgatgaaaataaaagaaataattaattcaataataaaatagcatcattttaataatcaaacatagtcataatttataaatctattagatttaaaagctatagaatggaactaaaacctatagacattaaaagtttaaaaattaaaagaaataaaaattaaatttttacgcaattgaattgaccgggctagagatcatgtcgggaaattccgtcaaaatatttactatttctaatttataaatttctacaatatgcttaaattttaatcaaaaacataaaatatgaatactgcaaggtgcattgataatatattattagaaatttatttcattcacttatttataaacgaaactaaattgaattaattaaagaataaatttttgaattcaaagtttcgacgcaaattatcttttttacattatttataataagtatttgtccaggtctcacaattcactcgacgtgggagtgtcgcgaatagcgaatagcgcgtaaatttaaaacaataatattacgaaaatgaataaatagtagcaaagtgagtactagaaaatttaaaatattaattttaactaaaaaaaggcaatgtaagtgaatctaaaattgtctcaatgaaaaattggtaaatataaaaataaaaacgaataatatccaaaatttaaattttgtactaatgttaaaatgatgatctaacaaatttttgactttataaaattttaaaatatttgttcccataaattatataaagaaatttattagatgcgttgttaaaataattattgaaataataattgaagaaataatttaattttttaagcaggtggagctaacaaattttatatcatatttattaaaaacaaatccttattcagtgtctacgttaaagtgataagcaaataaataaataaataaattaaaaaataaaaatttaattaatattatagtgaataaattatttacatctatttaaaatttttcatttctgttttactgcaataaaaatttgttttcaatatgcgacaattcatattttaaaaaggtcaatacagcgcgctgaaggtacaatttttatggagtcggggtcgtttttgcgtgggacgagtttttgaactataacttttttctttgtcaaccaaatataacattcttggtatcattcgatagccctaagtgttctctattagcctgcaaaatctggaaaaaaagttatagtccaaaaacccctccccacgcgaaaacagcctggccctatttttatgcacttcccatagcataaattaacggaacgataaagatcattccaattttcgactttatgagtaaattatttaattttaaaccattcatgttattttaaaagagaattaataatattggtacatgggaggcaaaaattttatcaattatagaaccatacgatcctatggcaacagtaagacctacgcgagtgtaataaaccaaattcgtaaataatattaatttgtaaaataataaatcatacagagaaaataaaatttcaacaataaaaacttcatgcacggatcggctcatgacaagaatttgaaaataattaaaataaatccttcgggaaagaataaaacatagttctcgaactaaattaaaatcaaaatgtttaaaataccaataataatgaatttatcaatagtatctatgaaaagtgaggcattaatcaaatgataaaataattttaaagtagttactatccagcatgcgtctcatcggcatgattgatgggtttctttgatctcgccgcggtgattaatgagtgcgggaatagcctaagcctatgggggggggggtaattaattgtgtggtaattaggggggggggtgaagcctatgtggtctgttttgcggaaaattcccgcatttgtgggggagactttttgtgaaattttttaaaacttttaggggggggggtgcgcgaactgatcgaaggggtgatcattgatggtgaaggaggggatggaattaatatccatgtgtgaaggggaagggagggcaccgccgcatgtgtgttggatatgcttgtgttaagagaagcgggagggagagagaagagagagtggtaaaaatatctgggagagagagagagagaaaaggtaagagataacagtggatggatagagcatttagattacttaagcttaaaggtgcaaatctttgaaattaattagatttttcctatttttttcaaatttagcaaataaatgcagcaccgccgccaaatgtcacagcactgcccgcaaatgccaagtcgtccatccggcgtccttgttcaaagcgggcaccaaaggccacttcatcaactcgccggtccagcacgcgccaggtcaacctggctgaatgccgcgtggtcgtcaaaatgccaaaactggtggctttaactttttcgaaaatcatatttttaaattataaataattattaaattgttgttctataatttggtcttttttcaagcccaaacgaaattcgtctgaggcggaggaggaggatgtggagattggcaactcggacgtactgcgaccgcgaggggaacgcagcacggaaatgccagcacattgtcaaccgaatgggtggtcaataggtgggcagatagatgattgtcaattcggggaaggggaggctggtaattaaaggtctggtgatggatgggaaattagccgcaaaatttttcgtttttccttatattttcataaattttttctctcttattcacaggtcgatcagtcggaactgacaatctcaccgctcattcactcatcgtctgttttgcgcgagtcccattccaacttcacgtccaccagaaatgcggtccgttcgggagccaaattgatctccaaatatggaggacgcgagacgactgacaaagtgggttttggggaccaaatgaaattttctaagggggcccagccatgtaaatagtttgggggggggggtattgaggaaggcataaataaatgtttatttggacatttacccatcgattaattaaattaattattttttatatcatcacgagccaattttggccgaagcgatcagcatcaagatggaacatgccgccgcaacccaaaggtgcggatttgagaactcggtggagcattgcgaacaaaacaaaagtgtaagtatcaaattaaatggatcgatcgggagagggggcggggcaacagctacaaaaattattaattaaaaaagcgcacttgcaatgtagcgacgcagacaatgatgagttattgaataaataaattaaaaattaatagatgagttctcagacactcctaaatttaaaaaaaatttaaaaaaacagtagagtgctcaggcactccgaaattttaaaaaatgattaaaaaaatagtagagtgagtagtgacccgtgtacttttgttacaatttttggcgctaaattcaaatttgaattttcgcgtcgatattcggtgggtggaggggcgcttgctggggaggaggggagggggcgcgctttggggtgtggggcggtgccgtagggtgtaaggcctatgttattttaattaaattttattttaaattaaattttaattattttaaattaaataattccccaaataattatttcccatcagtgggagggggcgcactcattgagggaagagatgaactttattatatgaaatgtgaaaaataaataaaaaaatgagaacagatgggaggggagggattagcagtgggggcaatcactgcggcacttctgcttccaatactcaacaatctgcctcatccttttgtcacggtcgcttcgacgggacgaagtggtggacgaagaagtggaagaggaggaggacaccgagctgaacgcggttcccggtctgctgtctccaaacagaattgctcgggcggtcgcgatctgttcggccgagaggcgcttgtaggcagtgcgcacacattctctaggaatgcgccgtgaagacgaaggagcctaattggggggggggggggg

SEQ ID NO: 3778 - DNA, 3027 bp, Heterodera glycines
  unsure (1)..(3027): unsure at all n locations
aatttaaaattttatagaatatataaaaaaatttataatattttaagtagtgacccgtgtacttttgtcgccccttttggcgctaaattcaaatttgaattttcgcgtcgatactcggtgggtggagggacgcttgctggggaggaggggagggggcgcgctttggggtgtggggcggtgccgtagggtgtaagacctatgttattttaattaaattttattttaaattaaattttaattattattttaaattaaataattcccaaataattatttcccatcagtgggggggggcgcactcattgagggaagagatgaactttattatatgaaatgtgaaaaataaataaaaatgaaaatgataaaacaaagggatcagcaatgagggcaatcactgcggcacttctgcttccaatactcaacaatttgcctcatccttttgtcacggtcgcttcgacgggacgaagtggtggacgaagaagcggaagaggaggaggacaccgagctgaaggcagtgtccggtatgttgtcaaacagaattgctctggcggacgcgatctgttcggccgagaggcgcttgtaggcagtgcgcacacattctctaggaatgcgccgtgaagacgaagggacctaattggggaaatgtttatttcacatttataggtaaaagtgggtttaggctaccgtttgcaaaacatcgcacaacggcagaggcaccggggcatcatcgagcggaaaaggcattgcgaatggtgggaagacgggcagtggtggcatgcgcatttgcaaagtgctgatcgcctgttggacggcagctgaaagcatcggcgatggttgttgctggtgctgtgttgccgggacgcaatgtgtcaattgttggtgttgctggtgctgatcctcctcgacatgttgctgctgctcctcctcctcctcgacatgttgctgctcctcctcatcaacaatggctgcgccgtcgacgacaacctccacgtccggtgatgggacccgggggaaaacctggtcctaaatcaaaaatttgactgttgacatgtcatgactcatcattaccaagggcacctttctttccccaatcaacncaaacaaagcaaaatcctctgcgtgcacgtccacagaagcgatgacgctaaattttttttgtgtattacttgttcatttatcgccaatttccccacattttgcgggccctctcgatgtcgatgacaccaccaacagctgcatgggtatacacagcttccatcagacgagcgagggtatacccaatctataaaatgcatttgcagttcttaaatccccgttctcgctaattttacgtggtcgagcagctcctcgtccttgaggaacgtctcatcgcatgattggtatccaattagataccaatacctcacagcaccgcagatgcgacgatggcgccttgtcgtacagggccaaagacgtcacttcatactcagttgtgccatcgtcgtcctccgcgatgtcggcagcattttgatccgggtgtcgatgttggcactaataaacaaatttgtccattaaaaatgaggtagttacgaatggcttctaactcattttgcactcaaaattatgaaaagatctatctcgggatgagtcaaattatcattttttgcctataatctataatttcacaattaatttagacttattagataaaaattaccccgaccgtccctaatcgcaatttcaacaaattttataacacattcaataaattcaaattttgccgccgccaaaacatgtcagtggggcgcttaaagtcacctattcttttgtgtccaatattccctgcactaatctttgttgatcgccccgagccaaacaaagaaagataacatctgtatgaccatttctacaatgaagaggtgacaaaagaaacaaatttttggagaactaaagtggatggggaaggggaaggggggggggggggtttagcgatcggcatactccgctggtcatttctccgaatattcgcgccatgcagtggattaaatttaactgcacgctttgcccgatcggtctgcattgtttttatccgcgcaagtacgcaaagcctgtgctgtgtgcgcatcctagcgtcaacaacatcaccgactttttgagcaccgggcagcttgaggaagctgcaacgacagcaacaacaacaacaccattcccgacaactgcggatgtgtcggcggcggcagaatgcgcacctccgcccgcgcagctgaccgcatggatcgcggtgtgcacagcgctggtggcgcttttggtgattgcggaggtctgttaattttgggaatttatccgctaaacccctatttcaattaagcttgtgcgcgccggattcaaagtgcgcaaatttttgaaggaccgcgccttcaaaaaggggatgctgcgccgacatcgccagcgtgagtttctcgctattacatttttagcaaattgtaattaacaatttgtacaggaatgagcgccgcaaggcgcaaccgccagccggcaagcgcgccgactccgctgattttgccggctatgttagccggcgtttctctgcgcccgacgggcgtcaatttgactgtggaccgggtgggcaattttaattaaattaaaatctttatatattttaatttctcactcattaaaattacaatttaaatttaaaggcagcggggcagcgccgcgcggatggtgcaattgaggagggcgaagagcccgtgtacgatgaggtgccgcttgacagcgacatcgtggtcgagatgcgcgatggagaaaatggggaggaggaggaggaggatgacagtgatttttagtgattcggcaagcgatcactcaccatttaaccaatcgatcgatttttcactttaaaataaaattttaaaaatgtttgaaaataggataactaaaataggaatttataaaaagctaaaaatagatacaacgaatgcatcagataaaattttaaatgaggatttagaagcattttaaaattgtgggtgggcgctcgctctatat

SEQ ID NO: 3779 - DNA, 1052 bp, Heterodera glycines
gataaaaaagcattgtacaagagtgttattgcggtggttgatctcattataaacatggtcgtcataattttgagcgggctccatactgtctgttccccgtttcattccgtttgaggaaaacggggcgttgacgcgcatgtaaaggaactgagattgaggtggacacaatggtcatcaaggagggaatcaccttatggtcacacgcatagaaaaagcgcagtttgtccatattgatgttgtctacgagcttcccggtcattgttttttcccgtgaagaataaggcaagggtgttcagcgttccgtacagcgaactgccgtcctcagacaggtgcgcccagcctctacccccaccaccaccacaaccaccaatgacaacagcaaaacatcaacggacaccggacgacgaggaggagaagaatttgaggcgtaaggcaaaggtggcgcttgacttagtggaagctggtctagcggcagacgcaatgatgcaggatgggacgcgttggaagaaagccaaaaccgcgatcaatgtgctggccaatttgcttttggcggaatcattaacagatgtctcgccaacttttgatcaacaacaacaacaacaacaacaacagctatcgtcaaaagaggaggagaagagggaggaatgcacaaacaacagcagtgctgcagcaacaactgaatctgctcccgatggtgatgtaatggacgatttcgtcaatagcattcaagcggcgacaagcaatatgcaatagcaaaaaaagcgcaaaactcgctctgccctatatataaaagttgatgattgctgctcaatttgtcataatttttgaaaatgttaaattctcaatcgttcagtaataaagatatttgtttcaaattgccttgcggtataattatttccgggccctcctcgtcgggcaaaatggaattcctactaaaatttattgctgagtgcaatgaactgatcgcgcccagtcccatctcaattctgtactgttttggtgagatgaattaggcggttccgctactgcaaaaggcgggagttgaggtgtat

SEQ ID NO: 3780 - DNA, 434 bp, Heterodera glycines
  unsure (1)..(434): unsure at all n locations
ggattttcatcttaaaaaaacgataaaaacgggtcaattaaaaaaactcacgagtaatcatccatcatattttgtctataggaaagccacgagtatacaaaaagaaaattcaaaatacgttagtttccgtagagggatcgaaccaggggaaagaagaagggaaagtcaaggagactagccactaggccatccgcacaattgtcagcattacttttaaagaatatattaatatatttttaattttttctttttaactcgaattttcttcactaattttcactcagacccccattcttaccagtgcttgattttcccggttgccctaccgggaccgggaccgggacctgagcttttcaaaatccgggaacncggggaccgggacctcgaatgaccgggaattcccgggccggtcccggtgccgcggcactcaagtt

SEQ ID NO: 3781 - DNA, 6547 bp, Heterodera glycines
  unsure (1)..(6547): unsure at all n locations
attaatttgactaagtttaagctaagttatgatttattatttagcaaataaaaaaataataatttaatttaaattttatatcattgatacttttgtaagttcggctcaccacgatttaaattaattttataaatcaatccattaatgttttaaatggaatttttaggaccaaaaaacccgaaatatatacacaaaaatatgtgcaacaaatgcttttgttcaaaccaacataatttcgccatttctaaaaaattaccccggtgacgtggtgaaaaacatcaaaatttgtttcaaatttagaaaataggtccttaaaaatcctcatttattacttaaaatgctcaaaaaagttgtaatgaaaatcttgattttttaaaaccaattttaaccgtcgaattcagaattttttttaatttatttccatggaagggtccaatggtgccgatagacacaattggggaaattttggtaattattttgcaaattaagacgaatttttatgcattcacttcaaaaagctgctgaaagaaaaacgagcaaaggacaatttgcaaatttattggtcacaaaattcggttcggttctccaattctttcaaaaagcggcgtacacttttctcagcagtggcccattcccttttgataaatctctcattttcataatttatcattttgagcaatttttcagccgatacttcgccaaacagtgccattttcaaatgggttttcgggtaatccgttggcttacatttcccatccaaaaaggcaacgatcccttgggcagtcattcgcttcttcggctcaatatttaacatattctgtaaattttcataaaattttggttttttatttttttgccgggataattttttcattttgtttgttagaatttttgttaaagtttagatactctcggacttaccgctgaaagaaaggcaatcgctggcattttttgccaaaccgacagaatgttcgttacagtactcaaatatcgttgccaccaatcttttgagccggactgtgcactttctcttggcagctttaatttatgcatcagtgaatctgataagccaccgtccaccgaattcaatttttcacttcgaaacaattcaccaattttttgatgttcttccaatgcgtttgtctccgttgtgaaaaatgccattgtaaaaattgtaattcccgccgcccaaatgtccatctttggagtgacctatccttttaataaattcaaaataaatccagataattagtgcaataaattagacaaattaaaccgtttaagcagactttaattttcatatttataatcacctcaacgtcaccctttacaccatcagatgcaagtgataattgctaaaataagtaacgttaacattatttaattaatgcaatttctcaatttgaattaattatttaatcctgacttgaagcagctccggtgcagcataagttttagtgcaacctattgaatcttcattaattttaatcatctttctctgttcgtcagaatataaaactgacccttcaaaaaacaaacaatgaaatggcgtaaataaacaaaaaattaaattaaaaaaagtataattatttaatattgcgattaaaaattgaagatttattattatttttttaaataaatattaatacaaatcataaaaattaccgtcaaaatcgataagttttaattcctttacttttccaaaaaaatcgtttctttcgaaaacaattaaattcattggcttgatatccaaatgaatcccaactaaaatgtggataattaattaataaacaagtttaatgaattaattaaattacccttgtgaaaagcaaccaatgaatttataatactcttaaccatgctgttaagttctcttgacgaaaaatttccacgttgaagttcttcatctaaatccctttcgccatgctcaaaaacggtcaaatttgaattatcatcaatgatcagatttgtttcatcaatgttaccacttaaattctcaataattttaattaaaatgaattaaataataatcagaattatttataaaatcactagtctatcaattggacaaagtgttcattctgcgaatcattttctgctaactttttcaaaattttcacgctattcaaatattcttttttaaactcttcttcataaattttgatggcaatgcatttgttttttggcagataatgatttgcatcggtggaaaaacccatgaaaatctgtaaaaaaactaattgtaatttttaaaaattatttgctttgtgtttgtatttcggtcataatttttttcaaaatcgattcgaactcttcgaaattcaattattaaatttttatcatgaaaaatcaagcacttttctgttctgccgcaccctcctaatttggccaaaacaccgcacactcgactaaatcataataaatcatagatttttgcagttttgacgccaggttcttgatcagtgcctaaaataccctagaaaagtgctttactttgtcgggggggggggggcataacggaagtaccaaagatcattaattttttaagtaattacattgtgtgccaattttttaaaaaagattttgatttgcgcagtactctcagttggcctcctccattgggtcgaagggtattgaaatggttccatttgatcagtcggaacaccgcggcattcgaaagacaaaagggcacaatcaaattggaaataaaaaaggaacacaattagcagaagagaagaagcagcattcattttgctaaaaaaaagagaagctaatatgaatataatatattaaaataaagttgatggagagaaaaaatcaattaatgtaagaatatttctgttgagaaaggacgaattgatttcgaaattttataaaaagaaaaaaaaaattttttttagattacaaaaaagcatttaaattttatatccatttagtaattagagttttgagtaaatatttgaagtaaattaaggatttaggcccggagacggtgaaagatgccaccagggaaaaatttaccaaaacataagcgctaatagtctataaaatttcatagattttatacttcaaaatttttgcaaaaatatgcgtgttttcaagtttgaaaaaattcggtttttttaagtttttaaaatttgcatgctgtatcatttatggggtccactgcgtttcggcgcgctcgtttcggcgccagcatgtttttccactatagcttttttctttgtcatccaaatccaacattgttgatatcattcgaaagctaacatgtttagaagctttttctaagctattgattcgccgttagacaattaccaaaaaagttatacatgaaaattgcaaaaagtcgaaatttttgaagtttttttattaataagagttttctaagtttgaaaatcttttcgcttttggttaaggctaataaagcatttcgaatgataccaagattgttagatttggatgccaaagaaaaaagctatatctgacaatacaaaataataagaaaatcagcttttacaatcttgtaaaatttgaaatcgaaattttcggtctatttttaatgcctctttgaggatatatgcatatttattgcgtatttttctaccctttctgcttattcagttccaattttagttttaatataaaaaaggcatggatttgatattttcagacattcgtatgggtgggtatatatatttttttttaatttcaggtttagggatgtattttcgtttttattgctcttttaagtttcagaaaatcgtgagaatagtctgcgatgtgataaattgataaaaataataaaaaaaatttctgaatattttatgtagtcatcatattgctaaattatatgatattcaccaaataaattgtaggatagattaacaaaaactgaatggtacgcatgtggcaggattcgaacctgtgcaggaaatatccctttgcgacctaaacgcaacgccttaaccactcggccacacatgcggtaaaagtaatcgaaccattgtgttaaaaacaatgcaatcagataaaaatcgcatttttgcacattctaagagtccgttagttgcttttggctttgccattttttggtcaacaaagattgaacatttatgaaaagtttggactcaaaattctgttgatatcacgtcgttatagaatattgaaacagagttaattttattagtgatcaaatttaaatatgtcttaattattttttacggatcgaaaataaatttatatatttatgaattgaaaattctaatgcgtaaatatgtaaatttaaaaaataaataaaattatttcaaaaaaacatattgatgaagaaatagcaaaaatgttgaaatcacaggaaggaaatgaacataaataaggaatatacaaatcaatggaaaaatggttggcattggcatcatttccgggcaaaaaattttggaaaaacatttccaatttcaatgaaaataaacgatttttggaggaatataaaagccaaaagaaagccatgagaaaatcataattattttttaatttttattaattattgccttttccaaatcctttaaaatgcgcgccattctcttcctggccatggtttgcttggtgatggctgttattcttgagacaggtggccaaaattaattaaaaaattaaaaatattttattattttagccaactcaaaggcagtgaaaaataagaaaggtataaataaattgataataaatattaattggaatatgcttttaaaggagcagttgcaacgccagcaaaaggaaaagcggcgccgaaaggagcagcgaaaggaggtaaagcagaaaagagagagggactaattaatacaaattaattgattaatcaattaattaattaaggaattaaaaaagacgcaaaatcaaagggaaaaggaaaaaaggacgccaaaggcaaaaagggtaaggattttaatataaagcgaaatttaaaaagttaatttttgaattttagacaaaaaaactaagccagccaaagggaaaggagtgcctaaaaatggtaaataatattattataattaaaattgaataaatttagacaaaaatccccagcggcaaaagccaatgacaaaaagagcccaagtaaataattaattatatttaatattgtgccaaattgccaatttgaagtcaacccaatggcagcagtgaaagccgtgccaaaggcggcggagaatgctcagaagggaccgtcgagtgcggaagtggtggcggaggaaaacaacttggacactgaggcggtcgacgacttgggggcggaagagtcggactttgaccaattggcagaggacgaactgctcgaggacgacgccatggacggcgaggcggacgaatgggaaggcatgggggaggagacggagatggacagccaaatggcactctgatggccaactaattggacaaatggcaaacggaacaaaacgggacaaatgacacaaaacaatttttcataaaatttatagagaagataaaattctattaaatcattcatttctgtgcttcaaacttcgagaaatcattttaaatttttataaaaaataactcaccattaaattatcagacaaaaattattcacactgaactaattggaaaatatgcactgttaataggaccgtatttcaaaattattaatctaaattgagaggaaagttagttcctaaaaaatctgttttaatttgctttatttaaggaaaattttaacaaagaaaatttaagaatgtatctttttgataccatggtttagatcattttactaaaaactccgctaaacacacttaaattacctatttattagcaaatgtgaacaatgggaatcattgcaatggcaaagttcggcatttatttaatcatgttaatgtaaatgataaaagtattgggttaactcttaacattcacatttattcaaaaaacattaatccaatttcattaatattcattctcaattattttccattcgttcttttcgcggaatgattcatttcgatggaaaagcaaattttactttacagactgatgaattaatggaaagaaaacatattcatttattcgtttgcactgtccatttagcatttattactttattttggtttagttttggtggataggactaatttttaaaattatttttttagaataataaagacaatgctttttctcatttcgtttgtcctttgttcgcccttttttgcttccgtaaatttggccaattttcaaccgtaaatttccataatcattcataaaatagcaaatgttatcattgtgttggctttcaggctttacctgattaactcagcctctcatgaagcgcatttcgagactgaatatgtcgcgttggatcagtgcacgcgttggggcacagaacaaacgcggcacgactcattcgcactcaaatttcagatcaccggaaaatgcgagaatgngtgggaattaaaaatttanaactattttgaaagcatttttcagctttctgattttgtatcccggcgctttggacccaagtgcaaattcggcatttggtatg

SEQ ID NO: 3782 - DNA, 3582 bp, Heterodera glycines
cattaatattcattctcaattattttccattcgttcttttcgcggaatgattcatttcgatggaaaagcaaattttactttacagactgatgaattaatggaaagaaaacatattcatttattcgtttgcactgtccatttagcatttattactttattttggtttagttttggtggataggactaatttttaaaattatttttttaattagttttttagaataataaagacaatgctttttctcgtttcgtttgtcctttgttcgcccttttttgcttccgtaaatttggccaattttcaaccgtaaatttccataatcattcataaaatagcaaatgttatcattgtgttggctttcaggctttacctgattaactcagcctctcatgaagcgcatttcgagactgatatgtcgcgttggatcagtgcacgcgttggggcacagaacaaacgcggcacgactcattcgcactcaaatttcagatcaccggaaaatgcgagaatgggtgggaattaaaaattttaaactattttgaaagcatttttcagctttctgatttgttatcccggcgctttggacccaagtgcaaattcggcatttggtatgagaccggaagtgcaattccaagtgccaaatcacccgaaagtgagcaattaaggattctcattaaattaaaaagacgcttaaaataacatgtccatggtgggccaaaaattaatcataaaaaaatttctcttaactccaaagtaaaaattgcttataaatttagagcaaattgggggcccaatgcttggcgcatcagaaaaagtgcaacaattcagacccagggaataattgcgatcgtagaaaagtttggcatggcatcagtttgaaaacgtcgaatgggagaattatgcttgaaatgtcaatcgcggcgaaaacgtaaaaaaatattgaaaaataaaaaacaattttaaattatatatatatttaagctacaatcttggcagctacaacaaagcagagatttttagcattcaattgggaaatccgaataatttaatgactaccgcaatacacccaaagggtaaaagtggcccaatttcatttattatgaattcttatttaatataaaaaaataaaacaaatttttcatttttgataattatttaaaattaaataaattaatcaatattttaaataaaaataaaagagtaaaaatgccaaatttaagtgggccaaatagtttttgcggtcgatgactctgtccgtgatgcttattttgctcgaaaaatcaaaaaggacgtcatgctgatcaattatgctggcctttggatgctcggcctggactttttgccgatgaacaaccgcgacactttgcaaatgcacgtctaccgcgactgcggctgcgaaatgcacgcatgggtggggaaaaaaggaatttaaaataggaaattgatattgtttaaagattgaaatcgctaatttgttataaaataaataattaactaaccttatttattaattatgccaattaacaaatttttgaaaacccgacagttttaattgcccaagaaagccgtttcgaatattaattttcaattttgtctaacggctggagctatcataaacatttttgataaaaaatgtgttaattttcatttaaaattatttttatttattcgttacgcctttcaaagtttgcccatccgtccgatgattcgccgctcaaacgcagtaggcaccccgacgtcagcgcggattgtcccgcaaaaattgtcgattcgttagccgaacattttgcattggaaaagccattgcaaatggacagatccatccgacttcgacaacgactgaacaaaaacccgaaaaagatgctgttttggtttggcaatcagcacaaaaagcatttactcgaaatgaccgtggaggagccgccgaacggattaatcgatatcaaatcaatgcaggcaaagacacgctaattaataattaattaatactaatgggggtggaaaaggacaaaatggcacagacactcacgaagaagggctgttggagtgccattgcaaaaacagtgccaataaaaaccttttaaattgttgccagaatttttgacatttaaaatatgaagccgaaaattatgcaaaattttaaacattcccaaaataattttctccattcgtataaattacggaagagattatttgccaataaaatttctaaattgctcttttaagctgtttaaatttcactttttaaatgaatttaatgcgaaattaaggacaataagaccaatgaagaatttgtggacaatgagatgagaaagttggccagagaaagaaaattcaaagcgatggatgacgaggatgaagaagaaaaaggaggaggagaagaaggagaagaaggaagcgggaagggaggaaaaggcaccaacaaagataaatacatcgaagtgcaattggtggcacgcaaatatttttacgaagtgaaagtgggcgaccgcaaagtgttcaattacttcccgaagagcgacgaatggtggaaaacgtggcaaatggaggacataacgcaagtggaggcaagtggccaagcggaagggcaaatttaggagggcaatgggcaatttgtgggggacaaatgcttttaaattcggcaggactttttttaaatgccaataaattaattgtacacctgttcaggtcgctggcgatgtttacccggacagtgtgggtgtgccgaaagtggatgaaaaggtaaaaatgaaatggcacacctatcgttccaaattaataattaagcaacctaaaaatgagaagcccatttccaattcgtacgttgtacgccttgagagaacgctcaaagaaggtgacacggttgtgctcaaaggccaaatcgatcagcctcaacatcccgagaaaggcttgaccttgtttttcggccttttgcacaattcgccgggtttcaatgaattaggtgaacaaattttggcacagtttgtgtttttcgtacctatgaaaggttccggtaaaaatttatatttttaatacgatgaaataacagtttgtttccctggccgatttttgaagattttcgaaaacattgtatagataataccccaaatattcgaaatttcttaaaattaacaatgaaataaatatttttctcccatttttaacacataatgaatgctctttatttattattttcgtttcgacccctttcctataagtgccgcattttccaatgtatcatttacaataaatccaatacaaattccttgtgcagtgtcagtgatgccatggtttttgagtcaagcggacggaagaaatatagcaatgggaaaatatgacccggaggtacaaataatttaaaaattattattaaatgatattatatatttttttatttaaaagggaggttatgattcgaatctcaccgacttgaaactgttcgaagcgggcgaaccttttgaactgcaaattaaattgttgaaaaggccttcggaggacaacctgcccatgagtatttatatatacaattagccatttattattttaaaaaatggaaaatgataatgtattctaacatcattacatca

SEQ ID NO: 3783 - DNA, 1401 bp, Heterodera glycines
  unsure (1)..(1401): unsure at all n locations
aaatgcaaaaaaaagtggcataaatataaaaaaacatttttaatgaaataaaaaattggcgtgaaaaaattnaaactgatattatatatccgtttttaaatttaaactnttactttcagcagaaattctttcttcaatttctttgagtctgacaatgacagtgattgtgagcacgccgaaaggaaccagcaaaaccaactacacattggacagtgaaagctaccgagacatgaattacataacagtgccaaccaatgattaattaattaattataaattattcattaaataatagtgttattataaaattagccaattataatttatttatttaattaaaggttcgtggtgacttggaactgttcgcggaaccttcattgctgaacgatataacagtctgattttggttttaaaactaaaaaattaaaataaatattatggtacttatttgttagctagtttaatgggttaaatgccaataaatgtacaaatataattaattttttaatgtgtcaacacacaaatacttaactcatgaataaataatatttggttttttttataaatttattataatttttaaattgtataatatgtatttgtacattttataggcatttcaaaatgtaagatgtgaatctgcttcttaaattaggtaaatgacagaaaatcatacgatctaaaagaatatttttttaattttcacaaattcataattttttgcttagcatcccattcttcccgtgcttattttgcatcggtatcacctttactggtaccggtagttcattttttcgctaccgtaaccctaaaaaccgtaacctttaccgtccccgcgccgtgaaaccctttcaaatttagaatgacgagaacacggaaagaaaaatggcttttgaagtgttccctttgctcagtgttggcgattccattctgatcgagggaaaactgaaagacaacgcaaccattttcaaaatcaatttgttccacgatgtgaacgagaaaaacccatacggtaagaccatactgtaaattacggcaaatatttatccaataattaaaattgggcaatgaaaaattcttcgttgttttttgcttttctttcccattttgcaataggtcatttgttaattaatatccgcttctcttcttctcagccagtgatttggttctgcaaattttgttcaacttcaccggggatggcacaattcaattgagctcattgattcaccaggtaaataaatagctcatttatgtcggaaaaagcaaagcaaaagcgagtcaatgactcgattttttaaaaacttcaagataaaatttgaaaatttttgaaaatttctttctaaattaaaatttaattcatacgcgaaataaaatttattttttataaatttttaatgagca

SEQ ID NO: 3784 - DNA, 1459 bp, Heterodera glycines
tgcaaaatttgcagtgtacatgaatggcgaagagtgggttatattggtgcgatttatttgcgaaaaattgccgacggttttccgaacatgatggtcagcgtacttaaaaaaaatcagctaaaaaattagtaaaaaaaattttttaaaggtttttctcggctagaaaatccatttaaaatttttttatctaaattctaaattttagttgaaaattctagaaattttttttgtacgaattgccttggtacgagttgcctattcgcgttctctttcctcgcctccactctctcccccgctctcttcctctcgctcacgtttctttcattttctcttttttgttatccgctctctctcatttttacgcctcctaatttaaaattctatttttcgatggggtcgttatcatgagcgccaagcggaacaaaggggcgttgcgattaatatgcctctgaacaatgttagggcgttgtataatgtgatgccggatcagcgtgcgtaccattaaattcacttcaaaagttttcattgggcgagggacttttacacgaaaggtatttatttcggtttacctcagttcggcaccggcatgtttgggcgccggcatctttttagactataacttttttatttgttattcaaatccaacaatcttgttatcattcgagagctcttcagatgcgctaatagcctgcaaaattccaaaaaattttgtcaattttgaacaaacttatggccaaaaaatttgtaaattttggttttttaattcttcaggccataaattttcttaaccttaacgaaatttttcaaaattttgaaggctaatagaggacaacagtattggatttggttgacaaagaaaaaagttatagccagaaaagtgctggcgcccaaacgtgccggcgcccaactgagcgagtccgatttatttgggtggaggggggggggtcattttagtgccgcgcatttgatgcttcttaacttttcttagaaacgaaccaaataagactaaatacaaatattggaatatataagtttttgaattcctttggcagtattcaaaagtcaaagggagcggcagtgagtgggcaaactggtagcgcgacatgttcgagcgtgagagggagggcggtgcgcaatcgccatttaatttctcagagaatttttaaatttatcttatatccaagaaaaatgactatctcttattttgagaaattttatacgttacaaaagcgctcgagcgtgagagggagggcggtgcgcaatcgccatttaatttctcagagaatttttaaatttatcttatatccaagaaaaatgactatctcttattttgagaaattttatacgttacaaatgctctcgagcatgataggaggggcggtgcgcaatcgctatttaatttctcagagaattttttaattttatcttatatccaagaaaatgactatctcttattttg

SEQ ID NO: 3785 - DNA, 3261 bp, Heterodera glycines
tttcctaggcctcccatttaatggcaatgcctcttcgtcgaataactaattactgccggttcatttttgcggcaattagctaaaaaccggtttgaccggtgtttgagaggcgcggcccggaaaccggtcattttgaaaataccaaaccggtccggaaaccggcattttttgaccggcttttaccggtttatgatatagtcaaaaattcttcatttttgttcattttcctttgaaaaaatccatctggcataatgttattaatttttttttgaatttttcggttgaatttttttatttcacacaaccataaaatttttttgaaactttagtgcaccataactttttcttgaggcatccaaattaaactcccggtgttgctatctgataggcaccacttcatttatctcctctgtcatttacctcgaaattttttttttaatttcaaacagaaattttaaaaaatcataaaaaaatttccaaagatataagaaaattttttaacgatttttcaatttgtgatgaattatcgcaaaaaattttcaaaaaatttaattctttaaaaaattcaaatttttttttgaaaatctttaaaatttataattgaagaggcattttgacgcctgaagttaaaaagagtcgaaattaacacttggcacgatttttgttgattttggggttgaaatacatgtgagaatttaaattttaccaaaccggaaaccggttccgggcccggcaatttgaaaatccggtttgaccggtttttgagaggccgggcctggaaaccggttgtttctgaaaatatcagaccggtccggtccggcacttttggaaatctcggtctctactaaaaatatttgttaatttaaaaaatatttacaacaggaaatttggaagaaactgtaaaaatgaaattaaaggaatttgtgagaaaaagcacaaataatcacgaaaagcaattttgacctttcaaagtataaggcgtcgtcactttctcattttacaccttttaaatatacaatcgcccttctcacggaatccatttgcatattgcccccttcccctcccatttggcactttttactaaactaaataccccagcgaactttcgcttgtccaagttttgactcatagtcatgacaatgagccatcatggcaagttagtggtgattggtgatgacgaaacggtgccaatgccattgttctccgtctcatgaagcatccattcctcgggcagcccgctgttggacatgggccaagcgctgccagacgccccgacaatttgcccgtactgcaacaaaaatcccaaaggttggcatcgctcacaaaaaaggcaaaataattcacaagaattagttaactatttgcccactgcgtaggtatagtaatttaaaatggtttataatgccgcggtcgcgttcatcttcgcctttgtcatctccaggcgacttaatgccaaacaccgacatcacttcagagttcaatccgaccatgccgtgccagtgtaactcatcgaaattgcgtgctgttcacgtccgagtatggcaacaccggatgtacgaaagtggacctctgcaattcattacgcatgacgctgttttgatcacttggcattgccgggcgtgcaatggccgtttctttcagacgtttgagttctccacgtccggcaaatcagatcggtgagttttgatttatttttagaaaaaataaacaagccaaatatttttttagttggggccgttatcgcctttaccaatcaaaggaaagacgcttcgacatcaacgtgacttaccaggacatacgccaggtgtacgatcagatgccgggcgcgggaatgtaccacgtcatatacagaaactgcaaacattgggcggacaaatttgttccccttagtgagttcattcaaatataattaaattattaattaatataaataaatcatttgtgaattaattcagttaggtccaaatctcggatcgatgatgttacttgtgcgtgtgacaactggcacttcagagcaactaagattgaaggtaagcattaatttacaaataaggaaaattgggtttttttaaaaagttaaaattttatgcaaaatttgcagtgtacatgaatggcgaagagtgggttatattggtgcgatttatttgcgaaaattgccgacggtttccgaacatgatgttcagcgtactttttggagaatttggaaaagtcatgaggtaggtgttttccgaatttaggtaccaaaccccctccttacccctccttgttgtcatggcaactcgtacaagactcgtacccagggcaactcgtacaaaaaaaaaattctaagaattttcaaataaaacatagaaatttcattaaaaaaaatctacatgattttctagaaactttaaaacacttaaattttcaaaaaatttaagaaaattaaaaaaatcagctaaaaattagtaaaaaaattttttaaaggtttttctcggctagaaaatccatttaaaatttttttatctaaattctaaattttagttgaaaattctagaaattttttttgtacgaattgccttggtacgagttgcctattcgtgttctcttttctcgcctccactctctcccccgctctcttcctctcgctctgtcgtttctttcattttctcttttttgttctccgctctctctcatttttacgcctcctaatttaaaattctatttttcgatggggtcgttatcatgagcgccaagcggaacaaaggggcgttgcgattaatatgcctctgaacaatgttagggcgttgtataatgtgatgccggaccagcgtgcgtaccattatattcacttcaaaagttttcattgggcgagggacttttacacgaaaggtatttatttcggtttacctcagttcggcaccggcatgtttgggcgccggcatctttttagactataaattttttatttgttatccaaatccaacaatcttgttatcattcgagagctcttcagatgcgctaatagcctgcaaaattccaaaaaattttgtcaattttgaacaaacttatggccaaaaaatttgtaaattttggtttttttattcttcaggccataaattttcttaaccttaacgaaatttttcaaaatttttgaggctaatagaggacaacagaattggatttggttgacaaagaaaaaagtatagccaaaaaagggttggggcccaacgtgccggcgcccaattgagcaagtccgatttatttgggggggaggggggg

SEQ ID NO: 3786 - DNA, 2672 bp, Heterodera glycines
ttttgggcatttggccaagaattttggtgccaaaaagacatttttgtctaaaaaaacccaaattttttcaaaaaatcgctaaaatatgtgaaaaaactgccgaaaccccaaaatatgtttttattcccaaaaagtccaaaatatgtttttattcccaaaaagtccaaaatatgtttttatatgtgctaaaaactcgctctaattgaaaggaaaacaggtaaaaatgctatttttgagcttttcatgcgatagcatatgcgcaaaaaaaaacatgtaaaaacatataaatccgttccctgctgataacagcatcgattttctcgttggtacattatctctaaattatgaaaggcgtctgtaataatttttcaatgtatcgtttttttgttggaaatacattgataaatattagagaccgagccggaccgggcccggaaaccggtccggcgattttagggaaaattccggcttgaccggttttccggtttgaccggtttttcagaggccgggcccggaaactggtcattttgaaaatgccaagccggtccggaaaccggcattttggaccggtttatgataaagccaaaaattcttcattttggttcattttcctttgaaaaatccctctggcataatgttatcaatttttttttttgaatttttcagttgaattttttatttcacacaaccataaaatttttttgaaactttagtgcaccataactttttcttgaggcatccaaattaaactcccggtgttgctatctgataggcaccacttcatttatctcctctgtcatttacctcgaaattttttttttaatttcaaacagaaattttaaaaaatcataaaaaaatttccaaagatataagaaaattttttaacgatttttcaatttgtgatgaattatcgcaaaaaattttcaaaaaatttaattctttaaaaaattcaaattttttttttgaaaatctttaaaatttataattgaagaggcattttgacgcctgaagttaaaaagagtcgaaattaacacttggcgcgatttttgttgattttggcgttgaaatacatgtgagaatttaaatttttaccaaaccggaaaccggttccgggcccggcaatttgaaaatccggtttgaccggtttttgagaggccgggcctggaaaccggttgtttctgaaaatatcagaccggtccggtccggcacttttggaaatctcggtctctactaaaaatatttgttaatttaaaaaatatttacaacaggaaatttggaagaaactgtaaaaatgaaattaaaggaatttgggagaaaaagcacaaataatcacgaaaagcaattttgacctttcaaagtataaggcgtcgtcactttctcattttacaccttttaaatatacaatcgcccttctcacggaatccatttgcatattgcccccttcccctcccatttggcactttttactaaactaaataccccagcgaactttcgcttgtccaagttttgactcatagtcatgacaatgagccatcatggcaagttagtggtgattggtgatgacgaaacggtgtcaatgccattgttctccgtctcatgaagcatccattcctcgggcagcccgctgttggacatgggccaagcgatgccagacgccccgacaatttgcccgtactgcaacaaaaatcccaaaggttggcatcgctcacaaaaaaggtaaaataattcacaagaattagttaacaatttgcccactgcgtaggtataagtaatttaaaatggtttaatttgaatttttggaagtcaaattccaatttttcaatgtgcgaagaatgtgtgattgcacagctcatttgtcagcggtgaattgaaatgccaacaaacaaaagcgacagatggcacacattttgccaaactaatgtgaattcccaaatttgtaattagcattactaggcttacaattagcagtgccaacactccagaaatgcgtacgtccatcaaaacatatttattcttgatgcgtacgttgtctacatgactatggtagattaatgttatacggtagatgtgcgtacacatccacatactcacgatatgcaatgctccagaaatgcgtacgtccatcaacacatatttattcttgatgcctacgttgtctacatgactatggtagattaatgttatacggtagatgcgtgcctacacactactccaggaatgcgatacttacggtagatgcatcttacgcagaaccctatgaacaactacggtatgcgtacgatgcctacggcagatgcatcgtacgcagaatcccattacggtatcatacatgcgtacgatgcctacggcagatgcatcgtacgcagaatcccattacggtagcatacatacgtacaaagcctacggccgatgcatcgtacgcagaatcccattacggtatcatacatgcgtacgatgcctacggcagatgaatcttacgcaaaatccagatattcaacgctccagaaatgcgtacgtccatcaacacatacgtattcttgatgcctacgttgtctacatgactatggtagattaatgttatacggtagatgtgtgcgtacgcatccacatactcacgatatgcaatgctccagaaatgcgtacgtccatcaacacatacgtattcttgatgc

SEQ ID NO: 3787 - DNA, 1168 bp, Heterodera glycines
accgagcagcctattctcgaccatcaccgggaccaagcagcccataggcacgggccctgctggcgagagaagttagacggtgactctctcgtcgctgtagaggttagagagtgcactctctcgccccaaaagaagccaacaggtgtggggtggaaatcaatcgataattgaagtggtctgttattgtagtagcgaatcggaggcacaaaagtgatgggcccagcattcgacggaatattcacagtcggtttggccatctgaaaaggcaaaattagtaaatttgaatctgtaatgcgaaagaagggaattcggggtcaaactcaaaaatttgattacggttcttctgcccacgtttggcttttgagtttgcaccgagccagtctcggttaaatgtgatttttttcctattagccttttgattaatttgttctccggccgaaatcccatcggacaattgtcagaaagtgactgatcattgtgtgcagagaagtttctcaaaagtgaacacattttagtcgtttaataaattatcaatgttcattatttaatgtaatactgtagttacagtttcccgatgattaaggtcattgtgcatcatttttggtccgacagatggagagatagacctaggggttggacaatcacaagcccaaccactttctcatcactgagagaaatcaaaacacccaacatttgggaaatgggaggggggatgaatgggacggggggggtgaaaaagattcgaaagagatggaagggtaagtccatttctgtgttaaattgtccccaaaaaattattccccccccccctctcagatattcgtgctttcttctctcctccccggtccacttttcatcatccctttgatgagaataataaacaattggggatggtaggaaacaaaatgcccaaacatctgggagatgggaggggggataaatgggacggcgtgacgggggtattcgtaatgaactttggcgaaatatggcgtaagtgtgtggataaaatggagaaggaattaacaaatgaaaaaatccgtaaatgagcagaggaaaatcaaaagctaaagaggatgaaaaaggaaagcaaaacgcaacaatttgcataattcggcaaagagaaagaaaaagccgaaaagaaaaggggatttgggggaggtggcgggaa

SEQ ID NO: 3788 - DNA, 1120 bp, Heterodera glycines
tttgccagaaaaactggatgaagtgaaatcctcttttttgtcgggccacacattgacttttgatgaacggaaagagcatttgacacaaaaatttgacgcccaacttggcacaatgtatcaaatgagaagcaaatggcaaagcaaatggcgatgtgccaaactgaagagtataatactcaaaaagagtagcggggaggagaagccggatttgccagaatgtcaaaaaatcagtaaatatttggatgttttgcatgaacattttgttagaatatataccgaaggttcgtaccgagttttgagtgtacccgaaggtttgagtcccattgtttctgtgtcaataaaaatggagggtcagttgaatcccaaccgtcaaaagctgggaattttgacagaaatttcggcaagtgccagattaatcaaaaaaattcctaaaatagatttaaaaagtatagaattttccaaattattataaaaattgatgaaattccggtaaaaaactatgttcttattagttatcctttctgccggcaaccaaaaattttaattaaaaaaagcatagagcacaaaccttttgcgccttaagcgcaggccgttggaccgaatactgggcctccgttttatgtgaggtcgaaaaagcaccaattcggaaaaattttggccaacagagccacacaaattttttaatccttttcacctgttgtattatataaagaaaaattcttcataaaccgtttggaatagtgccaaggcatgttccttgggcctgaatttggcggctcggtctgtgttgtgttgcagtttccggcccaactcagtgcggtaggtcttgcggccacggccatgtggacgactctcgaccggactcggcacggatttggcctattgggcttacggacggacgggctcgtagtgcctatgttgtcctgccctgaaaattccttagaatttttgacaaaatcttacttaaccttaaaaatttgtttttattagagttgtacgggaccgggacctggacacggacaactgagtacaactgagtacctaggtcccggttttgaccagttttgaccgggaccgggaaattcccggttttcccagccaaaaggtcccggtttttcaa

SEQ ID NO: 3789 - DNA, 1350 bp, Heterodera glycines
tatggtcataaaatttcaataagacttgagtcaaattgtttgacaaggactttcttaattgatatatttgatattctatatttatttttaaaatttcaaaaaatttattgtttcaaaaaattcttgaaaaaatctaactcattacttattgaaattttattactgaaattttatgaccaaacctttttataattttgtataatttataaaaaaaaatattttttaaatattctgataaagaacacctagagctttggaatgaaaatgaaatattaatttggtagaaattgagctaagttatgaatttatatttttacattttttcctactacttggcggttttgagtagggtaggtcgggtccaagacctggacacggacaactgagtacaactgagtaccaaggtcccggttttgaccgggaccggcaaattcccggttttttccaggttttcccagccaaaaattcccgggttttcaacccaaaaagtcccggttgtgcccaaaattcccggtcccgacctaccctagttttgagtaacgccttcttattaccgcatgctagaattactgtagataaattcattccaaaatattattattattttattttttgctaaaatgtccttcactgaagaaaaatctaatttatcaggcgataacaacgcccaaaaaatcaccagcagaagcggaaggaaaaaatgaccgtaatccggcttattggaaagggtaccgtaagcattttgacaaaatgttgaaacagatgtggaaaagcgcaaaagccaaagcaatgagcgaacgcaaacagttttttaaaaatcaacaaagaagaagcattgagcaaaaggaccgtaatcagacagagcaaagtgaaatggccaaaaaatgtgccgaactcaacgacaaatttggcattatttacaaagcaccaattatttgcttttgatgggagggagtgacaaatttgcgaatcgaccaatttaagacacaaaaattttttcttgatcaatccaaccggtttattgtaatactggcgatggttgccaccttttttggaaaaaaatattttttccttttaaacatcatgtaaacatttttcaaaagactttctgggtcgctgatcacgaatctggcgtccatttcgaccaattccgaaccccggacaagattttagattttcgagttccgattttttggtcgaaaatgtttaaaaatttttttattaagcattggtgacttttagtttgtttccttttcatggtctttgaaaggaaaaattttttttttccaaaaaagggggcaaccatcgccagaattacaataaataggttgtattgctattgaataactt

SEQ ID NO: 3790 - DNA, 3354 bp, Heterodera glycines
cctgaattcaagaaacacaaatcatagactaatattttgactcccaaaaagattaattttgaaaggaaacaacccaattaggcgcggctcgctttttttagcgtgagttttttaagagaagccggttcggaccccgttttaaaaagattttttcgtagaagtagttgtaattttcaattacacctgttttaatgaaatttatttaaatattatattaacaaggtaccaaaataaaattttcagaatttttgagaaaaaaaccgggttaggtgcattgtgtcagtttatcctgacaaggacagggtctccaagatggagcaggacggggcaaacaggactaaagtccttgcttaacaagactattggtggtcccgggaccaacaaaccctaggaaagaaaatcaaataaaattctttcaattcaaagataaaatacccgcggaagtgccacaatttcaaattaacaacgaagaggcgacgatttttgccgctgtgaaaacggtgaacaaaatttcagcgtcctattttggtgtaaaaatggacaaaaactatttcccgctgcacaatctgatttcgaaacttggcaccccaacgctattagacgagaaaaaatggttgaacaaagccggacaggtcagtctcggacaaaacattggcgcccagaaaaaagcaagtgtaacaccaagcagctcacaatcagcagaagcactttcaaacaaaaaggtactggagatcagaaaaatctttgtgtatttataataatagagtagagcgttgtcggttcctttaccgatcggtaattaccactaattaccgttttttattggtaccggcactgatttttcagaatcaaaattactggtaccagttttttgtagtaccggcggtactggtactaacctacaaaaataaaaatggataacccgagctgaaattattcatgaaaatttgggaaaagaagttttcataaatatggaacttttggccaatttttaaacaattctttttttcattttgctattaattagagagcggaccggaccggcccggtactggtttttaccgggcccggcaaaccggtccggcgatttttggaaaaatccggttttccggtttgaccggttttccggtttgaccggttttccggtttgaccggttattgagaggcccggcccggaaaccggtcgttttgaaaatgccaaaccggtccggaaaccggcatttctgaccggtttttaccggtttatgatatagccaaaaattcttcatttttgtacatttccctttgaaaatatccctttgacatgtttttaatttttttttgaattttcggttgaatttttaatttaaataatcttattttgcaaattggcctatttaaaaaacgtacaagaaagactcatacagaaattctgtattttagacaaaaaattgaggggggggggggcatcaacttgcgaagctgacctttttttttgctttttgaccccaatttacaattttttcgggaaattcaattgaaaatgtgtcccaagaatccacacaattcttgcaaaaatttaatctaaaaatcaaaaagcatttatttttttgcaaaatctgttatgaaattcacttaaacaaatatttttcgcggtggtgcctatcgtgtatgcactcactttatttatcgcctccctcatttaccccgaatttttttttaatttccaaacagaaatttcaaaaaaaaacaaaaaattttccataagaatatcttaagaaaaaatgtttacgtgatttttcaattttatgatgaattacttactgttttttttagaaaatcgcaaaaattttagaaaatttaatttttttgaaaatttttgaaatttaaaattgaagaggtcatttttgacgcctgaagtgaaatagagctgaaattttacacttgacacgatttttgtcgattttggggttgaaatacatgtgaaaatttaaatttttaccaaaccggttccgaaaatccggtttcaccagtttttgagaggccggcccgaaaccgattgcttctgaaaatatcaacccagtccgggcatttctgagaatttcggtctctactattaattttgataaaaatttttagaattgtgaagacaaaattgttttttttttgatgaaaatttcaatttctttcttcgacctccttcaagagctttctcacccaaatttcccaaaaacttcgtaaaaattgaagaatttttaaaatcctttaaatgtttgttttgacaaatgaaaaaaatactcaaaatcgcttttttgactttaacgcgattttattatttatttttcatttacatttcaccccacgaaatgtgctactctcgtcatttctttttttacgaaaaaaggctaactaaatagtttctaaaatactaaaaattccaatatagttgtcaaatattagaataatactgctcaataaatgcaaaaatctcctaaagataccacctcattctttatccatttcgctagcataactgcaaatcaaaatcctttcaaatcagcacgaccggatcccaacgatcttttttttgagacccaaaaatggcaaaacaattaggattttggcgaaaatggctataaatttctgtttttctccccgaactaaatttttaaaataacaccaggggttcgatcgatttttttcaaaattatgacatcgctggtcaacaataaaaaatttttaggaattaaaaatattaacatttgcatgcattagtttcgcattttggttagaaacagtggcctaggacttaaggtataatgtaaaaaaatttgacggattcatttttttttctaagaattcaaattgcttaatttttgtttagaaaaaaatgagcaaacccgtagtgtacccatggcaaaatgccaatttgttgtccaaaatacaaatactcatcacaaaagaataatcaaaaatttaagtcggttgattttcattcacaaattgtttttttccagccgaagtcaaagtcacaagcaaaaggagtaaccaaaaaagactttaatgaattattaaaacaaatgtgggaaagtgcagaaaaagaagcgatggaaaagcaaaaactttttaatgtagaaaattctaatttggcttcatcaaacaaattgaaggatattttagagcgtgaaaagctgaaaataaaacgtgccgaactcgacgacaaatttggcatcttttacatagatgagaaatcgcctttagctaaggtgatttagtgtggatacgatagaggatgcaaaacgattgtcttgggttcgcaaaacgagaaatctatgttttttttgttcggcttactctcggtctaaactttttttt

SEQ ID NO: 3791 - DNA, 1211 bp, Heterodera glycines
cctaattccaggattttaagcatatataaatccagtccctctcttgacgtaaaaatcatttatttgaatgagcggtgaaagcgctgaaaaataccgtcgtgaaaaaaatattggatgtgattagatattgtggattttagagacaggagttttggaaaactcggaactctggatttcgagatggacccgggatatgttaaaaaagaataattccgaggatggcaaaagtaggaggtagggaatggaccaaaaatatctgagatttaacacgcatcccttgcatgaaaaatgccattcaaatttttttcattaatgtttggttttctgtaagctttgtcgtagttaaagacggtctttataaaaaatcaacaaaaataattttgtttctttgttataacggtaaaaaattgacaaaataaatttaagaaagcggttaatctatgtcttggcgaaatgtaatcataaagcattggaaatgggctggcaaaaaagtgacaaaaataattttacgtcattgtaataaagattttgtgcatattaacattaaatagatttttacagcctaaatccatccattccatcattcttccattcattcattcattttcattaaaaatgaaaatgcattgctttttcactcatccaatttttgattttattttttattattttatttttacaatttcaaaagaagccttggcggcaacggtgggttttccttaatgaatagggccggcaattatagtcactataaaacaaaaaaaaattgacaataaactcataaaaatggtcgaaaagtgacgaaaaatttaagcaagtcatgaaaaagtgcaataaatttttttttatttctttcaattatgtcaagaaaaataatatttaaaatttagaaaaataattaatgaaaaaattttcattattagtgtagtacttttcgagtttcaaagttgattcttaggtttgattattttttttttgttttttttttgtaaaattttgtgctaacattttcaaaaacggtaaattaggataattttcacaatacattttgggaggggaggatatggaatttcgatatttgttatactttattctttaattacccatatagactgatgatgattcggatgcatttctcacatttgtgaacggaaagaatggaacgaaccgtgcatttaaattccacgtattttgtcaggatctttacaaaa

SEQ ID NO: 3792 - DNA, 4268 bp, Heterodera glycines
aattttgagaattgtgaagacaaaattgtttttttatgaaaatttaaatttctttcttcgaccttcttcaagagctttctcacccaaatttcccaaaaacttcgtaaaaattgaagaatttttaaaatcctttaaatgtttgttttgacaaatgaaaaaaatactcaaaatcgcttttttgacttgaacgcgattttattatttatttttcatttacatttcaccctacgaaatgtgctactctcgtcatttctttttttacgaaaaaaggctaactaaatagtttctaaaatactaaaaattccaatatagttgtcaaaaattggaataacactgctcaataaatgcaaaaatttcccaatatataccacctcattctttatccatttcgctagcataactgtaaatcaaaatcctttcaaatcagcacgaccggatcccaacgatctttttttttgagacccaaaaatggcaaaacaattaggattttggcgaaaatggctataaatttctgtttttctccccgaactaaatttttaaaataacaccaggggttcgatcgatttttttcaaaattaggcatcgctggtcaacaataaaaaatttttaggaattgaaaatattaacatttgcaaatttgcatcagttttcgcattttggttagaaacgtggcctaggacttaaggtataatgtaaaaaaatttgacggattcattttttttctaagaattcaaattgcttaatttttgtttagaaaaaaatgagcaaacccgtagtgtacccatggcaaaatgccaatttgttgtccaaaatacaaatactcatcacaaaagaataatcaaaaatttaagtcggttgattttcattcacaaattgttttttttccagccgaagtcaaagtcacaagcaaaaggagtaaccaaaaaagactttaatgaattattaaaaaacaaatgtgggaaagtgcagaaaaagaagcgatggaaaagcaaaaactttttaatgtagaaaatgctaatttggcttcatcaaacaaattgaaggatattttagagcgtgaaaagctgaaaataaaacgtgccgaactcgacgacaaatttggcatcttttacatagatgataaatcgcctttagctaatgtgattttagtgtggatacgatagaggatgcaaaacgattgtcttgggttcgcaaaacgagaaatctatgtttttttttgttcggcttactctcggtctaaacttttttttatcgataatgctttttgtctttaaggcctgaaatttcgacagaccaaacaaaaactcgttagtttttgcgcggtttttgagtcaatttaaaggaataaagggaattttggagctcgggcggtgccgataggtgacgctgggaaaaatttgaagatttgagtgcactttgttaacagatttagttttgaatgagagattgttgtgaaaatttaaaaaattttatccctccatcactgtgaatttttggtgaaattataaaaaagcctaaaagaattagttgccggtaaaattttgaaaatttgttttttccactattttggtttacctttttaggcaagaaaactgccactaagtaagtagattcgaaaaaacctcaaattaggaactagatatgggataataatcggtaataatctataaaaagtttaaagtttaagggtaaactgacatttgcaatcagacagaatacgcatattctatgaaaaataataaaaaaacttaattttcaataatatattatattttaaaacgcaattaatatttttaagtatttaattaaatttccaatacgatttgaaaattttgcgtgtacagtaaagccatgccattggacggatggctttggcactgttccattctgatgttgtcaaagcgtgaacgccaatggaatccaccatgagaaaaaaaaattaaatttttattgacataatgccataatttaatcaaaatattgatgaaaaacaaagatttccaaaatttctttgaatttcttttaaaaacttttccaaatgctcatttccaaggacgtccttggaatccaaactttaaaataagggcaagtcaataatccagggtagccagatctgaggctttagcctcattttgtggttttttgataggttaatgaggctaaattttcaaaatgaggctttgaggctttttgtggctttttgagaaattttgaagatttttgatgtttttggggaaaattctcagatttttttaatttaaatttatttttgataagttggcataatgtttttggccattttggacaaatctggtaataaattgcttaataattacaaaaatattaaatatttatttagtgtttcgattattaacaatttttttttgaaattttgtctattttattttaaaaataaaataatttagtgccagctggtctcttttttttaaagattttcttatccaaaaagacacttttatgggtttttaatggtcttattcttcaaaattctcaaaaaacaaaccaatattacgggtaaatgaaaaaaatgactctatttggcaacacgctagaattaatagcatttagcactaattaaccatttaactaattttttccattaaattttcttatttacttaacttttttgaacataaatttgcgaattattttctttatgaatttctctgaagttgagaaaccaaaacctttaagatcctcatcatccattacgcattgcataaaaaaataaaacaaatttataaatgccgcgagatgcgtccctcttcttttctgctcttcggtggctccatttgccagcgcaatgtacgcgttgtactcatctctggcacgctctggtagggtcatctttggaagcccaccgcgaacgagaatccagttcatcacaaggcgccccaagcgtccatttccgtcaacataaggatggataaatacctttgttgtttgttttttttattttaaattaaaataaaacttttaagtaaataatttataaatctattactatttttgataaaaaaaaaacttaaaagcaagcattagaatattcataatctgcttgcataaaatcattgctctatgctgtaagaaagaaaaatttttttatttaaactacatgctataaaatcctctatttataaatttgtttgttgtacagtcaatatgagtttttagtagagaccggacaagagggtcggtcgaacggtttcggataaaaaccgaaaaactcaaaacattctcggccgaacggtttcggttaaaaacccgaaaaaacagaagaaaaattttcggtttatttcgatttttcggttttttgaatttgtttattttttccaaaaaagtaataaactatttctattaaaaaccgaaaactcaaaaataattttatgtaaataggggcgatgaatttttgtggaaattttccattttagcgttggtttttaaaaattttggtcatctcttaaatatatatttcgtttttctttattggatccgatttttaaaaattttgagaacaaattttaaaatttaataattcctttataaattacttaagtaatgtttttaatttttggcaatttaaaaaaattaaaaaacttgcgaaaaatgcttttttatttaaatttattatatatattatatgccaaacggtgccgctcagttcggccctcacggttcggcccagcatgtttttccaatatagcttttttatttgttatccaaatacatcaatcttggtatcagaaagctcttaacatgttctattagaaccttaccaaaaagcgaaaaggtttttaagcctggaaaaaacatttgagaagaaatttataaaatttcgacttttttgcaattttcatgtataacttttttgataattgtctaatcgcgaagcaatagcttagaaaaagattctaaacagattacgctttcgaatgatacaaacaatgttgggtttggctgacaaagaaaaaactttatagaaagttatattgaaaaaacatgctggggccgaaccgtgattttaatataacgactcatcaccatagtaaaaaaaccaaatttggtgggacaagatttaaattccatgtcgaaatgaattttttggcgttttatcactagggtgaggatggaatggtggtttgccatctattgtaaagaactatttggtttttttatattcatttaccgcaatctcggaaagtccttataccgtctggacccaaaaaaatacgttcaaataatttttt

SEQ ID NO: 3793 - DNA, 349 bp, Heterodera glycines
cattttcggtctttgatcactaaaaatttcaatgtaatggatgttgttagtcgtcaaattcacgaaaaattgcgatgcattatatttgaaacggagaatatatatttatcatcagaaatatatatagaaaaaaatttccacttaaaaaactgtcagaaaaataatgtaaaaaatcaaaaaagaaaatccgtgttcttataaaaatctgttgtttatttaaaaaatttaagcttcaattatttttgccaaaacgcatcaactttatttttttaatgggtaataaaaaacttattttacttttttcaagattaggacccaccccattcatacaaattaatcatttgcctta

SEQ ID NO: 3794 - DNA, 3488 bp, Heterodera glycines
ccgccgagaccattgacattccttttatgctccgcctccgcttttggcatggctgctgcccctggcgggggttccttccgtctccaccctcgcacatcgccgcccccgaggggagagaaagtccaaaaaaaaggcataaattgaaggagggaaaaccattagcatgagcattagcatttgtgaaattcttttttttactattgtcgagattcttttgccgactgagtcccgtgctcattgagtcccagtcgtaatttgaaacaaattttatcgtatattttatgaaaatataattttttggtactgtaatcccgaacaggtttcagacagtttccgacaaaaatatgcaaattaccaaaaattaattagcagataattgatattttggtacacaattttataagaactcagtggaaatagtttttgcacctgtactaattaggagcaacttaattaatttacaataagtaaccgtttaatccaaaaggatctatgaaatttgtaaacgaagattctttaaaattaaagttttacatttaaattttattagacttatttgtacgtggactcgaaaattactgctcaccttataaaacatccgaaaaaaatcattagtcattagtagagaccgacttttgaggcatatgcttttttttctgcgcactagtttcgatatattaagcataaataagacactttccacttggtttgaggcttctacgttgacttttattatgcctttttttgcctttttcgggattttcgtgccttaaatgccttttttggcattttgccgttttggtgccttttttggcgtttttttccgaaaaattccataaaaaatgcaataaaatcgggaaaatacaccccttgaaaatgactaaaaaaatttcagaaaatacacacctaataattgaaaaattttgtcaaaaattgatcgccaaaatttcatttttttctttacaaaaaactttaggtttaaaaattttccttattcgaaaaacattataaaatatttaataaatatttaatgaccaaaattaagttaattggttaagttttacgtgttttgcgccctaaaaacccttaataaaaaaagttttaagtgccttttttcatgccttttttgggattttcgtgcctttttatgccttttttccgatttttttgtgccttttacagtgcctttttcgcgatttttggtgctttttagtcggtctctagtcatttgcggtacgagttaatggggcaccgaggagtgggagagcaattaatttatggggggcggggcgttatgttggccctgctatttgggactcatttgtccgtgagactcaagcgtctgaaagccttccataaaaggcactaaaaaagggaatggccccgaagaaatcattagcagcagtacgagtaaatgaggcaccccggaggggtggtgtgtgggggaggggaacacttgggcgacggagagaagccattgaatatttttgggggttttggcatggcccttggccccggcaaatcgaaggcacttgcctggggggtgctaatttgggggaaatgccaacggaacgccaaactaagcgaaaattgggtggctttgaattggagaaggacacgttttagtgggagcggctgctgttgccctccgagaagggctaaacttaatggaattttggtgccagaaatggccaatttgtagggcaaaatgaaatgaaataaagtaacatttttaaatgtaaaaaaaatgtaaaaagattttattaaaaaatggcaaaaaaacttttaagggcaaagatagaaaaaatttttaaatttatattaaaaattatattaagttttttaattcagaaattgaatcttattgcttataaataatattttatatttttgaaaaaatggaataaattaaaaggggaaattattttttcgaaaaaattcattataatacttttttctcaatttaaaaaactttataaaaaaaaatcgggtcaaaactttttcgttatttaatattttattatttaataaaaattcaaaaccataaatttaaagaactaaaaaaatgaaaaatgtgaaaaataataatattcaaaatgaaaatttgtatttcctattctttttttgtggactggttttgacaaggaaataagaaattttttgtcagtgaatgtggaaacacaattctcggatagaagcagccttttaatttgttcggccatgccgaaaatttggccgtctcagcgccgggcacagcgcaaaaacgttgggactaacaaatccgggctgatatggccgcgcccacgcaaaaatggccaaattgggacgaaccaacacagtcccaaccggtggaaaactttatatttttctcactttttatgcaaacaaaaaccaataaattttaataattttaaaattttagtaaaattcaaaaatagaccagtaaaaattcatttaaatccattttttttaaaaaatttaaaatttaagagattcaggcaagaaattaattttttgaattctgtaaaaaatgaaattcttatttaaaattttaaaaaattatgcgaagggtttcgttaaaacacataaattcaaaggattcctttttatttaaatggaaaaagatatttgaagtgattatcataaagccaaaggtgtgtgctttttgagcaaatgcgccaaaaatggcaacattatgccaacggatgttaattaagcaggtgtcacatgcaaattgaatattatgtacaatgctaatggatgacgaattatcaaagagtatactaaaattactgtattttttagttaaaaactaaaattcacagccctagtaataacagtgagaagtgattatttacccaaaaatctaaggcacaaataaatgggcacaattggcatcatccccatcaattttgtgtgccattctaaacataagttagttagagaacaaatgtgccataaaagagcacgttttggccccttccttgaggtactatcggtgaggtaaagcggcggcaaaaaatctaatcctctaataatggggatgaatgaatgcccctcggggtggggaattgagcgctaaacgacaaattaataaatttttttaaatgcccttgagcgagcaatgacaacaaattatgcgatggttttgtggttttggtgttgtgccattgacaggtggcgcccgattgacgaccaccgacagcgaccggctggcagaaacagaaaatgccatgccattggggtgcgggggggggggggggggcggctgtcaaaaaggggttacggatgatcgcacattttgtggccataataatttgttacttctgctgctgtttctggcccgagggaggagcctaaaacgggcactgccccccgttgactgtgttcggctttttgtttttgtgtccacagagtgtggcacaattcgaggggatgcatatggggcaaggtgacgtgatgtgtaaaatggatggccaaggggaaaa

SEQ ID NO: 3795 - DNA, 3256 bp, Heterodera glycines
atttaataaattataattttttatagattcttagcatttctagttactttataattcaattaattgaccatctcgagaaattatcatttttcttttaaaaatgattatctcaaattttttaaaataacacaaattattaattcagaatttttagcgagttatattaattttcacatgattttaaataaatctgggtgttttaaaaataattatggattagctactctgacggattgtccactgatggattgtccactgacagattgtccgggagcctgatattagactttttcaagacatggaaccgggactcggacggacccgacttttaagaatcaaaacctgaaagcgaatcgccagggtttagcctcgtccccgccctccccggccgcccctccgaccatcgggggatagaaatactggagatcagggatattccttttagcacgattttacgatttgaagagaatcagacaaaaaatttacaatgaaaaagtcacccaaaaattcccaacaaaaatatagcaaaatcagttcaactcagtctataaaattcggaagatttttgatagagttgtacggaaccgggaattttgagaaaaaccgggacagggacttttcgggttgaaaaaccgggactttttggctgggaaaaccgggaaaaaaccgggacttttcccggtcccggtcaaaatggtcaaaaccgggactttggtactcagttgtacgttttttcagtaccagatcccggtcccgtacaactctaatttttgacaaaaaattattcataattttgctcaatgcaattaatttttaataaatgttctctttaaggccttcaaatttttaaaaaaatcatttgtttctgaaaaatcatggctaggagaacttaaaaaccctggtgttttcgaacatttttggccatatcatttttaaaactaaagaaattttttaaattttccagaccagtataaaacacttaaggctaacgaaagaaattaagaattaagacttggttacatttgcgcaaagttataagcaaaatttttaattttgctgggttttgagtaacttcataacatctcaagactatcatcataaacaaaaattttttaaatcggttgctaggctttttcataacaaaaaaaaaaacccaaaaaaagaaggccaggccaaggccgcagcataacaaatacagaaaattcctaaatcgttggctaggcctgcactatgctttaggaatcgctgaaagtaaaattttttttagttgggccaccatgactttgtcccgacaaaaacacgcatttttgagggcacaaatttgtcgccgtgccacggcattttacgcctaaaattgacgtttatggaccgcggtacaatgcattttccatgcctttgggggggggtgggggtgtccacattttgtgccaattcaattcgtttcgcccgggagggcgccgatgtgttcgttaaacacattttctgctgttgttggtgcgccgtgccaacaaaattttttttccccaaaaatatattacatttttaggcgtctgttttggaaagaaaagaaaataatggcctaaaaatttttggaaatcgaattttcaattttttattaatttttttttttcaaaaaatcgaattagatgcattaaaaataaaaactcaaaaattacttaaacgaaaatggtagagtccaaattttgtaggaattttgaaaaattttaagaaaatttattgaaaattgttaattaactttaatttttattttgaactatcaattaaatagctatttaaaatcattaaactaaaaagttttaaaattataaatctagcaaaaaaatttgtcaacttttcgtaaaatttgaaaatataaaaaatttgtacaatatgcactgtttaaaagaaaatattgaggatttatgttaaacaagttaaaaaataaacatttaaatgtttaattttataaattattattcgttttggcgccacaatttcccgcatttccaacgggcaaaatgtgccaacaaattcatttcctcattcatcttcatcattatcatacataaaattcttcatgggaatgttcgttatgcttccactctgattaaatatgtacataaaaatgctaaaagagtggagcaatttgaatcgtctaattaattaagcctatttgtctgagtaaaaatgggaaaacaattctaattgaaaattattaaaataagaattttgtttaaaaatttaatttatatttttcttacttttaatgatctaatttatatcaaaatatacaaataatgaaaataaaaaagcatttaaaaaatatataacaaaccaaataaaaaaggaaataaaaagtccgttttaaaaacttatataacccgtcgcatttttaaacaaaaaaaataaaataataagaaatttcgaaagttttaaattaataaaataaaaataaatcgatttttcatatttaaaccggttaatttactcctaagcatagtcggacctgaattaattctgtcaataaaaatcactggaaaatttattaaattttaacggatggtattcggttgttcagtggtacggctttgatggagacgaaagttcgattcccattcgatgcactacctttttttgcccttttaaaatatcttaaattttgcctatttcatttcctaaactttgtaaatggaaggaacagccaaaatggggaggaagccttccactatttgttggaaatgggagaagcattgagttaggggccgggacgaaaattgtgccgtcgatgacgataatgccgaagggcaaaaagtcaaggggggaaggagcgacaaaaacgttttgccaagaggcaacaaagaaaaaaaaaactaagtggaaaagcaaacattttgctatggcgggggaggggagtagcaaaattcaaactgaggacggggagggatgaagccgccgatggcggaaggaaacggcggaaacattaagcggacgggacagcaagcaaggaacggcacggcacaaaacagcaacaaaaaaaaaattgggggctggagaagcatgtgccgaagaatagtattaactgggaagacaattggtgccagaacagctaaacttggtacggttcagtaccagaacaaaacaaaaactggcaagaatttcgggtttaattgggaagtacaatttggtagacggacctttcagtaccactaaatagtgacatgacactaatgactggactgttgtgtggttgactcta

SEQ ID NO: 3796 - DNA, 3746 bp, Heterodera glycines
tgaacggagtgtgtgtgcatgagaaaatctgttcaactttttaggccgatgaattaaagggcgaaaccctccccattttcgagaataatttatggcacgcaaaattgtggtggggcggcatggaaaagacaaaaagaaagccccgctgggaaaaggaagatgaaaatgggaagaattttttttattatttaaaatcaattaaaaaaggaaaatcataacaaaaaaaaactggtgtaataaaaaagggaaattgaaaaacatttaaaatgcatttctaaattattttaattgctaattttgtttatttatttatttctttatttttattctgtaaataaaagtttgtcatcagtagaacggcaaaaaccatttacatattctgacaacaaaagagctgctttaacagagggggccgttttaatagaaaaatttttgaaaaaaaaatgctaaaatatgcacatagattgcgttatatataaaaattttgcgcattttcaagacggtaattatgtgttaattgagataattaattggctttgcggtaaacactcgcgaatcaggcaagcgtgcgtaattatcgagaacgcaaattaattgccaaaaatgtgatcaatgcgcgcgcgcataagacaaaaacaaaccttcgtcatcaaattcatgcgttgagtcatcctccaagaagtagtagtttgatctgaaatgcccgatcagatttgattgatcaaagaactcgaaaggtattgaaaagtaaataattaagggtttctgattctgaaaatgccattcctactaattaccaaaaaaaaacacaagaaaaatttgtaaaaaattcaatttttttaaattaagttttaggaaaaaacttttaaaaaaatgaaagttttaaaaacatttttaaatagaaattttttttatgaaaatgttttattttttcttgaaatttttgcttgaaaaatattaaaaacaatcaaaggtcttgttttaaatttaaattttttcactaatttataaagtagttagaacaagttttcctatggcgaagtgttcggtgcaaacggttatttcaaattgtaattaaaaaacgatgcaattaaattacttaaaattaaattatttcaatttttctttaaaacaaattcactttattatacaacatggcacttgtgaagttgtattaaaatatttgtgatattaaaaatgaaaatttattatattttattgccactaattatttgtatcaaatatttggattaaaaatgaattattatattttattggcactttgtagtttgtataaaatattaaaaataattatttttttttattgtatattattgaatatgtataataaattttttattttaaacaaatatttgatacaaactacaaaatgcagataaattataataaattttcatttttaatatccaaatatttgatactatacaaattatatattttaatgcgaactatattattagcgccaataaaacaccaaaaattgtcggatatattattattctctcataaattttttaatatttatgaaaaataagagaatgttcaacccagtttctgctatattctttataattattttcctccatttttcattttcaatttcaaatgaaaatccatcggtgaattttgacttttttttaaataattttttttaatccattttaattaggctgatgacaaaatgctaattgattttgtgaaaggtcagcaagaaattcaaattagtgaatattcgaagcagaaatacgaagctcatcttggcattgtgtattttatgaaaaagaattggcaatgttcaaaaatttcggagaaatttgaagaatatgaacggacagaatgccaaaaatatcgcaaatatttggacattttgtacgaatatttgttcagagagtacgtcggaattccaactgtgaagccaaaatttatatttaaagataaagaggaacaatttgaaattaatgggccaataatttatgtggtgaattgtttggtcaaaatttcgcgattttattttaattcaaaatggaataaaatttataaatataaattaaacaaattattcaaatcggtttataattttgaaccaaaattgttaaatgagaacagattgaattatggaataaaattggaaaatgtacaaaaattgccaattaatgaaatgattttggaattggcaattgacacagcgaatgaatggcaaacaaatgaaagtttaaacggaataattcgacaaaaattcgaagaaaatttgcaggaaatgttccaaaaagcggaagaaaatgcaaaaaaagactattcaaggagagtcaatattataaatgatgacaaacataaaataattatcttttcaaaattcgatgatcaatggacatgggtgagacttaacatttaatgaaaattaaataaattcaaaatttagacaaaagatgctttataattaattttatatcaatttatgcttatttagattaatgacgcattgttttctgagttcgtgaaaggacaagcggcgacaaattttaagcaattttctaagaaattcatcgaaaaatattcgaaaaaatgtttagaaaactatgaggcccatctttgtgttgtttattttatcagagagaattggcaacaatgtgaagccaattgtaaagataatgcaaagtgtcaaatgtaccgtaaccattttaacattttgtacgaatatttgttccgactttatgccgaaggtatatgctattatataatagtttaaaaatatttaaaacattaaattaattaagctaaaaacccgagtgagtcgaaacaattagcaccggtaattaggccaatattttttggtccaaatggcatagctctaagcttaattgaggttgttagcagttttaatcatgtttcgaaatattcttgcaacgaaatgtttgggcagatttccaaactgtatccaatgaaattggtaaatgaggtggaattcaattatgatgagaataataaagatgctttaaatgaatcgacggatttaaatgaatcgacggtcactgatgaaataattagaaaggaatttgagcaaaaaatgaaaaaaatatatgaaggataaaagtaaaagagctcgaaaaaccctttgtttattggataagatggaaaaaaattatgtcgaaaattaaaatttagatgaagaatttgatggaaaatttaaatttgtcgcatttaaaatttcaccattaaaaaccaattagctttactacaaatttataaaaaaaatacttttctttacgacattgatatatataattagaaacaaaccccaaagttttctttaaatttttaaaaataagccaaaattcaaaaatagaaaagaattattaattaattaattaatgtaagtcctcccatttttaataaaaacataagcacatttgaattttctgaaactcgtactctcaaaaaaacacaaaacatatagaaataagcacaacgcgggaaatacctgttttatccctattttgaggtttcgcccctatttttttagcccttatttcgcaatttttaaatttttcatataaaattcatttgaaactttttcgcccctatttcgcaaaatttttgcccctattttggactttttcgcccctaaaaatccattccctactgattattacaggaattcaatttttaaaataaaaaaaatttgcgatttgcgctcaagccgactccaaccgaatgcaaccgcccac

SEQ ID NO: 3797 - DNA, 2862 bp, Heterodera glycines
ttttaacgactgatttgacaataaaagagcaaacaattatatgtgtgtatgtttgtgctgataattgccgatcgggagatgaagacacacaaattattataaaacggaaaacaaacaaacaaaatgtggagcgggtacggtacaacatggaaggcctacggtagttcaggggaagggatgtttcaacgcctagcaaaacaggaaaaaaacatgaaatggactgttgttggtgctgctgctgttcatattggaatgacaaattttttcgtgccgaaaagcaacaaaaaaagtgccgggttttcggtgcctcccgccgacttaaatggttaaacccaggaatgaccaattcactgcacccccaagggagtaaaagttcttaaaaaacagataaaacgtcagaaaaattaatcggcatgagattttttctagcgggtacccccccccccccccccgcaaaaaaaaaactccgaaaacccaaattcctaggcccgtcactgattaaactttcccttcctggataagtccgtgtcgaccaacacacacatttttttttaattttttttttattcaacctaaatactcaatcaaataacaaacaacacaatagcagcagcaacaccatttccatttcattgtacacaaaatgtgtgtgcatatttgtggtggtgatcaaagcatccctcctcatccgtcgctgatcaaaatgaatggaccgatcagacgaccggcttctgcggcggctcgatcaccttcagctccggctcgtccttgggcggctttggcgccgacgactcgggcgtccacccgcggccgggcagtcgccggaagatcaccttctccgtcttcatcagtgcccacacattgcgcttggcgtacagtagcacaaacgtgagcagtggcaacagcgtgatcaactgagtgtgtgtgtatatgtgaaaatttttgaaaaaatgaaattttcccggctggtaaggcaccagcgaagccatcaaaaggatctggtgccgatgaaaaaaaattttttttttttttttggatttgtagggttataaatttgccgattttcgaggcaataaaaaagaaaaatgggggataacactttttgaaatctatcaatttattggcaattttgcaaaaaaaaaaatcctccggcagtgctaaccggcaccgttgaacgggtgcactcggtgtacccctgaaacggctccgctgaaatgtggcgggacaaaacttcgcgaaaaacatttttttttattgccaagcctaattcggaaagaaaatttcaaagaaataaaaaacaagtttgttccatgaatttttgttttcaaaaaatttcaaaacaaatttttgagtgccggcgacgctacggcggcaacgttttgttcagtttgaaacgtttctcgagtctcgggaatttaggtggatgtagagcagtccaataaacagagcatcccatctttgccctccccccggggtacgaattccggacttgttgttcccccggaattgcagattccgtttttttttttatttggggggcctagaggtctacgaaactataactctggggtaagtgccaaccaccgcaaatgacaacggcaaattggctgaccttccatgcccagcgtttgcgcgtgtcgtgccattgttcgccggcccagcgcaagaaggtgcaaatgtccttggcctgttgcgacattgttgccggtgtgccatcctcatagtcaatgccttcgtcaaacagttgttgcggcatggccaacacacagccgttggggaagtacgggttgaacgccttgccctcctccacgtcaatgcccgccggtgcatcaaagccatagctgaaccaaacaaaatgcaacaatgggaaattttggggaattgaaaaaacgaggaattaaatttttattggaaatcaaagtccaacttccccatttcgtccgtatccgacaaacaccgcaaatgctatttaaatgcgagaattttacaggattttgaaaagaaacaattcaacaaatgaggggggggggggggtagattctctctgacaatgaaatcatcaagagtctgatcacaatctgagtattgtaagcatcttgatttcttgattcactgacaggtgtacaaaaaacaaaaatttaaaaaaatggtcgaatttttggaaaatttacctattcaataaacagtaattcttcataaaactaaaaaattcgtttgaaattttttcaaaaatctcgcgtatttttcactagagtaggtcgggaccgggaattttgggcaaaaccgggaccgggacttttcgggttgaaaacccgggaatttttggctgggaaaaccgggaaaaaaccgggactagtcccggtcccggtcaaaaccgggacttcggtactcagttgtccgtgttttggtcccggtcccgctctactctatttttcaccgtacgactaactttttcgctgctcttccagtcctgggttggaaatttttttttaatttttttgatttttggtgggtctaaagaatcttgggacctccgtcactgtacactacgcttttttaaaaatgctgacaacaacaaacaaacccggtcaacagatggaacacgtagtcctcggccccttcccgggcccacataatcagtgacaaatcgggtggcaatgcgccactgttcgccgccgcggcagctttgttgtttttgtaggggcttggcaacgtgtcgttgagcagcccgggacgaagaatttccacaccattatcgtccaagtccgggatcagtgcctgaagggaatgagtttttttttttgaaattttcgccatttttaggggttaaaggccccgacccagtgcggggggttcgaattg

SEQ ID NO: 3798 - DNA, 1659 bp, Heterodera glycines
agatttttttccacaattgacgccttctcatcgatgagttgacgatcatcaggtgtcaacacgtccatcccgaccaacaatttgttcttgatggcctcattttcttccctcaatgcatccaatccttgggcaacagttcgtgtatttcgaaaaatttcttcttgtgaaagcatttttctaaattttatcttttattggatgtgtatggtgtttatccagcaatttccgacaaattttgtcgggaaatattcctccccgatacccgacttttcatatcaagcagagtgtcaaggcttaactctacattgaacatgatttatccaaaacttttggctccgtgttatcatttagtatttgataattcagggagattttgttgtatttagcttgttaaatttttgaaaactaaaaatcgttaccaaaaaggttgaaaaccctgattttttaaaattaaataaacccataaagaaccattgagacattaaacattttatggttcgtgcaacatgttaaaattaaaaaaaaagactcaaaaataatgctcaaattttgcaaattttacggcaaaaaaaaacctcggcagcctccgtcttcgcctcatcccgtgtcatgaaattgtcgacaaaatggttgtaacggatgaatttcaaggaatggcatgcggcacacacttgcttgtacacttggtaaccgcgacgaaccctgaaaaaataaaataattcataaaaaacatggaggggttccaattttgggtattatttgagggaccaaaaaactcatccataatggttttgcttgcatatatccaccaaactaaatagaaaagtgccctttttattgcgaggtaaatagaaaggattgatttcaacggtttcttggacgacgagttttttttaatttcaggcgttgattaaaaaaaaaaaaattttttttttttaaatcgggccaaatccaaattttgtttaggcaattggagacattacggttgaaaacttggcacattaaaataaagatgttaaatgtggaacaagaaaaaaaacggacgatcgcatgtcaattgcgtccatcagtccgccgtgggaccatggcaaatggctcgggtgcacaacaaagtcgtaggcacgcgcaccgctattctccaacgagtacagcaacacactgccaccggtggccaatgcgccgaacaacacaaatttggatgctttacgctgaaatttggcgaaaatcaggcggagaaattcaaaaaaaaatttttgtttgtttggcttaccaagttaagccctaatgccgctgctgaccgaaatgacataatttagaaagaaaatattggggtattttgttcggtctaaacatggaaaaagaggtaataatggcattaataaaatttttggcgctatatggaaagtgaccagttttgaaaattttttcaaaaggggggacccttttgttttgcaaaatttttttaagatagtcataaaaatgtattctctggggtttttggggtccccgatcacgaatctttcaattattttgatcaattccgatttcctaatctaaatttgaacaaaacatcataatttgaaaaattaaaaatttcgatttttattcgagtgagggttagtgattactacttagtcaaaagacatgtaagattcgtga

SEQ ID NO: 3799 - DNA, 5624 bp, Heterodera glycines
tcagaagagtgtctcatttatcaaatacaggaaaaaaggggtaaaaaaaaatagaaaataaatggtctaaaatttaacaaaaatatgggaaaatttctaaacaaataaaaaaactacctaagcagtgacacgtttttcagcaatcttggccattttgttcgcatctttggccaattcgagcgaaatgaaacagcgcaagtccctttccccaatgcatactttgctcagaatggccaccaaatccttcagcaaacccttgggaacgtctttggcccgaagagaacggaatgctgcgatgacatcgatgcactcgacgagagcatctctgagcaaccgtttctccactttgaacttgtcgaagatcaccgggacaacaaacgaatggtgaggagtaaatttggcgccaaatcctttggcgaaaagcatcacacatttggtggcacttgcggcgacaaagatatttgcgtcatttgccataatctaaattacaaaatgttaattttataaatttttcattccaattttttcatttcacttttttttataatttataacctttgttaagcgttgctactttaataatttaattaaaatgatgacctcccggtaatttggcgtatcagtaacggtcggcgattgcagcgatttacattaaaaaacgagttcaaaatataggctgctcaaaattttgaaaatttaagcaaaattaattaattatcatcagtcagctcaatgacccaaagataattcaaatcccatttaaaaaaataataaaattgaaaattctgaatgtatgttgtttaaagtcattcgtagcaatttaaaaataatttttcttgataatttttttgctcccttcacctcttccccataaattgtttttttctgttattcatcattatttttagattttggatttagggaagttaaaaataattatgcgacaggtgaaatgtcctgtggtaagtggtgaagaggtgaaaaaacaatatgcgacaggtgaatgtcctgtggtaagtggtgaaaagaggtgaaaaacatttggaaataggtgaaaacaggtgaaaaaccaatatgcgacatgtgaatgtcctgtggtaagtggtgaaaagaggtgaaaaaacaatatgctgaaatgtcctgtggtaggtggggaaaagaagtgaaaaccaatattcgacaggtgaaaatgtcctgtgttaagtggtgaaaagaggtgaaaaacaattggcaacaggtgattttcagttataagtggtgaaaagatgtgaaaagtctaagaacattgatgaaattctagagaagtgatgaaaagaggtgaaactaaaaatggaaaagtcaaatatttcaagaacagaaaatacaacgaacgacgctgattttcgtgttaagtgatgaaaggcaaaacagaacagtagttgagatagaagctattttaaagtggtaaaaaggcaaagaaatgttcgaatatgtaaaaatataataaaagaatttaagagatttacatttataaatggcaaaattaatcgctgttaactctgcaaaaggacagttttgtgacgggtattgttatcacaaacacaaaatgacaaaaaataaaacttggtggaagtgtgaactttaccaacaaggatgcaaaggttggggttttgagagtaatggtgagtttttcggaactcgaatgcataatcatcctccagaccaaattctacttcaaatcgagagagaacagtagatttgaagatgtcaaacatagaaatcagatttcaccttggaatttcaaaatatcacacgaactttatttttcctctcagctgcgtgattttgggtaacccaaaacttggaaaaaaggttaggtttcggttggcacacacccctcctataggctagggattgttggagtgagcaaggtttaatgaggaaaacgagatactcaagccttttaatccatgaaaatgtataatcttattaggtgtaatctaataaaatcattacattaaaatgaatttttggacaaaatttgcgattttaagctttttgtttttactaaaatattaattggggtttttacatgagtaatcaatatcttaatatcgtcccgatctttttcaatgccttaagcttggagattttaaaaggtctaagttgggaagtgttttcaattatctagacatattcaaaagctgtataccatcttatgtcacaaaaaaagcattttcaagggaagaaaaataatattataatttaaacattcaaaaatgtagaacggttaaaatatatacggccatggagaagtggcagacgcagaccaattgagcgaacctgaacaggaggaggaacatcaacaacaacaacaaagtatgggcaagtgaaaggaattcttggcctttctattcataaaagtgccaacaaatgaggaagggtcctggggatttgcataaaaaaaattcaaaaaaaaaatcgaaccatgattaactattaaaggaaattcacgggaaatttttgatcagaaacagagggcgagcgtcgcctggtaagattttatgacgtaaatggacaactcttgtataaaaaaaataataataatacctttacaatatatatatatttttgttttttacatggcttgccaattcctcaattaaggcctgaccgacaggttttctcatgccccatttgaatcacatttgttttagaattttaattcgccacttttcagatgatcaggttcaacagcagcgcgttcacttggacgacgagggacaaaatggcacattggaattggacgccgaccaatttgcgcattcttcgtcgaccaacactgacacggacagtgatgaaattgtcaatgtggcacgcaaaaagccgacagtgttcgaatacttttgtatggaagtgtcaaggtacgtgtgccattcaggtctgtaaccagaaaaatcggatttcatggcgggtcagaccccacgaatttttttgctgattttttttttttttgcctatttgtcaaccgattttggatcaaattaaacatcttggggaaattatattttgaaatcttggagccgaattttaagaaactcgctggtatcgttcaaagtttgccagtttttctcttaaaaactttttcaaattcgggcgctggaacatccacccaaatttttctaactaaaaaaaaaaatttcatttcggttacgggcctggtcccattctcatttttttgtaataaattccaatctttggcttatccccccatttttaaggcgctactcacttcagaatgagaaggaacaatatgcggagaagcggcgcaaagtctatgcatttcttcgaattccagtggaactggaaaagttcatttattacgggttccgtcagtgtttggacgccttttgccacacatttaccattctgccaatacgcgtattggtgagttattgggtcagggccaatttttcaaacactggaacattatccctgaaaccaggtaggtacctaaccgaaaaaaaagcatttcgtcgagaaatcccgaaaattttgtgctttcggcacctaaaattttttccatggttaattttttaaattatagggctctattaacgaaaaatagcgtttgtataagaaataactaattgtgcattttttgtcaaattttgaaattttcaagtgcatttattggccggcagtgccaatgggtaccgccttgattttttttttttttttttgcaacttttactcaatttgttgagaaatcttaaacaaatattcaaaaaaatttctgacctttatttaacttttttatgcggtgttctcatattagaatcaaaattccgttggatagatttctccccgaatttttaaatttcttggcaggcaacctgcctccgaagccttcagcagaatgggtactttttcaatacaaaatttctgattttttaaatattttttttggatgaatccctctgcagaatatatagctaatgtgttaattaattgccactgttttttcagttcaatttgtttgcttgctcagttcgattgaagcggtggtcggccgccgacacctgtgacattctcaaactaatcatcattttttgcgcttcttggttcatgcaatttgttgacacttccgtggtctatcacattgtccgtggtcagggcatcatcaaattgtacattttttacaacatggtgcgttaatgttttatcaaggaatggacggaaaaaattttattaaaaatccaaaaagagggggaaaaaaattttttttttgtcaaaagtcgtgacaatttgttcctggcttttttgagaccgctcgctgattatgagtttgaccattccttctggtaaattccgatacttaactcgaacaaaagatcgaaaaattcaaatttctcgaactatccgaattttgtttctcgaattcggttagacatttttcagaatttgttaaatgttaaatttgcgacccagaaaaactctggaggacgattttttaggactaaccaaaaaaaatttacaagccaaaagctccccccaatcctttcgaaaaatattacctttttcactatttaaatttagcttgaagttgccgacaaattgttcagcagttttggacaggtgcgtgcgtgttaaccgctgtttgcttataatataacgaaaatttttttcaaaatttaagagaaaaaaaattttgtgttttttaatttgtttaattctccgtaggatattttcgacgcgctcctttgaactgcctccgaacggggcacaaataaaaaaaagttcatttcaaccgttttccatctgaccgttgccatcatttacgtagtctgtcacacgctggtcattctgctttttgcttttttggcattgaatgtaattattgaaaatagttttttagaacctatgaccacgtgactgtgaagccgggaccgcacattaatgttgtaattggcccgaacggaacaggtcggaagaggaaaagcccccgacttttcctacattttcacttggatttagagacttaggaattttactgaatttagtataaattctccgcaattctttgcttcttcattgcccattcattcaggcaaaagttcaatcatttgcggcatttgtttggccgtcggcggctccccgaaattgttgggccgttcggatttgatcggcgattttgtaaagcacggcaaatgcgagggaagcgtcgacctttttctgtatgtgttaaattcattattacttttactatctgacagacggtcgaattagatttatttattttagctttttcttttgggaaattccatgtaatttggtttaaatttatctttatctgttgtttttcattctgtaattgtgtttagtgcatcttccgttggtttccaataagtgagcattttcagttgggacagtcgacgaagacgcgaacgctgtttcagcgtgcacataaaattgccaaactcggcctccttttttgtggacaatcagtcgatgaagctgacccaattgcgcgagctggtcaaggagtacaacatcccagtgacttcgttttttttgagtggtccaatttttagaatatcaaaacgacaaaaaaagtcgggcttgggtaaaagtgcgactaaaaa

SEQ ID NO: 3800 - DNA, 657 bp, Heterodera glycines
aaacagtaaaaactaccatttaaaataaatttttacatttttttactttttttgatgggggtgtgtttaccgaataataaaatggagacaaaattttcccatcccttataaaaatcttttattagttagtgaagcaggaagaaagagttaatgttcctcttccttgttccagggctgaacattcaaaagaacgagcagcacgagctgttggagaccaagctgaacaacgtcgttcgactgacgggaaatgcgggcattttgagcgcatggaattcgtattggaagaacaaggacaagttccaggggccggtgtacgtgccatacttgcacagtaagtaatacgtttttttggctttaaatatggctgatttttggtattatgtttttttattttaagtgcgtgttcccaagcagtccaacttggtgttcctgaacaatttgattggcacccgagacatgggcattttcgtgttctcctgcaaagaggacgagcaactgctgatgcaggggaacaacccccaccgaattcactcgacaatcattgaccaaaaatatgtgcgttggtactttttttctatttataaaaatttccatgttgggaatttttttttttaattttcgaggggaaacaatacggtgaaaacgaacagttccatc

SEQ ID NO: 3801 - DNA, 5107 bp, Heterodera glycines
tctagagtcaatggctcgaaattacagaataggctgtatttagcattgtcattttcaatgatgttactacaatgaaaagccaaagaaatgtatttattggattttctaattttgatttttaaggacactaattaattatcccaaaaagcctcaaattttgcatttgaacaaatttgacaaaagacaaaactttccgtgtgttcctgtgctgctaaagatcgggattcttagattgttcataaaaaccaaaccaattgaatgtgcgaattgcgaatttgccgacgaccagcagaaagtgccgttcatgccgtaaattaaatgattttagtcaattaaaaatagcgatttacttaattttgaattttcttttttgtttgatcaggacacacaaaaattatatttaacgaaaacaaaaataacaaataaatgcgagtgtttgtcgtctttgaattttaatggaatgttatgagtgtttatacttttcttttcatttcgattttatgtttttaactcatccgaacaattacacgaaattgtcaaattattcgttttaaatattttctaaataaatatatttttaatttttttttaatttcaattaaaattatacaacaaaagcataaaaattggaattactacaacacatgattataattcgagaacaaagaatgtcaattgataaagtcaacacggaaggagcggacggcggcggagagagcgaacgaatggcggggaaaatggaaaattaaatgggcaaattaacaattaattatgagggtaattagtaaaacaaatgaatgacattgaagcattttggccagagcaattcctgctgataaatggaacagataagaaaaagcataaggcaaatgatcagttctaaattctttgaaaattaaatgtaaatatttccaaaatattttttcaattaaaaaatgcgccaaattattaatttttatttatttgttctgttcttcgcacctaattttgctgaaaaacttcggtatgtacagattatttggcgccacggggacagagcgccgctggaaaagccttaccccggcgatttgaatggtcaacgaaaaataaattttaaaaataaataattaattaattaattttcagatgaaagcaaatgggccaaaggatggggccaactgacaattgttttgtttaaatttcgaaattcaaacagtgcaatcaaattcaggatggaatgcgacaaatggaggagcttggccaattcctccgggagcgttatgccgctgcaaatttttgccccaacattttgacagaaaagaggtaagaaagcattgattgattattgattgattggggatagcaatttgtaaatatttatctccgaaatcaaaaagtgcggtcaatttttaactggaatttaatcagaccgctatattagaaattgaattaaattgtaaggccaaattgggaggtgactgatcagttcgtcactgcttgttacgtcactgagaaatattttaaaaacattggtttaatatataaaaaaaaattgtttctgttttttaattgttttagttttcacgcaatttccagataagtcctcgattaatttttttttaaaaatgggctaattagctttgagacagagaaaaagaaacttccgcgagaggaagtaatggaccaattaaggagacaattgaacgccaaattgggaaggttgacaatagaagttgtttgaataaaatgtgctaattaccgaaaaatcaatttggggaaggacgaaccattatgagaataggtaattattttattcgtttctaagataatcattcgttccaccgacgtcgaccgggcgctggaaagtgcgcaatcgctgctaagcggaatgttcccgccacagtccgacggggaccgattcgacccggcgctgaactgggcgccaattgcgatacacgccactcgggaagcgaaccacgactcggtgagacagacagagttcgaaaatgagacggacatcaataaattaaaattcatttaaatattgtttaatcaaaaaaaaatgaaattttggcgatcaatttttgggaaaattttcaattcttcggggagtattttcttcctatgggtgtatttccccgattttattgcattgtaatggaatttttcggaaaaacgccaaaaaaggcaaaaaaaaggcttatcttttaaaagcttttgttttatatttttcagttgttaaatccgtccggttttccgtgcgcccgttataagcatcttcgccaaattgttgccgatgagattagtgcacatttgttggacaaatatcgcccgttggtggactttgttcgtccccacctgaacatctcgaaggaaaaaccaatcaaaatggtccaattaatggcactccgtcacataaagcccgaagtaaaagcgtaggaacttggcaaaatgctattccgtcacctgtgaaattaatggacagattattgaccgacaaaaacataaaataaaataaaaagccaattcatacaaaaaataatttaatataaatattttttttaacttataattagggaaatatttttaggtgctaaaactgccaaaatagttaggttttaagttctaaccccccccccccaaaaaaaatggtgctaaaaatgggaaaataggtgccaaaaagtttcaaatttaggggtgtaaactacaaaatgtattcaaaaaattttaaaattatgtatttttgaaaaattttgggtcaattgttaggggtgtttcgtttttattaccttttttgttaataaatttggacaaaaagctttcgtgcattttataccatagggagcacaggaaaaaaaataagtaaaaacctaaaaatattagccctacttataattctttaagataattcacaatttgcctcaacccaaatgggtacacaaaaaatgggaagaatttggcaacaaaacgaccatcgaattaattatggaaatacgacaaaaaagttggcttccctatttcaatggaaacgaagaaattacgcgtttaaatggcggtaaaataatacaaaaagcaaaaaaaaatgttaaataattattaattgaaaaataaaattaattaaaaagctaaaatatatttttattttattatttaaactttcaggagttttgttgaacgatttattgcgtcggtttaacattgtttcacagggaaacgcgaagaagcttgacgcgagcaaaatggtgctttattcttcggtaaatttttaaaatacaatttttcccatttttaataataattaaaataatattttactgttctttcccactttttaaataattaaaataatattttgctattttccccattttttaataataattaaaataatattttgctatttttttcaatttaagcacgactcgactctgctcggccttttgtccgtccttaacgtaaaagtgccgagcaatgcactcgatttgcctccgtattccgcttgtgccatgatcgaattgtacgagaaacgcaaaacccagaggcaacaaaaacttttttgtcaaagtaaaacgggaagaaaaataattttaattaatttatttttaatttagttattttatcgacgaaatcaaattttggagccaatggcaatcgccggatgtgaagcgaaatgcgatttgatcaattttcttcaaattcttgagcctcggtcaatccgagggggcgaagaggaattgaaaattgtaattaaattagcaccttaattaagttaattataatgtgtaaaattacagttatgcgatgaaaaagtgccgaattcggccgcccggcgcatgggaaacattcccggttttgcaaaaagtttaattattgccatatttataagcattgcagccataaatcacggaacacaaagcacagtaataaatgtacggtaaaaaagttttaaaaattctgcattttctatttgttaaaaaacttcaattgaaaaataataaattctgtgtgctatctatgtagtgaaaaaaagattttctggaggtgtttagcggcacattcaagccttgaagtaattaatttcttcaaattatttcaaaaatccaaaaattttcctttttataaaaaaaaacttgtatcaacggttttaaaaagcgactgtgtttttttttgcgccttctgtcggtaccgccggcccaaatccgttaaaaaaaaatttttttttttcaattttgtccaaaaaccaacctttctttatacaaatcagttaacaacagaattaaattttcaaaaattttcccgggcggtgcctaactgtaaagcgggccatcctccacaaaacaaatttgcaaatgacgaataaaaattgaaaaattgttatcagataagaccaaaatttagtgtttttagaattttaaatttaaagtaaactaatttcgtgctgagtcgatcctaaaaaagtatcaatgataatgaataattttggtgttatctaaagaatatgaaacttaagggatgttctttaataataaatatgcagtcatgcaacatatttcaacgaaaaaattactgtaaaattaattaaaaaataaaatatttatataaattttaaaatatttttattaacaattattaaatttaattattcattatcattgatacttttttaggatcgacctagcaccactaattttttcggtttacaataaaagtaattgtgaaagtgaattaattttgaagatttttgagcttaaaatttgagatgaacccttaaagaaatgaatatttttttagtaaaaaatgttcagtatttttgtgttttatttacattccgcaacagcccttgtacaaattttgtaaaatctttccgttaatgaaaatccggttcaattgttcaaaacccaacccggaccccaaatcgcgtcaaatgacgagtttccaaaaaatgcatattattaaatgaatatttacactcgttattgcacacataatacatacatattattatttacatagcatatagacatataatatagggctcggtggtctaattgtatttgctttgggttgtacaaatcatcttcgtcaagctcatctgcatacgatttcggtcggccatcttctgctgctg

SEQ ID NO: 3802 - DNA, 7119 bp, Heterodera glycines
  unsure (1)..(7119): unsure at all n locations
ggtaggcatgggcgggaatgccaatgccaacgagcactacaattcatcagtcttgattgactactacccaattaaaagtgctaaagtttcccgtaattgtctaactccaaaagattttagattttacagaaaaatccaagcaagtttaaaattttacagaattgtgaacgcaattccccccccccccgaaaatttaaagaattcttaaaatgtaaaaaaacaatttttcctatttcattttgatttttcaaaattaccaaaataaaatgggtggaattgtgtttcattcgtcctttttgaacttttccttataaccaaccaatcgtactttatatttgaacatcaaattgatggcactcaattatttttaggccaaaaacctgtaccaactttgtgcaaaatgggagcagctcgttccccccccccccccgccgtttcccccccgagaaattttcagcgattttttggaaaattttttaaaaaactttgtaattcaccataaaaatttctcaaaaaaatttttttcttagaattttcttaagaaaaaactttcctagattttgcttgaaaaatttctaagtcagtaaaaattcttttttaaattttcacggggggaaacgatgcgaggggaaacgaactgctcacgcaaaacaaaaactcacaattccagtgcggacgccctttttcggatgcggaaggcccatcggcgatggctgtggcttaaacagaggaaatgacaggcaaattggggaagaatgggcaaaaaatgattggttcactttgaatggttcaattttctgcggtttcgaaagcattgaaggaggcacaatcttaaacaattaagggaaaattgagaaaagaaaggaaaaaatgcaaaagccgaaaactcactttggtcacagtgtttttcttttccatggaggggaagcgagaaagaggagggacagcctaaacggaagagaaaaagaaagagacagcaaaagggggaagtgtctcactttgagtggctcctttttcgtgaacggtgacggaaaacgaggcgaaagagtcttaagaaatgaattcataaaacaagaaaaaatgatgatgaacgaacggtaaaaacccaactcgtactgtctttcgaccaaaaagtcgtcataactttttgttaagtcgacccaatttaacatagttggtatcattcaatagtccttaaactgctctatctatatgccaagcttcaaaaaatttgatcaatttagctaatgataccaagaatgtttaatttggtcgactttatggtcttaacaaacgaattcataaaataagaaaaaatgattatgacgatttttttgtcgaaaactaagagtttggtgtcttcctgaacgaactcactttggctttgatgaatggtttcttatccgaaggcggaggacgacgcggcggaataacgaccttttaaaaacgaattttgaatgggaaaaagaaatcccaggcaacaaaacaaataaataggcaattaggtaaactcactttgcctttatgtgttttcttggccggtggtggcggaggacgagagacagccttaaagaaaagttgtggattcgaaaaacaacaaaaacatcagtgaaactcgctttggtttttgcatccgtttttttgcccgacgacggcggcggaggacgagaaacagccttaattaacggaagcgaaagcaaatatgaagacaagacgaagaaacggaggacaaaaagacgaaacaacgaactttccatttgcctgtttttgcacaatcaattggatccgctgaatacggagaagttggaacatcctgaacacattgacaacaagaattgattgaaaaaaagaaaagcgcaaaacaaaaagcaaaatcaaaaactcactattcccgcgctaacgccctttttcggatgcggaaggcccaccggcgtggtcttaaagtgggggcaaataaataaatgcaaattatggaaaagcgctgtgctcactgcggttgatttgagtggtttggtcgggcccggaggacgcgaaggacggacgacagccttaaaaacagaaaaaagatgaatgccgaagacacaataacaacaacaataacattcactttgcctaggtcggcttttttgttcggcgcgctcggagcagcagaagttggagcagtacgaggaacaagcgaaggcggaacagccgaagaagggcccgagggagcgattggagtgggagaaacgacgacacccgcggcagagggatggacgggcttaagcgaaaaaagggaatgaaaaagcgcaaaaagaaatcggcggcgtggacaaaacccacttttttgtcgtaagcaggcgaatttggccgctttttcttctcctttcgaccgaaacacatttatcagtacaggcaaagaaaatattataaattataatgctttgagcaaaaaattataaatttagaaattattttagcaaaaaagaggaaaaattagcaaaaaacgaaattacggaaaaggattatcagagaggaaaatgacgcaaatgaaatgatgaaatggagagcaaaataattcatttatatacattcagggatgggccgaattgaaaaataaaaagcgaaatgcgaaaaagcaaaactgaaaaatgcgaaatgaaaaaaaaagttttgaaatgcgaaacggcaaaatgtgcgatataaatttgactatttttttcttcaaaaccacttttttgcggtgcaagaaaccggaaatttttcaaaaaatatacaatataataaaaaataaatattttaataggctaaatttttaattcttaaccaagtaaaaggtatttcacaaatgtttttagtatattcgcttgaaaaaattattcaattattttatcaaaatcttttttttctgatttttcattattttagaaaatttttgggaaaaggagtgactatttacacgttttttacagcgcgattatttcagaaactttttaggaacttagaggagggtacagcggtgccgataggcgccgccgggaaatttttaaaaatttcagttcaatttattaacagaaattgtgcaaaacttactagttttttgaaaaaaaaaattaaaaaaatttccgacttttcatcaaaaatttcggaagtcggaattccgaccccaaaaatgtcggaaatcggaagtctttccgtgccatacctggtgcctatcgacatctgcgagaaattttatgaaatttaatgcgatttgttaacagattttgtctaaaattgaccaaatgacgcagtttttgactcaatttctacaggattattaagtaaaagcctatccggcggtgccgataggcgccgccgggaaaatttcacaaattttgaatgaaatttgcgatgaaaaatgcgttaactttaattaaattcagggctgccaagtgtcctttttttaaagattgtcctttattttaggcttccccaaactttttaaattttttgtgcttaatgatttatttcgctgatattttatttatttattttcgttttaatactattttctcttcctctctttccctctcaccataactttttgttttttttgtgcacacaacctattgtcagacgcataactatttcccatttttagcttttttacatttcccaaatgccccaccaaaaatgcaaaaattttattgtgaaaattatgcaaaagaattccggcacataaagaaaagtcgaagaatttgccctttgtatcgtctgcaacgatgatattaatctcctttccattggaaaagctgccatttctcagcatcaaaatactggaaaacaccagaaagcggcaaaagcagcaaaccgatcaattccattgcaagaatttttgccaaatacttcggccccatcgactgaagatcggaaaattcttgctgcggagggtaagacattcaaaatcaacaaaaaaattcctctctcacaaggagcctgggcttatcacaccgcgcagcactcccattctttcaattccgttgattgtgtgtcttcttctggactgttccgaacaatttttccggattcggcaattgcaaaaaaattcagttgtgctcgtataaaaacagcaaaaattttgacaggtagaagaattaataggacggtaaattgactttttacaggggttctggcaccatattctgtgaaaagtttgctcgcccgactgggaagtcaaccgttttctttgtccatcgacgcttcgaattttggacatgaaaaactctttccattggtccttcgtttttttacaaaacccaacggaattgaaataagattgcttgaccttgaagcattgcccggcgagtcatcaatcgagtaataattcaaacataaacttcttaaaatgatttaaatcagggttcatcaatggattaccaaaatcgtcgaaaagcacaatttggacttctccaatttaacggctttctccgccgacaacacaaaaagcaattttggtggggaagagagaagaggagaaaacaatgtcttttttcgacttcgtcaacaacaagaacgattgatcggtgtagggtgtgtctgccatgtattgcacaatgcagcaaaaagagccactgacaatttgagaatagctggcaatgctctggacattgaagcagtggtttttaaattggctggccatttcaaaaactcaactttgcgaactgaggaattaaaagggttttgtgacgaattggaggtgcaatcccgaaattgagtttaacttttaacatgcaaaaacatttaaatgacgcgttggacttggccagacagattgccccggacctgacaaataatctctttgacgatgttagcgaagccaatcaaattctcaattcaatcccaaaggacgaattgcagaagctcaacactgaacaaaagtggatgaagctatttgaagccgatttaccgcacttgtacaagttggtcagcattgtactttccgtgccggtctcaaatgcatttgtcgagagagtgttttcgctttgcggctcacaatggactgatgttcgaaattcgttgaaagtcgaaaccgtgaaggctctggtccagacgaaaataaattttgatctcacttgcccagaaatgtatcagatgctcatttccaatcacaaactgttggatcagatcggtggatgggacaaatactttgaatgactcttttttgaaaaaaacaatattaatttcaataataaaaccggagtaattgtgcaaatttgttgtattttgcttttataaaagccaataatgctttttaactgtttttacaaggtaacaatcaattttttcaaaaaatcttttttttggggtccaaatctttgttttagcctcgtttgtcctttttttgaaaaaaaaaacttggcagccctgtttaaaccctcaaaaatttcaaaaaatgtgtatgtattcattttgcttaaataaacctaaaaaacaataaacaaccaaaaaattgatttaaaacataaaaatgcaaatttatttattgtcgtccatcgtataaaaaaatttccaagtttgccaaaattttgaaaaaaaatttcatttaaaaaaaagaaaataaaaatgccaaaatgacgacgaaaactcaaatttttcggattttttgggctgtaatttttaaaaatttccaaaaagtctatctttaggggtgtattttttcgcttttcttgcatttttcttgtgaaaatttgccaaaaatggccgaaatatggactaaaaagacaaaaatggcgaaatatgtatttattcccgaaaacccccaaaatatggatttatatggactaaaaaccttcaccaaatcaaaaaattttaacgtagaaatgctatttttgagcccctttcttcatagcatatgagcagaaaaaatatgttaatccatataatttacaaccctactaataactcgaaaagtatttaaatgttcgactgcgcgggaatccgatgggaccccatcccacacaaaaaattttgagttcctttcacgcattgaattcgcaaaacgaacttcaacaactcgcataggtaaggtatgcaccaatttatgcactgccaaattaacacgaaaattccctatttaactcggcaaattgtacacttcgcctcattccttcgatcattcattcctttcgtttttctctttttcccttcaattcttaaatcgccttcctttgccatgcttttccaatttcattactgggtgaaaaggttaaatagcttcttttttcacaaaaatgtaaaaaattccaaaattttcgaactttataagaatttctcaaaaatctggaaattaggctcgaactttcgctcccagtttgcgccagaaagcggctttttcattccaaaaaagatgcatcggcgctggggcggctacataaacccggcgccaagaaactgctttttctttttttgttaggtcggcttaaattgtaaaaaaaccagcttttacatacatatttgcatattccaaatgttctttttttcctccttacatattttagagccatgaaaatactcatcagaggcggacttttcttcattatggtgcgcgtttcaacaattattttctcgcattaatttcaaacgaattagtgcacaaatgtttttttggtccatggctttccgaatacctaattcttatatttgaattttttaatttggctaaaattttctcaaatgaagctgtgctacaatttttaacatctttgcgccataggaactcgcgcaaataagagtcgatgatttttaaaaaattcaggcccaaaacggaaaagtaccaatattttctgttttgttatttcaaaaacaaaaaaatatcttttttgggttttggtttacccnttccccccccccccccacagattgctttcaccgtcgcttcgttgcttgtcattggctttttgctttccctgtggttgggcggcttcgccattcgtgtggttgccgttgtgatcgaagattctgaggaaggataccacggtgggtggactcaatgttttgcaattgtttaataatgctaaatgaaattggaccattcgtactgcggctatttgtacttgtccagtactaagtttatccacccgatacttttatgtactttaa

SEQ ID NO: 3803 - DNA, 5591 bp, Heterodera glycines
gcacacgacggggaagaaaatgcaaaaacccggaacatcagtttaccacaggtgcaataatttaattttcttatcaacaaggcgaaattttaaatgctaaaaaatatggcgaaaacctcaaaaattaacaataaattcgaaaaaaaaaatttttaatataaatttttagcgccaaaaatctgtgccaattgtgtgaaggacgaactgacgttggtgcagggtgatcgagacaaagtgccggatccaatcttggatgacacgcaaattggaccagacggatgcgcatttactaaagtgacatgcgaaaccaggaagaccgaaggcgccaaaatgaatatttgtgtaagcaatgttaaaattttaaaaatttttataataaaatttaaaaagcaaaaaaaaaactccgaattcgaaaaaaacaatttttttttcgaattttaaataaaataataaaaacattggtgatttaggataaatagtcgaacaaacgccttttttatttattttgaaaataaaattattaaaatggcaacttttgtcgcttcccaaaaaggcagtacataacttgagtttgaaggacatttttcttggccccacccaaacattttacttttaattgtctaattaaaatttaatgaatttaagatcagaaacgagtccaaggaatgctgcattgaatccaataaaggaccgttcaatcacagtgacgctttgctaaattgttctgggactgctaatgagccgaactgggtgctgaacggcgcaacttgcaatgtgatcgatgtggcagaggtcgtttaatttaatttatagtattttttaattatttcaaaatttaatttaatttattcattttaaatcactccttttaaattgatttgtgtttacttgaaaactctctaattttgcaattgttggaaaaaaaattttgaaatttcaaaatatttataattcaccaaacttgccatgtcgtccaaattcatgagcaatttgatttatttattttgtttttttttaaatttagatccaatgtaaagtcaacaaaatcaatgtcgaggatcaagcaaaagcgtcgaacaatgcaaatggtaatcaagcccaaaaatttttaaataaactatattgaaaataacatttagtcaaaaaacgattggacgccatgcaaatccaaactcctaaaaaggcacgctcatcgtctgcgcagggcatcgaaccatccttgggtaagaaatgattttgcatggaaaaccgacggggcactcgggacttgttatcaataatccattggcaacaattacttatcttattttagataaaaagcaatcttcaccagttcggcaaattgatccgaatggcgaaatatcggctgtaaagaatgccgcttctgctgaccaaattcccgacaaatctgctgaccaaattcccgacaaatctgctgatcaaatacccgacaaatctgctgataaaatacccgacaaatctgctgatcaaattcccgacaaagcctccgctgccagaaatgccgcttctgctgatcaaattcccgacaaagcctccgctgccagaaatgccgcttctgctgatcaaattcccgacaaagcctccgctgccagaaatgcctcttctgctgaccaaatacccgacaaatctgctgaccaaattcccgacaaatctgctgatcaaatacccgacaaatctgctgatcaaatacccgacaaatctgctgatcaaattcccgacaaagcctccgctgccagaaatgccgcttctgctgatcaaattcccgacaaagcctccgctgccagaaatgccgcttctgctgatcaaattcccgacaaagcctccgctgccagaaatgccgcttctgctgatcaaattcccgacaaagcctccgctgccagaaatgccgcttctgctgatcaaattcatgacaaagcatccgctgccaagaatgccgcttctgctgatcaaattcccaacaaagcctccgctgccagaaatgccgcttctgctgatcaaaccgacaaagcctccgctgccagaaatgccgcttctgctgatcaaattcctgacaaagcctccgctgccagaaatgccgcttctgctgataaaattcccgacaaagcctccgctgccagaaatgccgcttctgctgatcaaattcctgacaaagcctccgctgccagaaatgccgcttctgctgatcaaattcctgacaaagcctccgctgccagaaatgccgcttctgttgatcaaattcccgacaatgacaaagcaccaggtgtcaagaatgtcatgtccaattccgtgttcgctgatgagcccaacaaaactttgtctgtccaagccgctacagatgaaaaaaatgctgccggaggaaacaaatcgaaatcggctgaaaacaatgcattgtcatctgctgccaatgatgaatcattagcttcagatgaagcggataatgccgtgccgaattcttctgatgaaaagtctgtgccaaaagctggcgacaacaccaaaaaatcagcttcaccaaacggtaattcttctgtgccaactttagttcaaaattgggcggtaaatctaatgggcgggttttcgatcaatgatgccaaaaattcgttattttaaatgcgaaaaaacttttaggcaaatccgccccagttgttcgaaacaattctggcaataatttggcttctccgccaaacggaacggcaacagcctctaagaatttgttggcataaacacagatgcattttgatgaaatgatttgataataatgattttattccattaaaaagaaattgcagataaaaagcaaaattatgtaaaacttaacttttaattttggttataaattttctaatttattttaattaattgtttcttagcttaaaatataatagctacacaaactgttgaattttttgaaattaataaaattgaaaattaaaattcagtttttagtcccatttattaaaaatcctaaattttgagtgttttcactttttaaaccttttctttttgtcaatatttttactaccgttttcatatatttcattatttaaatttaataaaattaatttgtgtgagaatcattacatgaactgattcctatattggaattttgttcaataatttccacattttttacttggacaattcattaaatataatgaatgatcagaaagctttgcatcattgcctctgatcgcaataatgtgttgttgaactgctgatcaacaacacattgccaattggccatctgttgttgttgttggaccaattggccatctgttgttgttgttggacaacgaactgcttgctctgctaatgaatgggaaaacagcaactgttccccccggatccatcaaataaacaaataatgaaaaaaaaagtccccaattttttgatcagagattgtcccaatacacacatttaatgatggatgcttttccattgtgtaagcaaaaattaaatgtacatttttcctttttttcgttaatcctttttttcgaaaattttaggaatttaatttcatttgaattctttaatattcaataatatgttactgaatttcccaattctttaaaaatattctgttgacttttaagaaggcatacaaccagagttcaacgaatcaaagaattaaatgtgtttattccaaatttattacgttaattgggaaggaaatttttgtttgaccataattttgattaatttcaattattttcttcgtttttcaaaaattaatttgttttcgcctgccaatttcttgttttctttattttgacacagtttttctttactatatttggttttacatttttgctcagaaaatctgtaattaataaaatattttcccctttttatttaaaaatatttatttatttttaaattattttccaataaaatttatcaaatttataaaactaattttagtattttttattttaaaaaaatattttcaataataaaattcatcaaattatttttacggtttttatttcaaaaagcatttcctatataaaaaatttagttgatttgttaaatttatttttactatttttatttcacaaaccattttcccaccataaaatccattaacatatatgtatataaaacgttttttttccttttgcacagtaaattatgtacacattttgtggaaagattttttccctagataataggcaatttaatcgtcgtgtcgtcctccaatcccaatatatcccttcccattcattcattctttcatctcatttatgtggtggtgctgctgttcatctgtgttagttagtccgtccgtccgttctgcttgccacaccaaaaaaactttttgccatccatcccatcattatcatattcgttttgcctttgcctttgccctccgcccctcccccaaatgacagaatgccaatatgtattttttttgattttttcccccaacattatgccaatgcaaatgaatgggatgggatgaaatgagaggggggcagagagaggaagaaggacggtttacccaacacaaatgtacacaaaacattgtggttgggtgttggattgtgtgtttgttgtgtataaaattggattctcaattccccattttgctcatttacgccgcggtacacattgaaaaaaattttttgagtgaattctgctggtaaatttttttttgaataccacctaaatttgaaagatttaatggatgtctcaattcgtgctcctctccattagggaaagtttttttaaatggctaaaaaggctcataaatcgggaattgatcaaacttcaattaacctctcctttgttaatccgttttgattttccataatttaaaaaaaattgcacttatttaattgatttcagaaaaactttccacgccttatcatcccctaaacactttgtaaaaatgcgttttacttcaatcccgttgattttttgccttattgcactggtttgcgtcattgcatcagttcctgaactcccgcaaaaattcctcaaatcctggtcggttgatcattccgaaaatttcgacgaatacctggaggtgcattttttgatccacttttttttgaattccaacttcaaatttgttttattttaggccaaagggtacggctggttcatgcgccaagtggtcaagcttggtaattttaatttttctatcattttcaattttttaatttaattatttattttgtttttcaacttttagccggcatcaccaaaacattttcgaagaatgagaacggcacatatgcatgcaaaattgaaaccaccaaaaagaatgtggagtggcccagcttcaaattgggcgaggagttccaagccgagtatttggacgactcagtgcctaaggtgggggcaaacaatttcattttattttaaataataataattattattattatttatatttataagcaaattggcttcactttattcacgaaaagatttaaaatgaagcttctaaaaagcacagagttctcaatatttttgccaaaaagaactccattttgaagggttttttggtcctccggtactgagatgtctaattgtttacacagaatccaatataccaatataaaata

SEQ ID NO: 3804 - DNA, 3495 bp, Heterodera glycines
agaaaaaaagttaggaatatttttttaaattaaaatttcttttaaaataatggtaaaaaaaatatgaagaatattctatcccattgggaacttgaacccaagcgagaaataataaaatcagaaggtttagccacttgaccacttatccatatgaacaaatgctttaaatgaaaataaataatttaattttttttctcaaaaaatttctccttcttcatcattccctactcttttctcacccagacccccattcttaccagtgcaaatttttaccggcggtaccggtactagacaaaccggtaccgatactttgatttttgaaaaaaccggtaccggtaccggtaccaaaaaaaccggtaattaccggtcggtaccgctcaaccctactaaaattgaccaaatgtcgcactttttgactcaatttctcgttgcatatatttgtcagggacatgaaaatttttaattttttctaagatttgttaactaacggcgcgggattttgcgggatcccactccgaatcaccaattctttgtaatatgtgtaatctgcgagattgcggaattctgacggagattattgatatttttgaaaaattttgtggactgaatgccaaatatttttgaattaattaaataataaatttaattaaaattaactcattttcatcgcaaatttcattcaaaatttgtgaaattttcccggcggcgcctttcggcaccgccggatcggcttttacttaataatcctgtagaaattgagtcaaaaagtgcgacatttggtcaattttagacaaaatctatccgcaaatttgaaatttccggtctctagtaataattaaataattaaaatgacccactgccaattattttttttaattatccaactttcattttttgaaattctcagatcaccttcgactacaacccaacaaccgacgagctgatcgaaacgcacaaaaaggtggactcggaggagaagccggacatctacaaatacaacatcgactcggacggctttctggtgatggtgaggaaagagaagaagcaattttaataattaattattgtaattaaaattaatttggattttaaatcatattttatttattattttagcaaatggaatataacggagtgaaaacgaagcgcttctataagaagaatgaatgagcggagggtgaatgctttgtgggggtcaagaacgatgtgcagatggagaagaagcgacggatgattttgatttttgcctgattaattgccgatgttcattaattaattaaatccaataacacaaatttttgcccacattcataaaagcaatcagttaacacggataaagtgtttaaatgatagcaacttttaaattgcaagcaaataatgaaaagccaaaatgaaaaatggtcagtttttttaaattagttaatctgcgaaaaaataatttattttaccccattaaattatttattccaaaaattaaaattagaatattaattagaaaatgttaaaagatgaaaaatttggtatttctgctaagctccatcgactaaataaaacatttcaatcttcggatttgtcaaatcacggtccttttttgcgcgttgcttggccttccgtgtgatcagaaatgttggaacatcagtggaatttcttggcacgaaattactgattttatgtccattcaaatacatgcggcttaaaagggaataaagaaaggattatttaaatgaaaattgaaatttctagaaatagtaatgtttaaaaaataaatattttgaaaataattgtaaatcacatttgtcatttattagggtaattaaaaaatatttaaataaaaattttttttggctcacgtttgttggccattttcagttctgttgtcggcacttttgccagactttggcgttctgttccttcttcttaagcagcacatatgagcggagcatggcatatagccgggcggacaaatgcaaccaccaggagctgaaaatcaaaaacaataaatttaattaaatatttaaatgctataattaaatcttaatgagatgggtaattagttacttaattagagaattaattataaaattttctaccaattggcggaggtggaaatggtggtggctgaaattgaactggaaatggcggcggtggaggtggcggcagcagtggtggaggaggaatgcctatgaattttttttttccattaaaccagaaataaataattgctttatcccgcacttagagcaattatgaataaagatgccaaaaaaaatgccaagaattatgcataattttttttcgaaaaaaattaattaaattttttctttatatcacttagaatttgttttcttttttaaccataatatatttatttgtttgtgttttgatcatttaaattcataaaaataccgcccgcgacgggaaggctaaaacaaaatgtgacagccggcggaacctaaatttaaatttaaattatatatttttaataattattatttacagcgggcaacggtggcggtaccatggggaggggctgtgccaaaacaattggaggcgaaggcggtattggcggaggcactgcaggtggaattggaacgatctatttaaaaaagaatgtaaaataagttagcgaaaatggtataaaccgaaatagcgaatccgggctctaaaaacgggtgccattcgaaaaagggtttgccaacttttttagccttttaaaaaaaatattttaaaattcctgaaatttaattttcggacaccttctataggttactgcaaaaatactttaaattagtgaataacaatttttatttttatttttgaccatttgaggtgccgcgccagggaccggcaatggttgcagaatggctggtggcaggtcgggcgcgcaggccgtcatgcagaaggtgttcagcggcacggggaggggcggcgacagcgcaacggctggcgccaatggcgggggcggagggggaggcggaaatggcaccggcggcatcaccagctggaaataagatttttccactttatgcgttaaattaacgccaattgaccggctggcacatcggagggcagaatggcattggggcatccggaagaggcaaaaattgtggcttaatgtttgtttaaaattaaaaaatatataaatttttaaaaaatttgaaacattttgaaaaaataaaattactgctggagctgaaaacattatcggatttggtggtggtggcattggcaaactcatcacaaactaatatttgaaaaaaaaatgctaaatgtttttatgaatttacactatttttttcacacctgttgcatgcacggcggtggacaatttgggaacggcaaaggctgcgcaagcagtggcggtggtggtggaggcggaattggaggcggaaccatgacaaactttaaatttcggaaataccaaaaatttaatgtaacttatttaaattttaaaatagtaaaattatttaaaaatttcaaaaaaacacctgtggg

SEQ ID NO: 3805 - DNA, 2608 bp, Heterodera glycines
ccattggcaaaacggaaccggcggcggcggaggtggtggtggcggtagaggaggcaaaggtatggtaaattgttggacgcactgtggcaaacacatgggcttaattaaaaaaaattaaaaaaacaactaagtttttttgatttaactaacctggcattgtgcaacacattccattggagggagaggcggcggtgccattaatgccttcatttaatatttaattagcaataatttgtctcgtaataattaattgtcccaccattggaggaagtcttggcaatggcggcggtggtggtggtgcaaattgcgcgggtggcacaacaaacattggcggtgccattgccataggtggcggcggtggtggcggtagaggtggaggcattggcatcatacattgaggcatgcactaaaataaaattttcaaattaaatatttccataaatttttaggataaataggcattttgaaatttccaaaaaatttgggtatcaaagatatatgccgaagtcatgaagcgtccgtgtggaaaattttttcaaaatttaaataaaatttgttaatttatattgtaatttttgtgtgtggcatttattttgaaatgatcaatcaacaattacaccccaatatatacttttaagacatacatcatcttattgtatcaaaaccaacagtcagagattatttttcaaatattcctttacaaaataataaataatccgaatcattgaattttgaataatttcattaattaaaaagaacaaaaatttaattaattaattagagaaatgtttattattgtaccatcggctgacacattgccggacatggcatgatcgctggaggcggtggtggcaagggaagtggtggcggtggtggaattgctggtggttgtaagtagatcggaggtggtgatgggggaggtggtggtggaaagacaattggtgggaattccttaatttgtttttaaatcaattaatgataattaattggatttatccaaaaataaaatgctaaaaagtacaggaaaaaagagtgtatatataaatttagtaattaattaggttgaatttttttttacctgaacacaagctggagcacatgtcggcatgcaaggaggtgcacacggcatttgaggtgcctgaaaaatgccgaatatttcgaaattaattaaatttttgttagaagagatgtcaaactgccaaaggatttcttggaaaaattaaagacttatgcaaaattaaaacaaatcgaattttttattattctcaattggcattgtgcttttttaatgattttcaaggtcgtgtcttcggtatgcagacaaatttttcggggagaggagcgacaataaataattaaataaaatgccaaaactaaaaaataataaaaacattgtttacgaaaagtgcgaccattggcacaggcggtggcggtggtggtggtggcggaggagggggcgggaacggcacaggtgaagcaaaaggtggcatctgcataattggtggagacattgcagcagcaggcgggaaaatgcaatgaattgtacaggccggctgacacacctgaaaaaaacattatacattgacgattaattaagccgcgattattttcacgctaattaattaccggcagacatggtggtggtccaagtggcataaccgggcccggaacaggcaccggaggcggtggcagtggcattggtggtggcggaggaggtggtggcaacaacttaatcattattaatttaaatttaaaattatgaatttttgaaatatttgccgtcggtgggggaggtggcggtggtggaggtgggggaaggaaatggcggcatgggcggaggcattggcattggtattggcggtgggcacacttggccacaagtcacctgtcaaattgtagaataaatttgaaagttattttaatatgaattttttatttttatatttacccaaaagttgaagccccatatttagttcattctttgttttatgatgtgaaaaaggctgttttttaaatacctattaaaaaaaagaattttatattctttttcttagagagtttaaatttcatgttattaataatcctttttaatttaaattttttattttaaattttgtataaatctattaaattataaattagataatatttcacttgataagtaagtggacatccgcattgtaccaattgttcttgccacattgggcattggcataacattggtggtgctcggggtggaaaaggaggaggaggtgggggtggtaactgaaattggaaatttcattcgaaagatttaaaaaataatatttttggatgacttaaattattaaaaatatttatttattattttacgggtggcgaaagtggtgggggccgtggcattggcatcggtggtgcttcgattagaattggtggagaacacccgcattgggtcgctgcgagtccaccgcaatcgcattgttgtaccttttttcaataattgttgaatttaatcatttaaaaataatttaaataaaaaccatctatttttgtaaatatgaaacataaatgatgctaattagtattgctagcgccccgaccctcggtgagagaaaaaccggggacaaga

SEQ ID NO: 3806 - DNA, 1647 bp, Heterodera glycines
taatagatgataaagatgccgaaaacaataattcacccgcttctgactgcttctggaattatgaaaggtcttactactggtctggcgttttctgcgtgtttaccaggggccgacagtgcacgaccgattcaacaagttcatgtagcgacagttgctggtcactcatgggtatcgcaactagcagcagctcaacaattggaccaaatggtaagtgtgccccaggggcgtaatcgaaggcgcacaaaaatatgttgcggaacccgaaatgattgcttaaaaattctagtacccacccttaaaccattttttcaaaaattttcaaattaccgagtcataaaatgtaatacagtcttccgaatataagtggtgcaatttgaaaaaaattctttgaatttccgttgcctcctatgcaaatgaaaatgacaagcgacgatggacaagcgtcactatcaactgttcatcaacgaaaaatgacaacttcaataaagacaactgaacatttgtccaagaagaagaagaaaaaatgtaagaagcacccggagaaatgtcacaacggcgtctactaccacgaccaccatgaccatgaaaaaaaagtacatataaaattttaattaactatagaaaaaatgtggtaatttttaagggatgttgctgatcagcttggacgtaatgtcgaggagaatgaaaaccaatgcagaaaatgggagaacagcagaactttcggattttctttttgggtggataaattttatctttttctttccgtagattagcttattccttcgctttttcctatcgataaatttttcaaaattatttaattatttgataatgagaagcaaacgataaatttattttatcgattttttcgggaaaatccttaaaaattttcgtgttttattttaggtgcgattatataaaaatgcgagtaaagatcatcatctgcttaagattcactgtccctcaaaaaccaacaaaacagtaataaaatttaaattggcagccttaaaagattagaccgttttttatattgaagtgttcgccgttaacactttgttttggaaattcaaattagggttcgagccccgcccccgtcacccccgcccccgccgggggcgggacaggttttttgggctcacccccgtccccgactgcatttattatatctacaaatgaaaatgaagttttttcattggttaattatttgtcaagaagattattaattattttatcataaatttttgcactgaatattttaaatatatatttaatgtccaatattttaatctttgtaccaaaacggaaatgccattcgcttcctgccaaattgaaaaacattttgccgaatgtttcccaacatgtaaatatgttgaggaaaccctttaaaaatcaccaccaaatttgaaaggcaaagcttatttttatccattgttgggcaaagatttttaccctctccaattttctttttgccaattttttagctaatgtttttgcccgttccttcggataaaagtcaaaaattccgagcaacatccgaaaaaaattcgggggatcccaaaaataatttttgttgaatcattggagcaatttgatcaaaaaaaccactatttaatggaaaatggtggacaaattttagaaaaaaaaaaa

SEQ ID NO: 3807 - DNA, 7570 bp, Heterodera glycines
gtttagttattttatgttttccgcctttttgatgagtgtgcccacagcctcggcttcgtccgtgccatgttcgtcattgccgcctccgcttcttcccatgccagcaacaacagcgaatggcaggcattgagtgcccagtttggtcagcaaatcagtgaaattgactcgaaatgtgccgagtttggcattggcattgccaaagtgccatttgacggccccaagggtaaaactaataagagacaataattaattaattatgcgatctcttaaggtgatcactagggacgtgaattttaggttttaactatttttttcgctcaattgatttgaagaaaggagctcaaaaaacgcatttctgcattaaaaattttcgattctgatgtcattatcggtcactagaaatcactattttggcaatttcgtcactaaaatagttaaaaatcactattttggcgttttgtcactatttttcactatttcgacattttttggaaaattctttaacaaaaatgcaataaaaccaaaaaatacacccctaagaatcgacctaaaattttttaaaaaaatacacccctaagaatcgacaaaaaaaaatttcaaaaagcactcctaagaaatgaaaaaaattttctcaaaaaggtattttcgtggcaagaattttaattttaaaaattatttttttatgtacctattgtgtttttttgcccttacaaatagggttcgagccccgcccccgtcacccccgcccccgccggggtcgggacatgttttttgggctcacccccttccccgcccccgtgactcagaccttgcaacccccgcccccgcgaccttcacccccgcgggggcgcgggggtgaaaatacacccctaagaatggcatattcgttgaattaaaggcaaaaatttatacaattttgaattttttaatcatcttttacaaatttttatgaaataaagtaaattttgcttatattttttaaaatatttgtggtttagtggttagtgcttcagcactaatagaaatctttgttatgagttcaacgccggttgacgttttccttaaataaattttttttttcctttaattaattttttttctgattaatacagggtttctttatgttcttgtttctaagtgttctgatttgggagtaaatccttattttcatctaaaaagaggaaaacttctgaaaaattttgctaagttctaacaaaattcatataatttcttaaaattttcccctggaggcgcctataggcaccgccgtcccccaaaattcctatctttttttcttaaaaattagccaaagatcgaaaaatttgcttattttttgtacaaaatttgttaacaaattgcattcaaattttcaaaaaatttccccggcggcgcctgtcggcaccgccggacctctcccctcgcacattcagcaaattttttggaaaaatgtaccgcaagaaaaatttaaaaaatctgagttccaattttccttgagtaaatcatgattagggctgctaattttatgtaaatacatattttttcctggcttctccatagcctaatcagtaggaaaaacactttcttttttgtgtttgcaaacaaaagtttggacttttatttacatattttagtagatattttgcaaatttgaatatctgttagaaataaatttaaaattcgctcctatcggcacgccggcccccccccccccaaaaaaaacctttttttcttaaaaaattacccaaaaatcgctaaatttgattatttttagtcaaaatctgtgcaatttatgtcaaaataaatattatcaaggcgatcaacgaataaaagaatgtggagccaaagaaattattcataaaaaatattttttttgtgagatttttggagctaattcaaagcaaacccccgcccccgcccccgcgacgcggaattatcgtgcccccgcccccgcgaaaagccacccccgcccacggggctcgaaccctaataagaatacagaaataaaaagaataaatcgcattttattaaaaaaatgtttaattatatgatttttattatttttcgtcatttaaattgaatgaatttacgtcataatttattggatttattaaaaatttggaggaaaggcaaagtgtaaaaaaattttgcaatttatcattataagaaatttctgggtactggtcctcccgagcctctaaaaatttacataattttcaaaaaaataaaaggactcaaaaaataatatttttaaaattttaattttttttttctaaatttcaaaaaatttccccgcggcgcctatcgacaccgccgaactctcttccctcacctatacccaaaaaattttaaaaatttaaattgattttcggaaatgtataaatttctcatttctaagccggaattgcgcagaaaaatagttggcggtgagtaatgcttggttttgttgaataaaaatgcatttaaagttttggaagcgcgttttaaaaatgtccttatttttgaccctaaaatcttatttttgaccagcgatgttcttatttcgggaaattttcaagggtaactctgaaaaatagtcatttgcgccgctcactcaaaaaaatatttgaaaatatttttagcaattttcaacaaattttactcaaactactgtgccaccaaaacaaaaaacaattaaaataaaataagtttctctgatcaggatctggtatccatttcggccaatccgaactccggaccggaatttgaacaaataccaaattctaaattttcgagtttatcattttggttcaaaaaaggcgtaagatctcttattgaaagattgaatggctttgtttttgtgtattttaaccggttttgaaaaaaatattctttatataacaatgatcagacattttctttatcaatatatcattttattttcttctaaaaatgggaattattttctatgatatttttttttattcaaaaatttttgttaaaaataataccaaaaaaaaccaaattatttattatgataattaataatttgtcgacaaacacactatttttgataaagtataaactttttatataaattaaaaaaaaatattattgaaaagtcacataattatacctcagcagcagaaaaatcatttgtgaaaacacacattataagaaagttcagaaaattttttgcacaataatattaatgaatataaataatatttaattaaattttgattcatttaattttctcatggcaatcatttcaattaataaaattattaataattgtaaatttttttacattttccttccgctgttttcttcataaaaaagacccaaatattttggcagttagtttagcataaataactaaaattataataaaattaatcataaaattttataaataatgaaattttatgttatatttcttcttttattattcataatgaatttactaataagtgaaaagaatgaaggaaaaataaggccaacctttgaagaaatatttggccaagaatgggaaaatgacaaaacaattgaaagcgaaattaatcaaaacttaaataatcaaaatgatttgaatttggctgattcaattcgtaatatcagaatgatgaattcagagatcaacaaaaatgcaaaattattcacaaatttcatgcaataaaagaaggaattaagaaacggggaaaatattcggcaaaattttagggttaaaaccgagcaaaaaattgcgaaaaaattgggaattaatcgaccaaaaatttacgaatggaaaaaagaatttgaaatttattattataaaaagaaaaaacaggaatttattgaacgaattgatgaatttaaaagaatgtccaaaaatggaaaacagaagcaatttgcgaaagagttgggcattgacagaaaaacattaagcaaatggaaaaaagaatttggcattgaaatgagcaaaagtaaattttaatttaatttttcaaaataataaattaaattttaatttaatttaataattatttatttttaattttttaaggatattcgaatgaagagaaaatgagcaaaatgaatgattattatgaaatgaaaaaagcaaatccttctttaagtgacaaagaaattgctggcattttgaaaattggatttgccactctaacgagatggaaaaaggaaaataattcgtaatttttcgtttttcttatttgtattggtttcaaatgatgctttttattctaatttttgttttttataatttttccctcttttatatgtttgttttttaattgacccatacaaattaaaattgtcaatttctcttaatttttttttactgtttttcggtgtacaaaaaccctaaaataattgtcccaattttcttttccgccagcatataaatttcgatttgacaaaacatcgaccaaaaaaacatgattgagtaattgaatgcaaccaaataaattatcattaattattgtcttttgcttgtcttccgtgtccgccgcatcgcctaattaccccccgcggcgaatgttttgtgattgagaaataaaacaataaaaaatagaaaaataaaataagtagttccactcaaaaatgtgggttttctgattttattttaattttatgtgctgttctctgtacatttatttcattgtgtgttcattttcttaatttttccgctcattttgtcacttaattaggtaattaggtgggctgactgattcttcattattctttcattatgctaacaattagtgatatttaatcgagacaaagcaataaatgcttcccaatttctcttccgcgaccatataaaaataaattagcattagtgtatttattgctttgtgttccatgtccgccgcgcctaattactctaattaccctcccccctcccctgcggcgattgttttgtgactgacgaataaaaataaaaataaattcaaaaataaattgagttccactttctcaaaaatgtggtttctttcatattcattttatttaatttcctgctttcctgtacatttcattgtgtgttcattttcttaattttccgcccattttgtcacttcattagttaattaggtgcactaattggtcattgttcatcattaagaagtgcctcaattagtgctgctgctatttacctcttgacaaagcattctgtccaaaaattaatttgatgccttttctcagcgccagcaattaatcatttcggtaattgacccgtgttactctgcccacttatgttcttatgtgtaaccccgtataaatacacatgtccaaaaaagaagtttcacttatgctatgaaccattgaatttttctttttttctttttcaaataataacaaaaaaaattttttttacaaattttacaagaaaaatttttatttccaacataaagttgaaaagctcattttgtttaagatttgccaatctaaaattagtcttaagttttgtatttattttttcattgccattgcgagtgtttccttaattaaaatgaaagaatttgacactatatgtaaataaatttgcaaaaaaaatattattttttattttaaaaattcattgtttttcaaattgccatagtttgtctatttttataactttaaaatataaattatatttatattataatttcagttaaaaagctaaaaatgggcaaagaaatgcaatatttgaaggcggaggccgaatccatcagaaatgttgcaatttttggcgtttgcattgccacggtggccagtttggtaaaatttcaaaaatattttaatttttttttgaaatttaaaaaatttttccaaggtttgcacaatgtccattccgttggccgccctttactttcagcggatcagcgttcagatggaaggcgagctgcacttttgtccaatccgatcaggaaatatcatgcaagaagtagggaaaaactgtttatttactaaaaaaaatgaattaactaaaatgcgatatcgtaatcaaaaaagaatttaccgtaattccttaaagaatttaatcaaaagatggtacagtatttcctacaataaagtcccaacctcttaatttcccgcttctaaaataatatctccccctttttttttggggggggggggggtttcttactagctttctaaattaaaaatttggcaatttttgaaatttttgaaaattgtgacaatttgacgtttcacaaatttggctaccattggcattttgccaaatttcaccgaaccaacatttttgctcttacttggcacagagtttgtccaatcaaaaattgtgcaggtaacgcgcacccaagtgctgtccgatgtgaatggtggcgcaccacgggcgcccgccgcgggcgcagcaacgcccaagcagcgccagacgcgcagcgcccatcaccacttggacacggtgctgcgcaatggacggctcagcctatggaagcgcagcggctatggtgccgaaagtggaggcgttacaggcggtggcggtggtggcgcgtgctgcggatgcggcacctcggaacagggaccgcctgggccaccggtaggcgcgagaatttccatattttttcaaatttaaaaattgctaaatcatttagcaatgctttttaatttagggggccattggtgaaccgggcgctgacggacaaccgggcgcagctggcaatgccggcgaagacgcggcgccaccgccgccggcgccgtacattgagccgtgccaagaatgtgggacggcacaggacggatgtacgtacaaatttaatattttaaattaatattattataatttcacaattatttagcccaagctttggcatttaatttttttaaattttttagtcgagtccatttctacaattcagaaaaggccgtaaaatttcagatttttatgaaatatatgtatatgatggaaacatttatttcgatgtttctgtttttagaaaatttttgtcggcacttttcgctaagcgccgtcaaaatttttatttattgttgaatttttgaataatttacaaaaatttagtgcccgggccgcaaggcgcgccaggaccggacggacggccgggcgagcccggcgcgcctggcgagcgcgccattcctggaccccagggtgatgaaggcgcgccgggagtggacggagtgcctggaacgcctggaggtggcggtcaaaataaattttgcaaaaaaatttccaatttttcagagcctggccctcccgggcctcctggaagccttgaacaaggtgcagaaaattttgttttccttgatcgaaataattggaacaaaatgccagattatgccccaattgttggcccacccggacccccgggcgcaaatggacagcccggcacagacggaacgccaggcggtatgtaactattttttaaaattttatcgtgaaaaattcgggtaaaaattttttctcacaaattagggctgtttgagagtcaaaactaagcattgattttgctacaattcgagaattcgagctctatgaatcaagaattttcgaaattccgtgtcgagacaaaaaatgacaccgaaagctacaggaaatccgagaaagttcgaaaaccctagcaaatttggg

SEQ ID NO: 3808 - DNA, 1031 bp, Heterodera glycines
ccttaaattgcactttttgttaccattgccctcccccgtcctattgcatttgtcgtttacgccaattttccactgactttgtcggcaatgaggtcgagacgcgcttccaaagtggacgagacgcggattttgccgtctttggccaacaattcgacgccgcccgcactttccggggacaaaaagtactcattgtcaattttcacctgaaaaggttgtattcggcggaccctttccacaataattacttcgcttcgattgccccacgtccgctgaaattcctccaaacattcgggcaaaatcctcgccaccatttcctcgtctttcttgcggcatcgcaacacaactttgctttcgagcaattggaaaaggccctgccaatggacaaaaagtgccttttttgccgcatggggccgaaaacctgaagcaaaagtcctttgagaatggccggatagcgctctctgtccgccgaaattttgctgagattggcgcgtgcctcctccaacacatttttcaaatggtcgtccctcgccttcaaacatttcaaccgactctgattttgcatattcgacctctgaatcttgcgctgcagctccacttgcttctctttcttctcgtaatattccatgattttctgcctttgctgttgcaccaatttcccctaattaattgccttttattaactaattaatttaaataatttgcaatttaatgaaccttctcaatgttaaactcctcctccgcttttgcgtcgatttcttctgctttttcgttagcttcctgctcaataaatgccatcatatggcgaagctgcttttggacatcgttgtcggaaatgcccattttgtcaacgaatgcttttttgattttttggcttttggaacagacaaaaccttctttggtggaagtaattttgtgattaaaattgcaaaattaaaaaataaagatcattatatgataataaaatcgtgttgaaaaaaattcatatttaaattttattttattttattcacattgtatgaattgaattcaca

SEQ ID NO: 3809 - DNA, 2841 bp, Heterodera glycines
ggattggtaagaggagcagcaggcgttgatcactttttccaccattaatgtttcaactttgtttagctaccgcgcgaggacgtgacggagttgctgccgaacgacggggacttcctggtgcgcacgacagaagaaacttcgggcacagagcgcgtctttgcattgtctgtgaacgtcggaggcctggtgaaccacgtcatcttccgccgacacaaagggatgtacaccgtggacctcaactccgacaagggtttccgaacaatcgaacgattcgtcgaccactaccttcgcaccggaacatcagtcaccagcgtaagtcaaaaatttaaattataaatttagtcatttccctttgttttcaggagcgattcgtcactctcaggaaggccgtgcaccgggcgaattgggagctgtcgcactcatccatcaccgtcagcgcagagttggggagaggggcattcggcgtggtcaaaaaagcagtgctcaccgaacgcaatgggaacaactcgcaggtcgccgtcaaggaggtgtctcagacgagcaccaaggagcaggtaaaggcggagtttgaagcattgagatcgcaaattacacatttttccttttcagatcaaagagttcatgaacgaggcgcgcatcatgcggcagctggaccatcccaacgtcatccgcttccatggcgtcgccgtcggacaggagcccctgatgatcgtcatcgaactcgcatctgacggcagcctcaccgactacttgaagactcaacggagaagtgcgcgcaccagactcttcatgtgcgtcggagcagctgccggactgacccacatccactccaagggcatcatccattgcgacatcgccgccagaaattgtctctactcgaacggcgtggtgagtcaaaactttgttgttttagtaactaatttcgctctgttcccacaggtaaaaatctcggacttcggcatggcgcacagaggaccagtgaagaaaatggagcccaacgcgcgcgtccccgtcaaatggctgtcaccggaagcactcgccgagcgctgcttcaccgcgaagagcgacacgtgggcctacggagtgatgtgctgggagatcttcaccaacggagaagtgccgtactcacaaatggtgggaagcgacgtggcggtatcggtgggtgaacacaactttttttttttgctttttttcaacttttccttccttttcagctgatcaacggacagaggctcgacttcccaagagatgcaccgtcaaaatttgtcgagttcatcttgcagcacatttgggatgcggagacgagcggcagatactcaatggcagcggtccacgactggctgaagcgacacacgtaaggagcctagtggtgaacggattcaaagccatcagaagagccagccgaagcaaacgtcattgtgtgtgtgtatatatatgtgataaccctatgcttgttgtatttttacatattgcttactcattgttgtataactactattatgatatgtataaatgactgatgtcctgatgtttgctgattggcactttgcctgaaagaaaaactgaattttatgactttaaaatagaaatcaaaaataaccaaaatttttggtccggcggtgccgccgggattttggaatttttaatgaatttgttaaaaaaattgctgcaaatttttcctcttttctcccttcgccggtgattctttttctctccttaatttcttgaccgcgcttgattacgctttttggtacttatgtatatggttcgtacgccacaaatttaaattttttaaaaatcatcttaggttgcttagaaaggcacttatatggttctcaggggcgctgaacacgattatgacatctatttagaccaatttcgaaccccggaaacggattcgacctaaagccgaaatccccaaaaagtcggaaattcaaactttttcaacaatgcggcagtgatcaaattcgtccatgatttaagaaagaatatgtaagtgcttaggaaaattatataccgtatttgctctaatgatcgccccggggggattattagatacggggggataaagacgggggggggggattattgttcaaactcctcagaaaggaggggataattggagacggcgggattaatggagacggggtgataaaaagagcaaatacggtatgttagttgcagtattatatgaatgcgaaaattgattccccattattgttgtttctttgcatttggttataaaatttaaattttattttattcaaattttatgaattgaattcacaccagggcggggggggggatcctcgggattttcatccccgtccccgtttctccatttttcatacccccggaaacggggattcccacactttatctccgccggggacacgaaaatttaaaaaagtctgacatatgagcaaacattggggtccccggtttagtcatctccgctctccccacaattattttcgtgcttttccactgccttttttctcattcttttcgtatgtgaaacatgaagagacaaaagtgtcgatgtcgtcgcacgaaaagcgaacgtacattctgaggaagaggcaattgcttctcacccattcgcttgggttggaaacgccaaaagaagtcgcgtatctgtgggcattcggtggatttacaagcatttatttatggtgattatgaagagggaataatatgcggcgaccttttcattttctgacaattttcgcgtgtcatttgcagcgaatccgccttctctggcggcgaattcgctctttgtgctaatgacttctttctgcctccgtattcagttggtcttgatgaatatttggtcattcc

SEQ ID NO: 3810 - DNA, 1309 bp, Heterodera glycines
  unsure (1)..(1309): unsure at all n locations
tttattanagggaaaaaagcaaaggggaaaaaaactaaaaaaataaaaatgcaaaaacatcgcttttcattaatctgtcacattgccctctctctttcaaacgtaagaaatgtaacaagcggctccttgggcagggaagtacccgtggacatgggctaaaacgggggggggggggaggaacaaaacaaatggcgagagagaaacaaactcacccaaaatttcgcatttgaattggaactcgcccagctggaagaggttgactgcccggcaattccgagttacacatgccgccttgcactcgtcgatgtccttcagtttaggcattcgaattaagcaaaagtgaaaactaggcccattaaactttacctggacctgattgatctcgtaaattttgcctcctcgacattccatgttctgcatcagatagtacggcttgtcattgacgtattgaatctgtggaagggctgaagcggggaaagtgccacgaaacggacgaaaagactcacaaacgcaacacgcggccaaaccagcgaagaccagcagacagaagagagggctccacattgtgttcaggaggaaggacgaataacgctttggaggaggacggagaaagaagcggaagacggaagaggcgaaaagcattccgatgggacaccttttatagcgaaagccaatcaaaggaacaaaagggcgagcgaatggccaaaacgggcgaaggaccaacggatgaatagcaaaaagggcggaacaaggcgagccgaagaaccgttcagttttaacaatgggcggggagggggcgacattctctcggctcaatcaatgcccattcaatggccaaagacggccctttatgacttggcatgtttgactttctgatcgctcactatcagtggaaaaagaaagagaaagaaaaaaggaccgacgagccaaacccacacaaaaggacggactttcattgccaatttcactgctaatcacgctactttagataaataaacttggataaatcacaattaacaacaaataaattattgtggcctggccatttcgattcaaaagaagagcaattgggggaaaaacactcccaggcgaattgagggggcggggggcaacaaaaggcgatgctcgggacagactggcggattttctacttgcggtgacgagatagagacggaggttgctgtgtttatgtcaaagttcgggatggatcgacacattcactcaaatggaaatgggaaaggttgggacggtggggggggggcgagggaagggtaaatggattccctccccctccctccccctcccctcc

SEQ ID NO: 3811 - DNA, 1465 bp, Heterodera glycines
accggacggctagcacagatccaactacgagctttttatccgcagcaataattctatgcattatgagagctggaattaccgcggctgctggcaccagacttgacctctcatagatactcgttaaagggtttaaattgtacccattccgatgaccggcctcataagagatcggtctcgttatttctcgtcactacctcctcgcgttgagagtgggtaatttgcgcgcctgctgccatccttagacgtagtgaccatttctcaggtcccttctccggagtcgaacccttatcctccgttacccgtcatcaccatggtagtcagatacattaccatatgaaagttgataaggcagacacttgaaagacacgtcgccggtacaagaccgtgcgatcagcttatttccctccctccccctccccttccccgtttccgattgctcaaatccataactgtcgatgaaaagaaagatagggcgagaatctcgatgtgcgttccatgtttcccttttacatgatcataaaagaaacatcggtcgacaatttgaatttgagaaggaatgggaaagaaagggaagggaagggatgagagaaggccaacggattcaaagccaaacaacggaacgacgattgagaccaaacaattgttaagggcacatcgtaaatcacaagcgccgagacaaatgttatgatcagtaaaacagatcagtgagtcatcatactgaaacatcaaaaatgaacaaaataatgtatttatttttttgacaagagttttttatactgatttggcttaattttgttagctttttgaatgaactaattttttgattttgcataggcccatattttgtgccctctatcgaattctattttgttttttgaaagtatattttctaactcgagatcagctcttgcgttttacaagggaacccaaaaaattttaagtttgcaaagttttggcgttctgaatacgaaataaataataaacatttgaatttaactcgcgtgtttaaacgcgttgcagcagacttttttttgatttttctagccacaaaaggaaacctgtaaaagttgttttgtgactttttggatctggggccgttaagtacatatttaccaaaaccatttcgatgttcatatactaaaatttctactaatcttatttttcgttaattgaggtgtttctgtcatgaagtcaacatccgaacttactgatgaggagttgaaagcggaactctcatcatttgggttcacagccggtccaataactgatacaactcgagggattttgcacaaaaaattgggttcctttcgcaacggttctggtgttctagcaaagacgaaagcatctggcaaaaaaacgaggactgaaactccgacgtcgcatgtcaaagagtaagcgccaatttaggcagtaacatacaaaaaaggccaggaatgcttctgattcccttcgacttcctgaaaat

SEQ ID NO: 3812 - DNA, 2154 bp, Heterodera glycines
  unsure (1)..(2154): unsure at all n locations
ggggtgaccggactagtaatcgtttttttttaaattttctattatctttaggctcgattcggtattcccgaagcagtttggggactgggcgaccggacactccgccgcttgatctcgctttcaaaggctatggctcgggcacggcaacctttgaaacaaactttggaagagatgaggaggaagaggatgacgatcacactgagtcttcgcgcattttgtctccggcgactcgttttgctcccacccatgggattggcccatacactaaaaaagcatcgcctgtggaaaatttcaaaaagatggcttggggtttcttctcgcgtccgcttggaacttctacgccctgttctgatgtgagtttgggttgttttttgtttcattgggttttcttttttagaccggcgacaaatacgttggctacgcttccagcaaatacaaacgccactcgccctctttcgaccaagcgactgttcgtttcttcgacaccaaaaagatttctccggacatttcgcgttggattgcccatgcaattgttgcgttttttgctctgctttttttcacttatattgcaaaagcgcactccgagaccgtctccagcggaatttcgcttactgctggttatttcaaaataattcttgcattgtttctgaccataattaaggttttgctgtgtccacctttcgatttctttacaactacgcatttattcccatcattggaatttgcatcggtacttccttttctcataatactgaagaactgttttccggcgcaaaagtttcaaattattctaatatagaaaagttaaatttgtgaaaaagcatagacatagcaaaacatcaactcgaacccataatcaacgaattttttatcctaaaaataaaaagaatttgtttttttttgtttttgccataaaataggttcttcagtattaccctttttcttacaattgtttcattttccattttcagttggacttttcatttttggcatttacaaattggcttcgttccgtaattatcgaaaggttgaagagaacagaaagcttattctgttggtcgaacgtatcactgacatcatttacgagtcgggcacttccggcgttgctgagccgcacgtgcgcgatatgattatgccgcctacgaagtaaggaaggagttcgagatttacaagtcttaactgaaatcactacgacccgttcaaacaatcattcgtgttttaaggcgttcggaagaggaagccaagcgatggaaggaggcggcccgtttcatcaacaacgaggactcgcgcattcggaccgaaattcgtttgataaatgggaccgagtgcaacgtgtggatttgggtcggggcaggaaaagaacgctggcagggaaccggtaattgaaaacatagggagaagaacggaaaaagccggccgcaacaaaccaaaagataatccaattcaatgttatgtcttttttgatgctaacgatactcatttgccttcctttatttgtttggttttttaaggcacgtagccgttaaatccaatgctttttaagctaattgtaagtttcaaatacttgctgccggctacgagccttaaacattatgattgttttgctttgaatgttccgtttattgtcgagaaataaatttcaaaaaaaaaacattttaaacttcagcccttctcgaggggtcgcctatggctcgggtacccgaacaagcattgacgcgctgtttgaagttacgcggagttaatttttccccgaagtgagataataaattagattttaaacgaaaaaccaatcatagcatcgttgagagagactccattcgaaatgaacttctggctaaaatgcgaccgattgttccgcggcacatcggatttgttagtggcgcggaaagtgttgtgtacattaaattaaaagtgagtggaaattacagcggagaaaacacacggttcaaaaaacgactcaataggtggatttacgacaaaaaaatattttttttagggggggggggggggggggggaaaaaacttttggggagttataccaataactatattattatcacaactttttctgtcctacagactttgttcaaatttgcaaatcaaacccacacaaccctcagattgcttntttatgtgaaaaaccaaaattttttt

SEQ ID NO: 3813 - DNA, 717 bp, Heterodera glycines
aatttctccgcgagaatgtttacgaccaaagccgtccaccccgtaaatggtcgtgtgcccataccttcaccagtccggtcattgtaatctgcaagaattcgtataattgtataaatatctcaattaaattcttactctcccaaaaaaagccagttcgtctaaattgattggcaatattctgaacaacattggcccgcagctgctgaaacaattcagaactcagtttagcgaattggccaccggaaatggcataatgtcgaagagaatcaagcgcgagaaaattaatctaaattcggggtttaaattggtcgaaattggtcagaatcgaattttccgacccttagttataaaaaatgtagccctagttttctgactattcgagagaataacgaatacgtttatccaaattggtcctcgccaatacggagggtcatgctcggtattacgggccaaatagtagggtgatttcgtcgcaatccggatgattcctgggataaaattgaggaagaaaggcagcgatataacgaattgttgaagttgatagagacaaagtcaagcgagcgtgataatgagaccgacacacataggaagagaaaaatagaagaggaaattgctcctcttcaaaatcgatcattaggtaagaaggcacggatagatgaattagaagagcaaccgtgaaggcgtgacgagggaaaggaagaaaaagaggagagaact

SEQ ID NO: 3814 - DNA, 1710 bp, Heterodera glycines
atataatttatttctttttctctccattttccacactatttctctaatttctcaatctttgcttgcagccattcaaaagaatatactttatttctttttctctcctttttccacactatttctctaatttctcaatctttgcttttttgtttccttttctcgtttcctttctttctttgacagaggaaacaaagacgcacgcattcgtcgaaacaaagggaatggaatataagttctttcttttcctctcatggttccacactatttcttaaatttccctttcttttcttttcctctcacctttcctctcttttctttggtctgtactattttctttttcctctcatttgctttctctgccatttgtgtaacaaaataacacattcatttttttttctctttttctcatattatttctctatcttccttttctttcctctctcatttcctctctttctttgtgcatatgctttctctgccatatttttttctctcttctcacaatatttctctctctatcttttcttttctttcctctcccatttcctctctttctttgtgcatttgctttctctgccatatttttttctctcttctcacaatatttctcaaatttctctctctatcttttcttttctttcctctattttctttgttctgtactattttttctctctcttcccatttgctttctctgccattttgtctgctatggtgttttgtattagcaagcagcaaaaattcatttgtttccttccttacatatttattagagcaattgaattttatcaataaactgctaattgttcactaatacgcaccatttaaaaaaaattaaaatattttttcaattattttcttggcaaataaaccccaaacaaaatcacctcattttaattccattagcagcattccaattaaaaatataattattttcgttatttttacacaaataacaaataaatattcatcatggcaacaccaaaagtaaaatgggcaaaaaataaaattaaaaatttaaaaaaagtatttattttattaaagttgtacaaattccatgtcgaaatgacctgcgaaggctgctcaaatgcagtgaaacgtgtacttggcaaattggaaggtcaaaaaaaataaaataaaaattttgtttctcaaaacctcggcaaaaaacaacaacaacaactttgtctttgattaaatctacaagcattgagatggcacagaatttcgacatttttggggtccgaattattccgattcccgaaatttaaaaaaaggtgaaatcttcggaataacttttttttttgccaattcaattgggcatcttggccgggcattttaatttctaaaataacaaaaaattagttttcctaaaataataataaaattgtttttgaagacaaggtaaagctgctcagtgtggacctgaacgccaaagaggtgcaggtggagagcagcagtatgggccaagatgaggtgctctctctttttttgggggggggggggggatttatgcaatatgtgtgttcgatatattcaaaatattaggcagaaacttcttggtctcgtggtatttggtggagaaatgctatgtgaattgtataagaattattactttttttcgaaaaaattttccaaaaaatcggaatatgtggaatcgcattttctaaatgctaggttatatcaaaaggatttttttccattttaaga

SEQ ID NO: 3815 - DNA, 2753 bp, Heterodera glycines
  unsure (1)..(2753): unsure at all n locations
aaaataaatccaccccccccccctaattcgagtttcaaaaaaacacccctaaaatcgaatttttgacttcagccccccatgaagccgcgctacaaagaaagagctatttaaaagcaaaaaatgtaaaagattgtcaatttattaaaacaatataaaattatcaaaaaaaaatttagcgaaaattgttgaaattattaaaaaaaatccagaaattttggactcagaacattcaaactgtaaaattcccggtttttctcgcggtcccgatcccagtcccggacgaaaatccacgtcccggtcccggtcccgacttttctggtcccagtcccggtttttgtcaaaattcccgttcccgtacaactctacccctaagaattgaaaaaatttctcaaaaattgatcgccaaaattaatcttttctgatatccaagtgatccacaattgccattgtgtatcccgtgcttttcatattttcgaaaaacgttcaccttgtttatatccgagcttttcaaaaatctcaatgtggtccttggactgcgcagtgactgggattagtccatttctgtaatatctacaataagcttttatagtgactgttgttccatcggcttctagcaaaatctccgcgctgatgatgatgatgatgatgatgacgagactggtggtggtgggcagcatttttggagtaaaatgggaaattttttggggatttagattttgtgaattttccttgacattcattcgacttttataatgatagcacacgcacgccaaagcgcatagcagcatatgccaacaatgcaatacgtatgcttaagccagatttcatcttgcgccagaattccagcaaagaaataaaaatctgcaaaagagaattaaccgatttcaaaaatttttctggtttagaaaataaaataaatataaaaattattgaaaaggcatttatatttttccaactgctgaaacgcagtatttgaaagaattttggcaaggaaataacagaatttttgaataaaaataatttcttttcgaaagagcagtttgggttcttaaaaaacagatccacngacaaccctaactattaattacagacattaaatgatttttacgaagctatacaaaatcaaaaagaggttgatgtcatttatattgatttttccaaagcattcgattctgtttctattgatttgttacttgcaaaaattaaaaatgctggaatagttgggaaaattttgatgtttttacgtaatttcttgttacaaagaagttttagggtaaaaattgaagaccgattactctgaaagctataatacttttacgggggtaccacgagggagcgttttgggtccgattattattcctaatatttatcaacgatttaccggtaaatatacctaaaaatgtaaaaattaaaatgtatgcggacgatgttaaattgtatattttccatcaaaatgattcaaatacaaatgatctatctgaagctataaaaattcttgaaaaatggtccaaatctaacggccttgaaatatcggtcgaaaagagtcaaacattgtatattggcaaaaataattcaaaaaaagagtattttctcaatggaaaaattattccaagcttagaaaaagtcaaagatttaggagtaataattgactctaaattatcttttgctgatcatataaataaaataataaaaaatgcttacttaaaggcataccatattttgagaataatgaagactagagagctaaaaactattataagaatgtataagacttatgtcagacctcaattagaatatgctgttgaaatttggaaccctaacttaaaaaaagatatagaaagaatagaaaaagtccagaaatttttcacgagaaaagcctttaaaaaatgcggacttttacatagatcatattcagaaagacttgaaatttgtcagcttatagaattagccaagcgaagaaatattgctgacttaactaccgcttttaaaattatgaagggttttacgagtcttgatgctagtaaactttttactttttctgatcgacccactcgtaggccattacttttgagaatgcggcgcacaaccacaaaaagtaagaataatttttttaaccgtatagccaagaattggaacaaattaccaattgttccaattcaggcagataaggcaaatcaattcagggcattgctaaaagctatgtatgagttctaagggatttcattgacatttgcattgacattatttattcattatttcattttattttattttactttacatttcatattgttgtatttttttttgacattatttattttgattttttttatgcgccacataagagcactaatgtgcctgtggtttgctcaataaatatatatataaacaatttttctgcagctttgtctcgttgagaaatgaataagaagcactttttttgcctaacaaaatgttggctttcaaaaacggcgcaatgcccaaaatccgtgacccttacatcttaaataagagattgttaaaaaataagaacaatttcattctttcgagaggatttttgtaaaataaataaaacctaaacgaatttttttgctacatttattgttttttgtttttgcctttttgagttgaattttataaaattttaaggaaatttgggtataggttggaaaattttggttttgtgttatgaaaaaaaaatttcttttcctcaaatacaatatacagataaaaatgaagcgaaaaaaaccaat

SEQ ID NO: 3816 - DNA, 1979 bp, Heterodera glycines
  unsure (1)..(1979): unsure at all n locations
gcttctcgacacaggaaaaattgacgaaatgaagcgggtcagtttggtcaaaatttgattcgagataaaattccatttttaaggaccgtgaagaacaacaagaagaaatcggaggcaaggagagcgacggagaaagcaatggagaagaagaacaattcgattttgaataaaaacagttggatgaaaggtttttctttgtttttacagaaaataaaattaaaaaaaaattcttggcttctttaaaagttgttttatcatttcacatatatttatttgctttaaaaacctcaaaatacagctataacatgcattggattcgaacctgagaccccccttttggtgactaaaaaacatgctggcgcccaaacacgcgcgcccaaacacgtggctcccctgattggactcacatttccgtttaaattaaaagtgaaaaataatgttggcatagtgttttacccgaaaatgtgcaatttcgcagtttttatacacataccaatagagcccggaattttgaaatggccgggaccgggatcgggaccgggacttggaaaatggaccgggacgggatcccgggaccgggagtcccgtttttccggaactcccggtcccggtggtttgaccaaaaaacccgggaccgggagtccaggcaaaatcccggcgggatcccggtcccgtccgggctctagaaaaaatatcatgacccataattcagcactgttatgtttgtatttgattttcggagtttcggcatgctgttctgttttattattgctcatgccgccgccgccgttttgcttccgctttaatacggcatttttcgcaacatggttgttttagccgcttctcaggcctttggtgacacttcactgagttggttcgattcgttggtggaccgtttattgcgtataaatcttcaaaaaggaattttaaaaatttgaaaaacaaaaatttcagaaaaccaagcaactccaaccgaatttgttgccaaactttttgctggaattactgaccgattcattgaatcggcggctggtcagtcggccaatttgccacatttttttgccgtttttaattatttttttcagctcgtttgccgttgcttggccgtcaatgtaccgacaattatggttcgtaagaaccaagatttttgtttgagcctctgggtcgggaatggaaccatggtcgaatttgctggatcaaaatttaatccaccccattttctgggtccgcttttcctaataaaaagtggataatgatggggttcatacaaattccggtttgaccattgccctgtccgaactcgggataaacacaaaattttgcaagcaaatgcgtgtcagcataggcttctgttattttttttattagatccggtcctctgtgtttcgaaccccactaattttttcgtaaaaattgccgaatttcgggaacttttttatggggtttactgttggtcccttttccggctttttttctaataaacaatggaccaaaatcaaaaaatgcctcccctccaggagaataccacgccacattctctccttttcaactgtcactacagtttttgcatgccatggcatttcgtgccggtgcaggcaccggtcgggaattggcacaacgaccggaccaatacttggacatcttggtaagtttttggagttacatacctgttttacaatggcattttttaagcggtaaaatttcagacaaattttgactgttgttggtcaacgcctgacgaagtgcacgcaattgctgaacaattagacgaatttgtgcaccacgaaattcggttagttttcattttctgaatttttcaaaaatattattttcggcaccgtttaaattagcggaatgccgttaacggacatggcttattgtcggaaacccattccataaggctgttcaagtcggtccgctnnaatgccgtgccgaaatatggaaatccgccgccaaataaaacggagcaaaacttgggt

SEQ ID NO: 3817 - DNA, 5633 bp, Heterodera glycines
  unsure (1)..(5633): unsure at all n locations
ccgggccgggatatcgggcctgccggtcccagtggtttgtccaaaaaagccgggaccgggagtcccggcaaaatcccggcgggatcccggtcccgtccgggctctacataccaatctcaaaaaataataaacaaatccatattgtcccttcatccaaaccctaaaattgtccctgaaattcaattgctatgaaatacttgccgcccgaacttttgagtgaaattaccctttacatattgtacccaaacaaaaattttccgaacattttttcttcttcctggatactcagggaatttctgattccccatgtcactaaacgcaaggaaatattaaaaaaagtgtgttacatattagaaatagaaaagggttttggtcattttctgacccattatattcgttttattcagctccgaactggtctccaacgcatctttaatcaggcagtacatgagccaatttggatctgtttcgcaacatcatcagggccagaaaaacagacaatagacgacttcctgttttatctcgaagaatacctcgtaagtattgattggtacattttaccaaatgtttaacatattttcaacaaaattcagaattttcccatttcaaatccaccgagtgatgaggaagccaaggtcaattatgagtgtaaaaataatatataaatgtttcataaaattgatttaagcaaatgttcaaccggtcccgagaagtgtacaagtacttcgttcgttgttcaaagactactgcatggtcccttatcaaagtttctcgcactgttcagcaatttcttgatgagctcagctcattcttcactttggtatgcgcattatttgacccgattattctttgcattctccaactaatttataggtctttgatttatcacctgaacattcgcaacaccagcagcaaagtgaccacgaggtttacgcaaattttgaagccacctattcttctccacttttgctaaattgtgtttactttagacggtgtcaactgatcagacgaattcggccacatctgaccctcgtcctctgcccgttgtcaccgagtcggtgccggtgagtcaatagcagttactgaaaaaatgtaaaaccctaacaattttaggaagaatcgacttacgatccgccctgggacgaccgccctctgcgtttcatcgaaaccatggctgcttttgaagcgcaccgatcaacaaatgtaattgatatctctactatctttaattgctttttaaatgttctcaattagtagcaaatttatttttctttgcatttttgataaattgtgtttactttaggtagtgcccactgttccgtcaacatcggctgcggcccctcgtcctctgcccgttgtcactgagtcggtgccggtgagtcaacagcagtttcctcaattacttgcaaaattttagaaaaattttcaaattttgaaaacagcctttgtaaagtgtaaaaatgtttatctgttgaacaatggataatttgaatttgttttggacccgggcccagccattttatggccgtcttgtttttaataaatcacagtgtaatttttaatatttcttttcgactttattaaaatcgctcattttattttagacatcagaaattcctgccctgtttgcggagtttttgcgcaccaactgtgttggacatgtgcccaaagaggttcttgtcgcttacctggaggaggccatcaaaattttgaattgtggcggcggacaaagcgccaacactcccaaaatctcaaagttccgcaaggtattgtttcattcattacaaaataatcgaacaagacgggcccagtggggttttaccgggtcgccgggtatcactttcttggaccaaccaccgggaagggccatccgataaaaccatgtttttttttttgaccgggcggcccggccccagtcaatcgtctaatccgggtgctttcaaaatatcggttccacgtaaataaagaaataatggataagttaattttttcgggtgtgtggcaaaatcaaataaaaatttctttagttccttggaacgttgaagaagaacaaatgaatggacaccagcaacgccatccaatttctcgccgtacacaaataccaatacaaacataacactcacattcaatgccactttttttgttttatttttcgacatttgtctcatggtttttttcattaacattatttccttttctagtttattttttgcttgctttttccaagataaaggaaaatttctctttgtgcaaacttcttacacaatgttttatgtgttgaattggtcggtaaaatttagcaaattttttgcgattgcagatccagcgcataaaatccaaatccatccaatcccccttcggtaaagtatccgttaattgatttttcattttgatccatttcagtgaaatgacaaaacagaggacccgaattttataatattttctaaagaaaccaaattttaccggtggtgtcaactgctgtcagatgaacaaaaatatgtacatattcgtagcgtgaaaatttacaaatttatgatgcaaattttgttaacaaatcaggctaaccaaatcccatttcaatttgatttacaaaaatggttcgaaatcgcccatttttggactgaataattcatacaaatgctcaaagctataaaactcgtaaagaaacttttttttaatactgtttcgacaaagacagacaataacatgacaaatacacagcatatataacattgatcattccatccgatttactcataataaagacacatcagtggcgtgcctagctgctttcgctgtcgtcgtcggtaccagtcttctcattattcttgtcaaagattttcgaatccacttggccaggcgtcgcataattaggatcagttgctgaaaagaaaaagaattattanataaatccaacgaatttatccatcattttttacttgtcgcataaccccgtccccctcctttcgcctgctgtttgattggcgctgtttttgttggtgcattattcttcacanaaatgtccgggtcaagcttggccagcgtcggataattgggattgcgcgctgaaaaagagataaagcatttgaattgaacattctctgatcaaaaaatggttttactcgaaacgaatatcatctgtccttcctttgtctgctgctgtttttgttgtggcggttttgttggcgcatttttctcaaaaatgttcgggtccaattggccaagagttgcgtaattgggatcctgcgctaaaaaatgatcaggggaatcatttttgttgcagtgttaatgatgtcatgtccaacacactcactcgaaacgaaacgaggcccaccaggagcagcagcaacagtttgtggaggagatggctttggtggagctggtggaggcattcgcttggcatctgaaaatggggaaaaagttggcccacagaaagttgcgccattccccttttttctgcccaccactgccacacctttcgcctgttgttccttcgcgaaaatctccgtgtccaaattgacaagcgtcccgtaattaggatggatagctaaaatggggaaaacaattatcatccgtcaaatcattggttgttgtttgttacgtgatacgagttctctctgatttgcatcggcatgtggtctttgcactttgggcacgtttttcggagtccttatcaataattatatttgatgttgtaacgcatatgctatgtacacatgtaaatgatggaataaaacccgtaaacaaaattgagaaccattttttcaacacctattcgaaaatatgatgtccttaagttaccgaaaacccatatgcagttttttgcaattcttagtagtactcggggagatggtatgggatacgaatcggtgggattttaacatataggatgcttgaaaataattgagggcaacgtattgaattgttttctcaaaaattcgcacattgttcgcagccttagatttgtgtacacataagcaatttcaaatggtccacatatcgcaccaaaaatttcatgtcaactgatcaactctttataaccaaaaaatcaacaaaaaaaatctccagaaatcaaagatcaagcattcccgaagttcttattggggagcaggggcacctcctccacgtccgaagccctgacgatgactaatcggagcagcaccaggcccagcctccgcttgtttatctgcggcagcgcgataacccccacgatcggtgtcggcgcgaatcggacctgataaaaggctagagaatttaaaaaaacattcaaatttgtgtctagaaaaacattgattcaattaaataccgaagattcaatatagtttaatactcaaaactctatttcgcaaaataaataaaggacattgtgattaattttttttaaattgcttataacctcggcctcctttgtctgcaaaagccttttgaatagcgtcggtcctttgcttgtgcgtgttcggcaacacatcgtcaggaagtccaaggtaagcacgcaaatggacaatcccttcgggttgaaggtagaaataatagtggtgccaggcatactgctccttgacaagtccacgagatgcaagactcttaagcgagaaacagtgaaatgagtcattgaatgtaaattaagcctcggatttcaagatgcatattaaataattagtgaagaaaaaaccttcaatgccttgatgacgtaaaggttcttcactcccttaatttcgggatgcgacttcaagcagtagtccttcttcgcgatgcaaactccatcctcaaacaaatgctcgtaaattttcttccgatcaccttgtggcataagcattttgaatacgctttacactttgatgttaatacagtagctaaacaaattagtaaaagtgtaaatgttttaggttaaattttaaaatgtctttgaaagatccataagtcttaatatgaattatcattattaatgtttagctaacggtaatggataaaggccaaggaacgtgcattactttacaaaagctttggcacaggcacaagcacaagtactctccttttatcccactgacttttttacgttttattttggtataaaattaattggcataatgtttttgtcttttaaaaagtttaaaaaaacaagaattataaatagagctcggattttgaggcatatgccttttttttctgcgcactagtttcgatatattaagcataaaaaacgcattttccacttggtttgaggcttctacgttgacttttattatgcctttttttggtacttatacagtttgacccacataaaattttttgcttttaatgataaaaagtgtttccaggggttttcggggccgctgatcatgaatatgaactctatttgacgaatttccggacccctaacccggaattcaaacattcttgaaaaaaaaaatttcagaccaagcattaatgccaattttatttgttttttgatgaattacgtggcatcagtgcttggtctgaatcaatatattatgagcatcacaccggagaatcatggagcacatattttggtacatttaaaaccatttttggaaaaaaaaattttcaaaaaactttcgtatttcgggttagggtttcggaaattcgtcaaatagagtttatattcatgatcagca

SEQ ID NO: 3818 - DNA, 1173 bp, Heterodera glycines
ggcgggtgtgacattcgccatgcaatggcaaaaacagtgcaaatgcagcagtgggggggggaaggataaaaatggaaatgcggggggggggggaggaaaagcgaaggaatgtgagcaaggggatcaatgaccagaaaaagcagggaaaagaatggataaaagcgcatttcgtaaacccggtctcgagtcgcggaaccctgactcgaacatcacgaaaaagtgagcgatttaaaatgaattacaataagcaccatcgcaggcattccaggaggcactaatcgctttctcggaaagcggcttatctcatgacaaggcaaggaaggcactttaaaatgctttttggtataatcgggacgcgaaaaattttcgtgctcgcggggcaaattaaaaacattgcagcgtggttcgcagcaaaggcaccgacggacggacggacaaacggtggtcggcacatttccgtcatcaaacgggggggggggggggggaagccccggcggagcgcattttgagcaattttatgctaatcttctgttgacagattaacacgctagtatggccaaacaacaaaaaaagagattttaccggagatttatgaagccgaaaatgttgtcattccctctccaatggcattggcattttcgaaaaagtttttaaatttaattttatctaaaagtaccgcccataaattgtatgataattcgtaactttgatgctgttaactcattccgatcatcaaaatgactcaattctcgccccggggcggcttttaagccttttccgtttgtcagccatgcccaagcggaaattggcgaccaaaagcggggctggtggatgctcccggcgtgcccttcctcctctgccgccccgcccctttaaaacagtgaattccccaaattccttacacgcctttcaaagtttcgagggcttctccccacgaggaattggcgttgtgtgctcccgagacaaatcttcacgcctttcacaatggaattcagtcaccaaaatttttgcaaaactccgatcggaccgacgaaaattggaaatgatttgtgagtggttcgacggaaggggcggggggggggggggaagagaagggaagagagggaggaaatttgaggatttttgcaggcagcagcaaatcggcgtgaaaatggggggggggggagggggggg

SEQ ID NO: 3819 - DNA, 3331 bp, Heterodera glycines
cgaaaattggtttgaatcgtgaagtttatcatttctaactcacttctcaaaatcgttgataaattgcaaatatatttttgcaaaagtctgtggacactttctgaaaataaattctatactcatgtattttccacttattagattttgcaggcttattgctgcatgttctttgacacttcttcaaaatatcctatgccctttattcgttcaaaacagcatctttgttgtttcgctttggattgacaagcccgatgataaatagctcgagcgcaaaacgcgtgcatgtttggaaagtatcgttcataccaataattgagggtttatttttaaatgaaattttatgataaaccttattatctcagaagctatttaattgattcgaatgtttttatcccggttaattagagcaacgaaaattggtttgaatcgaaaagtttatcatttctaactcatttctcaaaattgttgataaattgcaaatatatttttccaaaagtctgttgacactttctgaaaataaattctatactcatgtattttccacttattagattttgcaggcttattgctgcatgttctttgacacttcttcaaaataacctatgccctttattcgttcaaaacagcatctttgttgtttcgcgtttggattgacaagcccggggggggtggcataatgaataggcggaaagatgacactgatttgaaatgattgggggggggagcaaaacggcgccgcaatttcaaaaagcgacggattaaattgcggcacaactcacaaaggacagccaaaaaaacacgacgaaagcggcaatttcggttacaaaaacagtggcgcttgcattggccttttgctctcgattctcgcgcattggagggacaaaaacaaagagacagtcggagtcagtcacttagccccatttagcctaattagagggatgtaagcggcagcggatgaaaagagggaaaacaactaatgaccactaatgagtggatgatggatgactcatccatccatcacgggccaatcagcagcagtgtgtgtgtgcccacaaacggcttttcattcctcacattttgctgcaatgattgcccggagggggatgaccgacccgttgctcattgtcagatgcaatgccgcaggggtgcaaagtcagcaggtaaatatgtaacaaatccggggggaggggactttgtgatcagtgcgtcattcattgcgtaatatgcgtccaatggatgatgatgattcattcacccttttcccacattccgccgacgtgtgaatgaaatatgtgagcaattttcgccaaaaggtagggaaatcggcgtttgctgattgttccgttatttatgtattgtggcggcgtcggaatgttccggaataattttgcaagaaaacattaaaagaaagggcaacaaaatgattcctctttttagtgttaattttatttgctaaatgaaaagtgcagggccaaaaatggaaacaaatgcaaaatgcagccgaaaaaagagggaggggctgcgcactcatttgtcagccaaatcgttgtaaaaaaagtgtcctatacttaatttcatacaaaagtacagaaatagttttttttgtcgataattgaccccaaattgctcatgctcattagtagggaatagaatttagctttatcgagttttttcttctaaagtgatttttaataccatatttagccatttttgaagggctttactttatattaacaaatttaaagaaattttgggaaattataccctcaatttgaaaaatttatgtccatatttttgccattttatgtccatattttacgatttttggtccatattttatggccatatttcgcaattttatatccatataattacactccctactcattagtgctctatttgctcgaaattgatgcattaccagttataaaaaaaattagcgcaaataaaaaaatattttaaaacaaagcaattattgcaattaacaatacagagtcagagaatggcaaatgggctatacaataagtaaagcgaacagcagaaaataactttaatatcgtaatgggaaagtacaaaacattaaaaaaataaaacgaaaacagaaatattttgcacgtttaaaaacagaaaagatattggttactggtaatgtaattttggagatttactgtgatatttgttactgtttgatatctgcagaatggtgagggaacaaacactaacttaagtgagaaaagtgattgtaatgatgaaaagcaatagatgatgaagctgaagcgaaaggcataaattttggcacaaagcgaaggttttttgatgagaggcaattaattaattaactaattaataaatggatacgacataaatgatgaggatggaagaatgtcggccatttgtgggcaatgtatgaaagaatgggaaatagcgagaaaatagtggaaaagaggagcaaaaacggcggatatagacaacagaagtgtttaaagtaaaggaaatgttgtaataatatgcacttgaaagaatgcaacaaaaagtacataagcgaaacaaaaatggaaaaacggaaatggatggcatccgaccatcgtttcccgtttaatttttaactaaaaatcattccaacaaacaattttggattaaacaatatgggatcagaaaacgatgagtcaatggacccaaaaaaaagaaaacaaaaatattattttaagatgccgacgcattgtcgccaccggtgaagtcgtgctgaagctgttggagagtttcaatctgaaaaccgaagattttaaaaggggggagttggagagactttaaagaagctgattgtgagagcaattcgaactttaggttttaagaaatactcagtactaatttaaaacattaaatccgctttaggccgccgcagtttttcaaaattctacaaaatggcatttaaaaatgcagtttcctccaataacttgggcttaagttccctccgcccttttccccatttttcaaatgcaaaaaaaaacgtggcgacgagcgacagacaaacgttgaaaaaagaaatttaaaaagattgcacaaaaagccgtcaacaactgctggccaaacttttattttttaaatgtgcattatccacccaaattaatgtaatatttgtacaaatttattaattattttaccatcacacggaagcaacgtacaggtgcaaaaaacatcaattagtcccaaaaaattatccgacgaaaccttttaaaataaaagtgcagcaagaagaaaatcaaattgacattaattgcgtagtttgaaaaaatggtttacgcttcagtaacaccttgcgtcaacctcgtga

SEQ ID NO: 3820 - DNA, 1373 bp, Heterodera glycines
gcaaaaaattacgacgagaatgagctaccttgacttcactttcgtcattttcgatgatggcattattggaaacacttccggcatttgaggggttgacacgaacactcgcgtattgggaggaggaagaagaacatccgtaaggcgtcgctatggcattagatgacgacacagccaaattcacacggggctgaaccatcgcacggccaaccggcactttggcaccgttgttgttgtaggcaaacttatggactgtggagaagatgaagatgattagtgaatgtttgacaattgctcaaaaacaaagaagagtaaagtaagagaatccttcaaaatccaaataatattttttaagaaaaaaaggcgattctggcttttcccacgctcattatcagtttacggtcctggctgacaataattaccggaagttggtgttgttttttgcgcttgcgattgccctgtggcacttcttatggtggacggtgatggactggcgcctccggcaacgccgccaccgcctccgacataaacaatgggtcgaacaatgtgtgccatcctttgctgttggtggtgctgatgcttagctgctttttgttgttggtgttctcctgctgatgtaactccgtgctccgctgcgtcacaattcccgcctttgccgtcgtccccatccgccgtcgtcccattcacaaaggaaagcattgcagcgccgcctgctgcattggctcgtccgccaacggtttggtagccgttactgtcatttctgttgtactgctgcacatttgctgctgctgttgttatgcctctgttggcagccgtcaacgatggcggaggtggaagcggtggcgtgccgccagcccctgaggcagaaacagtgccggaaaactgatgccgctgttggagattgtgtggcgaatcatgcggtggtccaacaacaccattggacactgctgacccactgacggtaaagtccattttggcaatgggctaaacaaatacataacgatgcggtaaattgaatattcagacattatatttttgcaaaaaaccggacagtcgacctgtctgtccactcgcgtgtacaccacgtgcgcattacgtggtgtcagtggcgtgccacccaaatgttgttgctgtccgacctgctgctgctggtgttgttgttgctgatgaatgtgcaatggttgaggcaccgaattcatttccaaactggcagacgaattgtaaaggtgataacggtttgactgtccgcgggggagtgtttcgaccgaatccactgaatttggtcaacaatcatatttattatacattaaatatttaatgtttcattgtttataagtgatgtaaatatttttaacacgcgtaaaatgggttagaaa

SEQ ID NO: 3821 - DNA, 3006 bp, Heterodera glycines
ggttagaaaatgttagaatgttatgaaaaatgaagggccaacaaaaaaaaaaaataaacacgcttaaaatcgcggatgagtttaagaacaacaaccaaatatgcaaccaacgcagaactgaagaacaacgctcgcattaacactccaatggcacatacacttactagccaaatcaacgactgatggcggtggcacattttttgatccatcgtcgcatccgttcagcttttcatcggcggcatttctctgctgctttttcattgttgtgttagcattttcaatctccgtttccttctgctgccgattctccgtgtccgcattggcatatttataatcttcatcaacgtcatcgaccagcgaattgtcaatgaacgaaatccctttgtcgtctttacttccgttccattggcgttttgtttttttgctccatttgttgtagccgccgttgtcgtcatcgtccgacgagacaatgaccaatttggaagcaaaatttacgcttttcgtgggtgctgcttgctttcgtgtcaccgctgttgttgcttcataatgagcggttgttttccgctttgcttgtttgacttgtaacggcatcgatggaaggccaatgccaacacggaaacgttgcagtggcagaacggtttcgtgtttttcgtcaagttcgttcaaaagggccgcagttcgctcaatagaattaggcccatttgtttgccgaagtgtatggccaagacgaggagaaatgctcaaatccaatgcgttcaacgagctaaggtgtccacaacaatgtgttcgaataccggccactccttgctggcatggaaaacgagtgccatacggagagtcacttcgccgtccaaatttcgtttcggcaatattttgcgttcctcccctaataccaaaatggtcatgcttgccaaaagcatggcaattgtgttgccaatgttgattcggttgtggacttttgttgttggtggcaaatggtggcgacatcgtggtcgaattggacggacaaatgtgtggcggcaaggaattgcggtgcaatttgcgacttttgttgctactttttggcgagtcgccgacggtcgtcatcgaatggaatgactccattagggagccgcccccataaaattcacctcctccgacagagatgcctttctctctgtcttcagtcctccctgatatgcaattataatatcacaaacagccaattttaatcgatttcccagaatatttgtaatgattaaatacttcaccaaggggcaacatgtcaacaattcgaggacaaagaaaaagatactcattagaagagaaaagacgaaatgattacttcaaaataattaatgaataagtcatgaccctaaactaccatggcgttgcgtcgccgcatggtacgcattttgctggtagtgttttggcgtcgtacattccatttgggcagactgaaagttaggcccaccagctgcatttgccggcgcaaagaaggccctctgttgtccgtcaattagaagaatgcccgtctcatcatcaacggacgatccatagccctttaaaatgtttagaaaaatgaagctaatggaccaaaaaatttggcaaaaaaatatactcacgtcaacattggacgcattgacaatggtggcaaaacgtgcgccgccagggtttgctgccgaatttcgctgctgatggaccagccaaagatcgtcgtccaactcggcaacggcggacggagtggagacggacattttgcggccggggatgtaagcctgttggtggtgtttggaccgtttgttacgctgctcttttttgcttctctgctgcggtcgattggccgctgcagcggtggaagaagcgctatttttgttatgatagaaacaaagtgagcacagagcaatgaataacagcagcacaacgacggcaacaacaatgccaatgagcacgaagaccaagttggacctgtgtaagcagcgcaaatgagaaattgtatgcatttgagcaatgcttgaccacctcaatccacttaaaaattggcccattaaaatctcaaatgcttccgaattgcttccggcattgacggaatttctcggtccattcgatgtcggattggaagtgaaagtgtccgcggtggtgacgctggtcacaggcgtaaacggaccgtaacccttcacattgcgggcttgcagcttgaaatggtaggtgaggcggggccgaagattgcgcagttcaatcgaaagtcgatcgcccttcacactttccatactccaatccctgtcaggcaaatgtggccgatccgaaaagagcataatgtattctgaaaagcaataaaaatttgtacaaatgttatgtttccggatttaaggcttttaagccatttcaaatacagtttaaaagaggaatttattataaggaaaatcactaacaaaatcattacgtaataaaactaaaaagattaaaaatttgaatgttgcaaaaacagcacaaacaataaaggaccttgaatttctccatttgcatattttggcggttgccatgtaagcgttatcgtgccgggatcagcattctcgtgttggttgttgaactggggaccaatgacggttaaatcacgtggtggcgaggagggcggtgccggatgggttcggttgagcgcgttcaaactccaatgagaagattggaccagtcggacagcaaattcgtacaaagtgtccggcctcagtccatcgaagatatgctcagtttctgtgatgttcagctgcttatgttgagactcatctgaattgctaaaaaaacaccaaattaataataataaaaaatgcaattagccgtaccttattccgtatttgatggtgtacatttggttaaatgcattctcatttgggtcagcccatgaaagtcgaatttgtgaggacgaaactgtctccgcaactacgccaactggagccgataaaccgttggaattgcttggcggctgttgttgttgtccaccaaatccggcaaaagtggactttggatcagaga

SEQ ID NO: 3822 - DNA, 5489 bp, Heterodera glycines
tttgaattttgattgatagattgctataaataataactttaaaaaataattcgatcaaaactgcgtaattgattaaaactaaatagaattttattgaaataataaacaaaaattacttcatattatcctcccagtcaattgaaaagttcgagtaagacagatcaaaaattaaagaaaataaaataaattattaaatcattaaacataaattaaataatgaaaggagtaaaaacaagtaaaaataattctttaataaattaaattttaattgttaaattataattgataatgatgagaaaatgttttaatcttcaaaatgtgcttaataaaataaaccgacaatataaaataaggtagaaaaaatattaataaaatgaaaacattttaaaagaaaacgaaaaattatggtgcaatttaataaacggtttattctatcattgctcaaaaagaaattgaaaattgaaaaaaattttggaaaaataaaaaatgaaaaaattaaaataaaacatccaaattatataaataaattcacaaacatagaatctgaatattttaataaaatggaaaataatttttaaattaaaactcttaaaaagaattgaaaattatttaaaacgtaaagaaagtaagctaattttttcaaaaactcttacattcattttatggacttttgtgttgcagtacattttaaaactttaaaataatcaaaatataatgacaataaaataataatctatattattaaaagttgaaataattttaattataacagcaataaaaatttctgcctattaattaaacaattaattttctttaattatataaatagattaaaaattttaaaattaattaaacgaaattcataaaaacaaaaaataatattcagaaatgattaaatattatgaaactaaaatatccatagatagcatgatcatcgtcgtcgaatcgctatcgtcaagaccatgattaaataaaagaaaaaaataacattataaaataaattataaatattaaataaaataattttttatattataacagccgtaaaaaatataaacattaaagataaataataagaacataaaaagaatgcaagaaagtatgaatgaaaaataagtaaacttaattttttaaatttcttagaaagcctcaaaaatggcctcctaacttcctaaaaaattatgaagaattttcaattatacgtgccatgtgttaattttttaaaaattcaaaatttggccataaaatggaaagtactgaaaaagtgagaaataaataattaattttatttaatcagttaatatggaataaatagatatacatacgtaatcagaaaattaaattgaattatctagtaaaagtgacatttatttgtatatatttttggaaatggcaaaaatttttacaaaagttaattaattaactttgtaacattaattattaatgttgaaaaagataaaaagaaaacaatctgttgcaaaactcatcagataagagaaatcttttatcataacaaataattattttaacaattaataaatttaatggaaacagacaaaaatattcaattgcctactttttatggcttttccacctttttaagttatttatgattttttaaacaaatcttattaaatcctttctgtcatttatttgcttgatttttctactatttttattttctccaatatttgccatcaaacaaaaaaaaacttttataaagcatagagtaaatttatttgtttaatattaaacaatttttaaatttttataaaataacaaaaatggaaaaaaatttagtgtaaaaggaagtttggggggattttggagaagaaaaaagtctcgggtctcgggtttttttggtctcggtctcggggttttgggtctcagtctcagtctcgagtctcggggtcgagtctcggtctcgattctcgggaaattttcggtctcgaacagcactattcagcagataatggacaatgtaaaagaaggttggggggattttggagaagattgactattaagagcatggtaaaataatatgtgaaaaaatttaaaaaatggaaaaattaaataaagtaaaccaatgtaatttaaataaaataattattataggaaaaaaccaataaaatacatattaatagaaaaggaatttcatttgaaacagacaaatttattgagaaaaaagaaaaataaaacgaaatatcattgaaataaaaatggtcgcatctttaaaaattggatttaaaatgaattattaattgaatcttaataaattacaaaataaaatttagaaaaaatacaacaatataaaaaaacattaaatttataacaactcataagataaataaatagcaaacagagaacacaaacggaccccccaattcataagcgaacaaattgagcaagacgtgagaattaaaaaatatatgaattaattttatacgcaaactcaaaaataattgccaatattaaaagctgaaataattttaaaatataatcgcaataaaaaataattaagtgttcgagttttgttattaacggttcatggaagaagcctaatttaaatcctttaaaattagttgaaaagatagtagaaatttataaaaatggtaaaaataataatatataatttatgagaagataaatatatcaaaatgcaatttctcaattgtcaagattaaataaactaaacaaaaatattcagcttttcacaagatataattatataaagcagcaaaataattattaaaaatatagattttttaaattaacgtcggaatttaatttaaaatttaaatgattatcttcataattttataaatttatattaaaaaaagccatccctcagcaggtgggtgtttttttgtttatagataaagaagagaataaatgaatatctttaatttaaaaattcttaatttttgcgaatttgaaagaaataattaaacaaaaaaattatattttagaaaatcacacatattataataaattattattataatgaccaaatacaacaaaagtaataattaaataaattaaaaaaaaacgcaaaattataatataataaataaataaatccaagccaaaaatttatatatattaccgacggattgtggcctttatttaataaaaatgaactcgaaaaataagaaaatgtttaaaacaaattaaaaaaatatgtaatacaaaaaggaaaatataaatttgataaagattagtagatatttataaatggtacaaaataataatagtaaataatttataatacaaagtgacttggtacgatgcgagccctgataaatcattctttttaattagaaatttacactagggttaagccccgaccccgagccccccggcccgagacgttttttgggccgatcccccgaccctacccccgatatgtgccccccggcggtccccgacccccgactttttgccctccgaccccccgacactatttcgggggattggggactccgagcgttttaaaaattaaaaagttaattcattcatgaaggcgggaaatattgaaaaatttttgagattttgaacaaattaaaattcattaaaaattacgaaaaactttccggtggcgcctatcggcaccgccggccccccaaaaccatggtgccgatcggtaatttttcaaaatatgaacaccaaggctgaaaaataagattttaagctcaaaaataataacatttagcaacattttttcaaatcagtaaatttttacaatttatttgatcaaaatgctatcaaattttagggccggcggtgccgataggcgtcgccgggagaatttatttgaaaatttgagttcattttgcccacagattttcaacaaaaatgagcaatttttgccgattttgagaaaatttttaagaacaattttgcggactggcggtgtcgatagatgccgccgtaaaaaattgaaaattgggagcttttgatagcattttttacataaaaatggccattttaaagttttttttctcacaaaccagcgaaataaaacattaatcagaaaaaatttgaaaagtttagatgaagcctgaaaatatgaaaaatcttagaaagaaggaatacggacatttacgagccctgcttaatgacattatgagataaaatttcaaaattataaatatatttaagaaatctgaacaattttcgcactaccccaaaatcagaacattcttataaattaaattagaaaaaatatgcataaataattcataaatgttttattaaacaaaaatttgacatattcaacaatgaaaacgattaaaaaaattatttataaatacatggacatgatttaattaaattcaattaaataatataaattaattataaaatcatttaatgagtaactaagtaataaatcagtaaaacataatcaagaattaactcttataaatgataaacaaattaaaatataagtaattctgtatttaatttaatgctttaaattaattgtttatttttttaattaaaagcttacaataaaataaacattgttttctgcgccaattgtcgcttgactccatataattgcttgctgttaaaaatgttgttttagatatatatcaatatattttttattaattatatttattaaagctaactaataaattggtcattgaatattattaaatgtaaattaaattttttgtgtttttaatttttactatttaaaaataatcatattttaagtattgttcattatttgataatgaggagaatattggcaatttcatttttaaaaattttgttcacttaaactcttaaatcgaaaaaatattgaaagatttaaattaaaaaagtatattatataaaaacgtgaaaataatacatataataaaaaaaatcttttgaattaattttcactttctaaaaaaggtatgttccagacaatgaaaaaattctacatcctgtcatgagagagaagtggataaaaggctttattaccaaaattgaatataaaaaataagctacgaaaaatttaagataataaatttcaaaaaaacttagaaataaagcaataaaattaatgaatataaaataaagtgcaaataaaatacctatttaaatgaatttgaaaaaatattaaaagaattttaacttatcaaactgccggcaaaccgacgaagaaagtggagaaaaagagaagaaatgaagatgaaaaatgagggaaataaaaggagagaaatgggaaaagaaattggaggagaaaaaaaaaggagagagagagagagagaaaatggaagagaaatttaattatgattaattggataattttaaatctgtgatttgattcttttatgtgatattccttatttaatttttatgtgatatttcatattttgtgatattctgtccgattagtcactgctctttttgtgcaccattctctgtcccaatttgctcctcccacgctttttgactgatattttaacacgaacatttcctcacttatactc

SEQ ID NO: 3823 - DNA, 2144 bp, Heterodera glycines
  unsure (1)..(2144): unsure at all n locations
agtataataaaaaaaaatgaagtggatgcataatttaaaatttactataaaataaattttttattaatacattgaaaagactaaaatataaaaattagcacattctataaaaataagaaattttatcagaataaatcttggttttaattttatttgcagaataacaaatgaaaactcagctaaaaattagtccaattaaataattttggtatcgaacgatagcttaatctgataaaaataagatagcttaatatgataagaaataaagtatatttaaataccgacttatttctatggggcgataaacgagagatgttaacacgaggcaaactcatttataaaatatatttaatggttgattaaaagtaaacgaatgtggataaggtgcaatttattagtcatataaatttcatactatttaaaataccaaaatattgtagattaaatattattttgtgtttattcagtaaaatgaagaaaatcaaaaataaaaaatttccttttatgtaacattcttaatactaataaatttattcaaaaagattaataattttagaaatcaaaattaattaaattaaagagcacaaaattcaaaactgataaaatgagagaatattaattatcactaatacacaatttattaatataaagactaattaattttataatctcttttaattctaggcaatttaaaaagtcaaaagctataataataatattaaaccaaatatcgtaaaaaacggatcatcatgcggtttgtgaaagttttttaccaacgagagaatattaatttattattattttaactaaaataaaaatttaatttagaaaattaaaattaatattttctcttaatgcataaaataaaataaaaattttttattgacggacgaaaaagaaaaattattatgcaatgattattctcggattcattttgctgtatattttataccaattaaataatttagaattataagtggctaatataattaagtctctcgcaatacttttttatggataatttaatgcttatttataaaaataaaatataaaaaattataaatttaaaataaaacaagatacgaatctgttacatttaaaaagattacttgatattaatgaattttttttttgtttaaattgcaaatataattaaagaaaacaataacaaattattagtttttgaaataattactaacgaactaagacgattttttaaattaataacaaaatattgaataactaataatataatttacttttaatataatttcacaattaagtaaagattaatttaaaaaatttagaaataaatgcagatgaatttaataaaaaaacaagaacatattgttaaataataattaatatctcaattattaagaaatcaatcaaataatccatccaatgtaattaaattgacaacaatgagcagcacttttgtgaataattatggttatttaaaataaaataaacatttttaagcaatcgacaattaaaaagtcttaataaattaagcataaaagctaaatattaaagtggtcgtgagcaggaataaattgtataatattaaaataatagcaaaatattaagcaggaaaattcaaactctaaaaatttttttggtatttccttaacaatattgaagttgaatattaatgctatcaaagattaaaattataatatcatcatatccttaatctaatagataatatggttcagaaattaaacgtattttaactgagcattcaatataaaagaatattttcatcaaaccatatttaatttttcttttggttttttcttaaattaattttttaatagattcacttaatttggtttaatttatgtgttgattcctgccgagtaatattttttaattgaaagtttaatagactttaccaaaagatgctaattgttgaacgtttcaagttcaaatttgttggcttttggtttcaattactatttgttagaattagagacattatccgtagtttttgaagaatttttaattttattttaggatggttaaataaccctaaaaccaatacgctcctacttactattaaattcatattaatatacattttgatgttcaaaaagtatatcanataagcgacacaatgtanaatatttttaagtgagttt

SEQ ID NO: 3824 - DNA, 987 bp, Heterodera glycines
aatattagtttaaaataataaaaaaatattaaaaacacggaaagactaaaacggccagactaaaccggccagactaaactgacccagtccgaaaaactagggttcggaccccgcccccgccgggggcgggacaggttttttggcctcacccccgtccccgcccccgtgactttgacccccgccatcccccgcccccgcgaccttcacccccgcgggggcgcgggggtgaaaatacacccctaagaatgacatattcatggataaaaggcaaaaaatttatacaattttgatttttttaaccattttgataaattttttatttattaaagttaattttattattggtcattgatgtgtagtgtggtgtagtggttagtgaatcaaccttgacattactttctgtcgtgagttcgattcaggttgacggtttcttttttaatttatttttttaattttaaaattcgcctggcgctgcctatcggcatcgcagggcccaaaaaccacctgtcacttctaattagtgtcaatctacagaggtcccgggtgtgttactactattatctaattattttcataaaaatcatggaaaatcctgtgtttgcttttagcactttttgaaattaatgtttatgtggcaaatccatatgtgaattcttagaaaatttaaaactcacagggttgtgatttcatcaggctattgtaattacacatttcaataattaaagagccgaaaaggaaaaaaattattgtaaaatgttaatttaaataatcaattcgaatttatttaaatttttcttattaagtattcataaaattgaatggttttttgaaaaaaattttttgtaaacattcaataaaaataaaaataaaatattttccaaatgtatctttggccaaagaaggggcaaaattcgatatttacagaaaatttaaatattttatatttttcaatttttaatttatttttcatttatattttcttccgta

SEQ ID NO: 3825 - DNA, 1712 bp, Heterodera glycines
  unsure (1)..(1712): unsure at all n locations
attcattttaaaaaacaattgatcaaaatgtaaaagtttgagctgttgtctccagttccaaaaattaccatctgatggctgtagttccgcagctgaataaacacaaataatttttaattatttaaattattattaatatttaccacaatttcgtcattttgtccatcaattgcgctcactgaacgtccttcacaatcccttgtccccaccgttccgtcgtccattgaccgaatgacgaaaattcgtgtggttgcctcataaccaaccctttaatttaaaatattttaaatttaaattttctcaattttgtggccctatttgggtttttaataataaatcctgccgattttttcggcttatgtaaatttaaaaaatagttttctaaaatgaaaattcctactttgaattaatgtcatataaaaattgggaatggcatcgcatgccattgacaggattgcacggcattgcccactcaaaaagtcggcacaaatggacagcttcacggttggcaccgccaacgccgatgaatgtatgcaccaaatgggttaatggtgggcccaattgttcttcggtgtccacacaaacaccaccaagaatggcctaaaaatggaaaattaattaataaatttattttttaaattttacggtacaccgccaattacagtaactttcttgcaataggtgatcccatactgtagccaataatatccacttgagatgaatgagtaaattgtgtgattgcacgaatcattatgcgaatctgaattgtgtggtaattattttcgaagagaaaaatcgattaaaataaaatattaattttttaattagttaattaaatttttatttttaaaattaaactgtgattaatttaattattttattataatgccttcattagacacctactgaggtaattgttttcaaggaataaagcgaataaaataaatttaataattatttttatttcgacgaataaaatgatcaaaatacaaattaaattagggttgagcggtacacattttaaaaataattccaaacattaaaagtttatcatctttatcaaaatttataaaactatttaaacctatgtaaaaataaaaataatattatggaataattttttggcattaaataaattaaatttgatgaaaatatatttatataattgtaaattttaattgaaaattcgaatgacatacaaaaacaataaacaattatgtgtatgaattagtaacagtctttatgttttgttgaaaatagcatttaatagattcttattaaaaaatgtttctttaattttttttttttaaattaaggaattttggtttggcgatgccaacaaatgtcgccggaaaataaagtgaaatgaaatttgctaacaaaatttttcataaaaaataacttctttttaaaaatttgtaaaaaaataataatttcctttttaaagttttgtaaaaaaattaaataaaaatttcctttttaaaattttttaatattcagttataaatctaaacaaaataaatacatatcattttggagcaaatttttaaaaatgaagcaagaaagtaataattatacagaaatataatcaaattgaaggattaaaaaaaggttcattanaacataaaaacatgactatatacgataanatatcnaatcattattattcatncatgatgaatttgaagaaaaagaatctcatagtcattact

SEQ ID NO: 3826 - DNA, 2528 bp, Heterodera glycines
tttcaaaaatgaaattaccgttaccggtttgtctagtaccggtaccgccggtaaaaatttgcactggtaagaatgggggtctggtcgagaaaagagtaggaaattggtgaagaaggagaaatttttgagaaaaaattaaattttatttcatttagtcatgggagtacacacatgcacatgtggtgtagtggttaaactttctacctttcataatttttcgcctgggttcaattccccacttggatagaatattcctcacattttctttaccattattttaattaaaattttaattttaaaaaatattccaacttttttctttcatgttaagcatcctaaaaacccaaaacttaatcaattggtcattttttttacaaattctgttaacaaatcgcattaaaaatcacaaattttttcccggcggcgcctatcggcaccgccggccctccttgtcccccaaaagtcttggaaaaaacgtgccgcgtaaaaagcggtgttgaaagcaaaaaaaaggtcattgatttacattaatttacatggccggagaccccttcgcaaaattggaaaattggctgctgaccccttgttttgcaataatctgaattttgaggtctacatctgaattttagtgttctatgtcctgaatttgaaaaaaaaaaacttggtcaacctgaatatacatatacttctgaacaattctaatgctaaaaaacaggtactcgcgcgaaaactgaataaaaattttgtatttggaaaattttgtccaaaaatttttatgttctaaaattaccggtttttaccggtaccggtaccggtaccggttgaaaaagttggtaccggtaccggtaccggtttttgcagtaccgatcagtaccggtaccggtttttttgcaattaccgattaccgctcaactctaaaattaatttttattatttaaattaatatatttttattttaaaattaaactgtcattaatttaactattttaatgcgtatttagacagacaccaaccattttcacatgatcacatttcattgcatcacgtagccatttccatcccttcataccgtaaccgtaagtggtcgagtacaattcgctgtcacggtagccgcctttttcgcggaacagtcgccgaacgtagtccaactctcccgctaaatttgttaagccgtgcacaaaaattacaggacgttttcttaaaaatttgaaattggcttcaataggctaattattgaatttaattttgaaaaaaaattaattaatttataatttacatactttgccttaattcgcccttttccaccgccaaaacttccgtcagtgcccaaatctctgcgtgcaatgttcttctccacctcatcattgaagtaatttcgtagaaattgtgaaaatgccgtagaaatagtgccatttgtgggaggaaaagtgccaaaaaacagaagcaggaattgacaaattgcgacaaaaagtgccaaattcatttgctatgattttttaatattgggatatttaatattaaacgactaattattcttctaattaattgcttcacgttaattagctagccaaaggataatttgtaaagatcaaaaaatagtattgaataaacaaaaacggttaattaccaaatattgagtgtctgatcaaaactgattaaaactacttctttttgaaagaccattgatagtctaaatcattaattataaataaatgattaattagcataattaatgacaactcagggcaatgaagaggaaaaatttgttggttggataatttgaggttcattgaaaaaattttttttaagacttaacaaaaggcttggttctaaccagacaccgatactgattagatttttgagaatttatcagttcaagccaactatcattgaataaaacttgacaaataagcaataatgcattataatttgacctgatcaaaaattttttttttctttgatcacaaaatgtatttgatttgtttgattgtcatttttaataacaataaaaactttccaatgtgattattattattattattattatttatgaatggagaaaagcagcattattttatttatttattcaaattattattatttttttatttaagcacccaattgttattggagtgcggcgcgagggcgcgacacaacccgggacatttggagggcatcatcaccgccaattgtgtttagttggggggggggggggtattaattgcgcaatttatgatcatattatgtttactccggcttggccataaagcgctttgtgctgcttgttcattcattgtctggcatagagtgtgtgtgttttggagagagcgaaaaagagggcagtgaaaagggtgaaaaaaagtaaaactccgaaaatttatttaaaaaaaaaattttaattaaatttttagttaatatgctttacaggaattgtttatttttatgtatataaattttgggaaagctgaaaattgagcaaaaattttttttaatgtgattaattggggttaaaatgttactaaatgagt

SEQ ID NO: 3827 - DNA, 5606 bp, Heterodera glycines
  unsure (1)..(5606): unsure at all n locations
ttttttaatgtgattaattgggggttaaaatgttactacatgtgtcaagagttggttttttgaatcttagtcaagagttggttttttgaatctttttttaaattagaatcatggataaaattgtacattgaaacccaaaaggtgacaaattcgtccaatttttctatttttgttacgaatgattaaatgattaagcaaaaatgaagagatgatctgcgattctcatttgcacaatcaccaattaaaaatcattgcaggcaattgagttaattggggggngggggggggttaaaaatgtaaatgagccaaatttagttttttgaaaaatatttatgataaaaatttataacttgacacacaattcgtacaattttttttcaatttttatttcatttgattaaccaaaaatgaagagatgatctgcgattctcattttcaaactccaatcaccaattaaaaatcattaatgaaattacatttttggtaaaattttctttttaaattttctcaaccgatcactgccgatcaccatcatcaatcacatttatttgtcaatttttgtttgacttcatctgctgctgctgttggtaaatcgtcggagtcggacagaaaagggaaaccacgagcaaaaaagtctaaaatgctaaaaatagaaattgcctaattaggtaattaacaaatttaggcacaaatgcccttgatgatctattaatttagccctgaatttttgaaaattttaataattttaatggggtaataaaccaaactcatccataccagagatggcattccgaagcccaaaattttcccggaatcggaattccgagacacaaaattttttttccggaaatcggaattaaacccaaaaaattgcgaaaatttttgaaaaaataaaaaaaataataaaattttctaaataatttaatagtaaatttaaaatatcaagtgaaaggtgatttaaaaaattggaattctatgccatccctgatccataccaggggtatgacgaaatttttttctaaaaatatcaaaatacactaacaaaaaatttgccaaaatttcgaaaaaattctctaaaagaaaaattttttttattaattttttattcacttaaatcattaaaacattttaaataaattttcatatttttgcattaaatttatttcatacattgaagcaataatgcttcttttgtcgcttcggttttgtccttttggcactctgcggaagtgtggccaaattcggcaatcagaaaaaggcacagcaaaataaagacagaatattggtgataagaatgcatttaaatctgtcgggattcattaatgttgaaagttttttttaaattaaatatttactatctttcctatccttacgaagaaattttatgttttttttttaaatcttccgttttttatttgaatattatgatgttctcaatttgtttaaattggggcgagcttttttgctcaaaattaattaaattaaacatttttcgaagttattatttggaagccattgttgtgctcctcctctattaacctgccaaaatgcgaaaaattgagtttttggtgagccctttcgtcgtaaccttaaaagcagaaagtaaaaaattcgaaaaaaatgaaaaaaatcgaaattctttaggggggggggggacagaaaagtataaaaaaaaattaactaaataataacacacggcaaaataaataatttggcacagcacatgtttttacattcgccaaattcaattgggccttaagtatcatcggcggggcagcaggtgggcgtcggttttggttgatctgtgcagcggtgtcaatttgatgtgagtgatttgggcaattaactaattcatttggcttttaagtgtgagtgattcggagtaattaattaattacttaattttccttttaatttattacatataatgagagatgagtttgaaaaaatgtgccgccaaaaactcgaattttgttgacaatagcaattgggcgtgatcatctgatcgcccatcagcaaccaaaagttataagaggcgtcagatcaattacgtaaaaaaaaatccagggcaaaataaaaatttaattggaatttgagactaatttttctgagagattattttactctacagagagaggaaggagaaggaagtagattttcgttaatttaattagggagtgatttttaaaaaagtaaataaaaatatgtcctcttattgtaaacgcaataaatttttcaaatttttttattccgtctaccatatccatcggaaaaggcaagaagaagttttttttaattaaaatatgattttattttaatttaatttattcggataaaatagtgatcaggaaaaaaatgctccctaaattttcgggccattagaattttttcatttttaagaatcttttgtaaattcttaccaaaaaattgtcaaaataaacatagaaaagaattttaattattttgaatttgaataattattagctttttaattaaatcggtgatagaaagagtgaaaaataatataatgttatagaaaggattttaaccaatttattagggatttttagactacacataccgtattcctaaaaataaagcctccgaggtctttatttttcacgccctccccctccctcataagttgggttttctcaggggtctaatttaggggagggatcaggttttaagcttataaaaatatgctccttaatcaactcaaaaattggatttagtaaaacacacattgatggtctatgtatgtaccatcaattccaaacgccaaaaagacaatttgccaacccggtttttatagtctgaagaatgccaaaatgtcaaataaacgaggcaatgatggaacaaaatttgaatcacataaaaatttgaaaagatcaatcggtgccaatgcgacacttcgtcaagcatttctccttcgtttcgaagcgattttcgttgccgccacatgtctgcgcaccaaacggataacattgagcggtgaccgcgtcaaaatagtagcgcgtcagcaacggtgttgacgcgtgtcgcagttgcgaagcgtcgtcgtcaccgtccgcaagcccctcgcctacggtagcgcgcgaatcgtctactgtagcagccgccactttgatgtgatcagtgtccgttgtacgatttgtcgccggcgggcacatgccggattctgttgattggattttttgcatatgtacataattaaaattccaaattcggcgcaaaattttcttaaaaatcgttaaataaagtattaactttgaagaaaaccaagtaaaagtcaaaattttccattttggcttatttgaaataaatttcttattttttgaaagtttaaatgaccaattagttaaatgtctgaactgagctaattaataggatgattgactaattatgaaatgccatactgaaacttgcctggaggcaagtaacaaatgcttggataatgggaaatggcctcgaagattggcggcccgggcagccttggggatccgtcattatggggaagcagtagcagaacaagcacagcaatccttctcaacaaaaatgatgctgctgatgaggaatgtccaaattggcgatgtgttattatgggaaagttattctgataagctgataatgccattctaaatatagaaaattgttatagctcataattttcattattacagtaatttgaggagttgaaattgtaacaatacatcaatttgagggcttgaaattgtatatttcttttaaatattttggaaaatttcaaaaaaagaaatttcggaaatttaacgccgataaagaaataaaattgaataaaaaataaatattggtaaatcattgctcaaaacatgttaggttggtggataataactatttcgattcatttaacccatgattttgcgctgatcaaaacaggctctgctgtccaatttttggatggatcaaaatccgaaaaaatctccaaaatcgccgctggcgctggcggcgcgatggacagacagtaacgccaaaacactgcgcactgcgcgcggcggcgacccgctgctcatccgggctttgtgaaacgggaaatgaagcgggacaacagcaggacagtgaatttgggggagcaaaaagtaagccagagccatacaaatggataaattgtcaaaatccatgcgcgaaaatgaaaaaaaagaagcaatttgaaagcctcggggcggagtgtgaggggaggggcaatcaaatcaacgacggcaaaacgggcgaaaagcccagcgccgcgggggttcaatgggcggtggagtaatgccaaacccatttttcatatgcccaaacaggtcagtttggaggtctaattaaaaataaatgaaaagttctaactattagtgatttggaggggggggggagggaatccgaagttttttggtcttcagattttcggtgttatttttattaattaatttttcactaaaaaatgaccaattttgtgcttttttatcaaattttaaaaattttattcttttcaaattttaaaatatttgtaaaaaaaattgtaaaaaaattccaaaaaaaaaaatattattttccttaaaaatttttattttttattcccgacgggaatcatttttatttctatttctgagggcacccaccacctcactcctctggttgtaagcctggcctgctggtgatatctttgtagtgccaaacactttttacatgaccaaccaaccagacgacattttgaggcctcattagtaacaaatgagataagaaactttggattaattaggtgaagaagaaaacatcaagcgcgaataaaaaaaaagagaataataatttgaatgtctcctcaatatgggggaagcagcagcagatgttacaatattagccccgcggtgaatcaattagcggtggggttgggggacggtggtcgttttacgtgagccgagttggtgtgaatgccaaaacttttttgttttatcacacccgccaaacaaacaaacataattcttggcttcatggtaattatcctttttgtcaagcgccctaaaatttaattttttttaatggtaaattaccataaaaaatttaaaaaatttgagaggggtgacaaaaaggataagtaccgccggcttcattaggataacatcattttcgatcattttatcactaaaaaaagtttaaaattttgattttcaaaataatgtgtaaaaagttaaaaaaactgaggggtttgagaaaaaacgctttatgaaaattagaagggatattttggcgttctgacataaacaatgcaatttttcgggtgaataagcctttctgcctgaggcaagctttttctgcaggatgcacataaatgggtcatctcatctctccatcgcttgtgccccccccctacccaaatttccaacgccgcattttttttgcaaaaataattggggcttatcgaagcagcactttttcgtcacattttcactaacgcaatgctttcaattttttcaatttatttttattgctaattaaaaatattttaaaacaaggactattgaaaaccaaaaagaaaaatagggaatttaatgaattaaattagaaaattttgcaaaatcgcctaaaatggt

SEQ ID NO: 3828 - DNA, 6630 bp, Heterodera glycines
catgtagaaaaagccggcgccgatgacagtgccaaccctttagacaaagagcagctttcgtcgtcggagtgcatttgaaaagggcacgaatgcttttcgactgttgctagcggacattttgaattatttatttatttttattaattcccaaaaagggaatatttacaacaatacatattaacaataaatctaaacccttaaaaaagtggtgaaagtcatttgttttcagacaatcaaaaaatttcttttggagtgggaggtggaaaaacaaaataataaatgagcaaaagattgcacaggttgcgcgcgtcagtcttcgcatttttacaaatttattggtggacaaaacaaatcaaaccacacggtacaaagttcgcttaatttaaggcgaaaaaaataggtaatattaaaatgagtaagtaaatttcaaaagtggaattcgtccttggaaatctttgaaaatcggaccctgattgtgagaggatttgttgaattatttgaaggttagcgtagcttccaaatgataagaagcaaaaaatgagaacatcgcaaatttgatttcatttgaatcaaagttttgccttcaaaatttgtaaaagtctatggcaacaccaaacaaagactgaatgaatgaataataaattacctagcaacacttttaaagattgtaaaaaaatgatgttttgccttgctgattgtggtgagtttcatcgtcggcggaggaatgttaaataaaagaatgaaaaagggaaaggggaggttaaaagtgaagggaaaagacaaaatcgatcacttcaaatgaaccctttcatttttgttccttttccgaaccctcccccgctttttcattcactgcttttgcttgaacacaatcagcggcaaacgttcaaaaattgaacgaaggaaagggtttcggtggtacgatattttcaccaccggacgggggtagattcacttcgatcatttttaagcgacctctccactgatcagagggtgtaattagaccaccaaaatgtaaataatttgaatgttggctaagaaaaccttttcaggaacaccaacaacaaaagtgaaagttgttttatttaaaatgtgtatacaacaatatgcataaagtacaaaaaacaatgatcaacagacataattatggtatacgatacggtactacgtagtgacagtgacacctgatgatgattaagcttcgaacataagtcaatataatgtttggtagtgtgttattgaattttgtgggattgggaaaagtacaataatttggtatttggcccgtcatatggtcttggatgtgtgtagctcgaatgaaattgactgtacaaacgcgtgaaaagaaagttgcttgaccgcgccgagcgctaattaattgagctgtttggtgggcagagtgaatttcattttcggcaccgacattcgcccgatggtgcccaatcccatggaggcggaccgcgcactgcgaacgacgaccgcggaagcgcttttgccattgcactgaaagtcttgacgccgacttgtgccgttggctctgctggtgatgaatgtgtcggggcagaaggcgctgttgccttggcccagcaagtcttgcatatctccgccttcttcagtctcctggaagcaattttaacattgaatgaatgagtcaggagaaaacccacctcacagatacccagcagatgcggactgctgctcaatttgcgcatcccaccggtggacggcaaaaagttggtggttttcaggcgggaaacaatgccggacattgctggcgaagtacgaccgctggacagacaggacggactgggacttctgctggacagtcgggaatcggggctggcctggaaagtgttagtggaaacaaaataattagcaggttggccaattaccgtccgtctcattcgacccgacagccgggaaaactctagtagttcttgaatggcatggggactaatccgatcgcatgacgaatggagactgctggtggcacgaaatgtgagtggcgctgatggggaggaattcctgaataaaaaatgaaaatcaaaaacaaatgcccgagcagaaaaaactactcgccttcttgtaagggacgatgaggaggggcgtttgatcaaattggcggcggaagagatcggcaaattgcacagattggtgaagttcggatgccgttcgagcagcatgttcggccagcagtggacaacaccgttgttgtttggatttggcgtgggtggactggtcgccgagcacggttcgagcagcagaaatgaagagccgttttctttgccaccaattccatttgaaatcggaaacatttccaggctggaagcattacgcatccgcgaatggttatggccattgcgtgttgtccgcattttttctggcgatgatggaagcggcggaagatggccagcggaggacggaagtgccacgcctcggccaggcaccggtcgtggggcggacgcaccaaaaacggctgaatggggtcgaatccgtcggacaatgcctccgccgcttgcactttcatttgcaacaagcggaacatcgaacggaaaggcactttgaacggaatcgacggcggtatccggcgattgatcgcgaaattcgcaaattggggcgagaatccgttgcaaaaagggtgtcgaagtggcggatggaggcggaaaatcgacggactgtgccgttgaagaagtcgagggagggagggatgccagagcgtcgtcttccgactgggattgactttggtcggtggaggaagtcggcttctgttgttcgtccgcctcaacttcgtcctccaaaatggccgatggacccggcgcaaaactgtcgttgctattcgctcggctggtggccaacaaattggaacgggcggaagcgtcgcgaggctttgcactgacagcaacgccagcagacgacgggacgacattgaaaaacctagaaattgttggtttaattcgattcccggaaagtattccgtcggtgggcagcgttaaccccgcacacttttcacccccccccccccccactgacctggacgattgccgcgacgaggaacgcaagttgtacgaagacaactcctcctcgctctcctccttcagtatggagtaggcccgccgtggtgccggccctcgccacgagttgcttctgctccgactccgattttgattcgccgttgttgcagcagtgccaccgccgttggacagttgggaggagaggtcgctggacctgacaaagggataattaataataaaaagaataattagaaaatttaatggcatttattcaccccatttggcattcctcaacggctgccatcagacgattcgcctgtgcctggcgatagcaggaaagaacacgttcggcgagcagaaagtaagtggccgtcaaatgattatattcgtttaattcaatggcactgaaaatggcaaaaaagtcaacgaaagtttcttaatggaaatgaaaaaaattggtaacagaaaagcctggccatttcccctggaaaaaataaaaattcgaccctatagcattttttaccaaagaatttcctcctctccgccaattttcccggccaccatttgctcgacaatggtcgcatgagcacacgcgggcaaatggtcgcgtattatcagtggcagtgcctcggcgtgtcccttgtcgccggcttttacctaagaaaaggaaataatgacaaatccttcatcaaaatgtattccattttcaccgacttacccatttgttctgcacaatttgctcaagggttgctctacgcgacggatcacgcaaaagcatcgacgaaattagcctaattaatggggcgggggaaacaatgtaatcacacaaaatgccggcgaaggaataccttcgacaatcgacggacacgtggtcgggaaacgaaaatttgcagtccaaaatcctggtgagtgtttccgagtcgttggactcttggaaaggcaatcgaccacagacgaacatgtagagaatgacaccgagggaccaaacatctaaagaagggggggggaatgaaatttaattaccaaattttaattgggttttcaccgactgccggcgcatcgtacgaatcgcccagcaaaatttcaggtgccgaataagctgtaaatggggtattttatgtttgctatttttttttattaaaaaaccaaggcttccacacgacgtttgaagctgttcgccggggacgaacaaattggagaagccgaagtccgtcagtttgaccatgccaagccgttcaaaaaacaccacattttcaggctgaaataacaaatgttaggaaaatagacatttaaaacttttttttgggatgggcaatggaaaagtacggcaatttgtttattaattgtttttgtctctgaaattccgtccattgccaaccttcaaatccctgtgcaccacgtgtaacttgtggcagtagttaatcgccttgacaatttggctaaagtacagctgcgcctccgcttcgccgcctccgcccttttcgtagggtcttctcatcacccattcgtacatgtcgtagtcgcccaactcgaggattagaaacagttttgtctgagtgtcgatcacttcgtacagacggacgatgttcgggtgctgcaccaatttcatgcatcggaccttaaaagttaatatagtaatagaaaaaaaatggaatttgttttgccatggcattaaattaggcagatttaactattgtattgaaccattccgttgcctggacttcattctattttaatttgccctaattttaatttaaaaaaaataagtttccgggtgcccaatcggtcggtacaagtaataaaaagggttaattttgtcttcaaactttccctacaatttgtctttgttcaattccgttttgttttgctcccccctttttgttttgcttttcccacttcctgcatcatgtgcgcctgcgagaccgggtccagccgtgtcttgtcgatcactttcacggccaccttttccccggtgaacacatgccgtgccaatttgaccaccgcaaagtgtcccttgccaatggtgtgctccaagtcgtacagtcccgcaatccgtgcatcattgatgtgcagcagtgaggcggaggagggcgttgcgctgctgctgtttttgcgacgcaatttgttgctggtgctcattgacgaacaatgtgatgtgattgaaataacaattcggttctgttgttgctgctgaggaatgaatatgctcgggtggtttcgttacttttgattatgttcgaatgatcgctctttgaccttcgctggtggttcatcagtttttgacaaaaaaaagaaagaagaaataaagtaaataaaatggaatgattagagataatcaaaaattgaatgacagcaaaatggaattaggagaagggaaggaaaggaagtagggaaaaaagaaaaagaaaaaaccaacaattaattttaattacccaattaggtatgtattgaacaaaaattaaaatgaacaaaatgaacgatgaagacaataaacaggaggtttaaagcgatttgaaaagattaaaataagaaaatttgaagaggggattaaatttcagagttcaaacgaagttcaagagaaagaagagactttaacaatttcatttccggttcgaactttgattgatttatttttttgttgttttttttttactcggactcagtcggttgcttttgaaaaataaagccaaaattttaaattaaaaccattaaaaaaaactaaacggcaattaagagaaaagtgtattttttcttaattagttaaattacatgtatattctaatattttatttatttattcaaataaaagaatttaaaaaaggcaagagccgcttacatcttttggatgtgaatggtcaaatctccaacatttttctaagcttattttataactttgaatggagtttattgaaaagcatttataaaaaaaagaattgagaaatataattattttattatgtttacatttactgtatataaaatttaataaaatcaattaatttttttcaaaaataattaaaataaaaaaattattttgctactgaaaaatacggagaaaataaatggttgaaaatggcgaacaaaaagaaatgaacggcgaagggacgaacaaacgaactaacacaaccaacacatgtttttctttctttggagaagccttccattattttccgttgtccgattgaatggctaaattgggccgagggccaaaattgtattaaaagacggagggaaaatgctgtggcgggcggcggagagtctttcccccgccctccgccaatccgtcggctgtcagtcgagcagaaacaggcggagaatttagccatcgcaaaaaaaaggggggggggggagctgttttacgactgttattaaatggttttttaatttagccattttcagtgaaatttcggaaaagtgaatggaaatgaaatgggggggggggtaaatgataaatgcaatttgagtggcgatgagctaaagagaggggcgagaagcgaatttgaaaggatggaaagggaagggattaggagggagcacgcgcattgacgtgtgaggtcaaagtgagaggagacccgcaaatgcaataataatccgtaaacatttcatttcgaatttgcag

SEQ ID NO: 3829 - DNA, 1621 bp, Heterodera glycines
ggattggcactgtcgtgacccgccctcccccctcctcccccactcttcgcggcccctcaactttttcagctgttcgtggattgagttggagaaatgtcccactccccccccccctccctttttttgattctcgcgcaaaaaaaaacaacgaaatttcaacaaaatgatgcaaaagggcagcaaagcaaacaaaaaaagacaagcaattaaaagcgagaacggagaaaagaaatgacacaaaatacaaaatatttaatttaaataattttaaaatttctaaatttttattcaatggattaaatgggcaaaaaaaaacgcacggaaaaattaaaatttaatggaacgcataaaaaatcatcggaataccgactaatgagtgaactgaaaatgcaaaactaattcagtgaaagatgaaattccaagaaagggatgggagggaagagaagagatgaaagaaaagaagaaaatggcaccaaaaatggaattggcagaggattaaaaaagcctaaaattgcgacacaaaattaatattgcttaatgggaaaggacacaccatagaagaaggaaaagacgaacggagattagagagagtgtgagaaagtgagagggagagagagagaaagagaggggagaaaggagagagagagggaggaggaagaaagaggagaggaatgaagaggcgaagggaggggagatagccggggaaaatgagagggggagatagaaggggaggaagagaggggagagagacggagagaaagagaaggagagagagagagagtggaagagagaggagagagagggagaaagaggagggagggaggagcaatgggagaaatctgagagagagaggggagagagacggggagaaagagaaggagagagagagagcggaagagagagagggagaaagaggagggagggagagagagagaggggagagaatgagagtgaaaagatgagagagatcgggcaaattaattataagcaattaatttttaaaagtatcgctattttccaatctctgaataatcagcagagttatcaattggtactggcattgctttacacgcgaaagtccgatagcatccgtttgccgaacttctgctgcacgctgtgcttggacatcacttccacacaaagcacggccaacctcctgaacagtttattcgtctcaatgtgttttgtttttggcattccgcagcccactttccctgatcaaataactcttcaatggcatttccctctgatcagacctccccgaagagattccctctgatcagatcactttccactaacattcccccctgatcaggtctctcccatggaaatgtccccaccacctgttgcatggcatttcccgcgactgatcagtcagcgcgtgccgcgagtggagtggggaagccatgccaaaagaggtcggctctgctgatctccactcagcacagtaagtcagtgatcggagaccgcccgaagaagatccatgccaaagccaacgatcggaccttaaatcaatgaacaaatagttgatcgaaatatcggctatcagaagatcgtcaaccagttgtgatgatcgaaaacattgcgacggtcgaaggtgtacaacggcacgtgggcgtgg

SEQ ID NO: 3830 - DNA, 1068 bp, Heterodera glycines
aaaattatttttaactttataaaaaacccgaattgttcgttgagtgatattaaaaaaaaaactttttttaaatttaattttttcgggagggcgagagaaaatctgctcacttctggttggattttttaagttattgcatttaagagccgctacacccccccccccccctaattgtaagagagactggtagcaaaattcttagttttattagcaaaaagggcccaacttttgccggggcaccaacttttggggccctgcccatgcttaaaaaacgcactgtgcgactcgcttcggcaccaactgctgcacgcgcgtgtccatcagctcggaggtgcgcactgtgttgcgcatgcccacgctgctgcccacctttttgtgcccgctgctgacgacgatgaccagggcacggagttggggccaatgggcggtgggcgccagtttctgagaggacggaacaaattcattgttaaaaagcagttcattctcattctcgcatccaacggaatttaaaaaattaactgatttcattgattcgtcccaagaataaaaaactaaaaataacaaagatagaaaattaaagaaaaatttcggtaaaaaattcacaaaaaatcggtgtttttcttagattttttagggggggggcaacggggaggggaaatggcaaggggaaagtgcatccatttttggatagataaaaggaactgggaaaaaactaaagaaaaccttatacatacatgaaaagggggggggtcagcggccaattttgcgaaggggtccagccatgcaatttgacgaccttttttcttttttttgctttttaaaatctctttttttttgcggcgcggttttctcaaaaaaatttcgcgaacgcgggagccggcggtgccgataggcgccgccggggaaaatttttaaaatttaagtggattttgtaacagattttcatcgaaaattggcagatttttgcgatttttagccaggcgacgacttttttcttctttaaaaaacgctttttttgcgacgcgctttttttaaaaaaacttttttttggggggggggggggggggg

SEQ ID NO: 3831 - DNA, 4762 bp, Heterodera glycines
cccccccgaaaaattaaaaaattttcggggggggaaacgacgtggggggaaacgacgggggggggaaacgacctgctccccccattcccaatacaatttttttcaaaatttagacgtcgattgagaaagaaaaaattcgcattttataaaatttttatactaaaagtttagtagtttgaataaatgttttaaaaaatttacccacattttgacaggaaattccaaattctaaagttcgacccgtatcacccgggtccagaaacctgtatttctcttgctaccacatccaggaatgagtcattcatttctcgccgaatccaacagaaatgctactcacctcgcaaagacagtccgagtcgttttgctgatgagtgcccgccttccagtgaacaaaaccgccctgaatgctgcgacaagcggagcccgagcctgggaaaaagagcaaattacaaagactttgctgcagaagaactcagaaatataacttttcaaagaaatttttgtcccattttttacataaataaaatatttaaatttttctggttaataaagtttgtaaagtgcttttgaacaatgccaaaatgcttaatttggtttattgttagaaaagttatggctaaaaattcgtccgacgtcgttttgtcctctacaccaaaatttaccaaattatcccacttgaaaaaaatgtgctttagtgtagatgctaattgtaagagacgtacccattcgggccattctgacaatgtctcgctccggcaagcggaaaattttgccaagcccaaacgcaatggcggcaaaaccggcggcctgaaaaaaaggaaaattttacttttttttttttttgttggtaaattgtgttggaatttacgaaaagcaaagtgaagggaaatgctttaataaacaaaaatctcaaaaatttaacaaaaattccctcttgaccgtcgctttcgacagcattggctctaaccaattttttgtcccaaaaaatcgtagccaaaggaagaggtatcaaaaaaaacattttaattttgggataacattatctttttgagcttgaaaagcaacaaatttttgctgggaaaagaagagaagcgcttacggatgaagcgagtcctgccgaggtcggaaaatttgtgctcgactcaatctgtaacgaagaattatagaaggatggtgccgttattttggaaaattcgattatatttttggcacttctattaagaagggggtcgacaaaaaatcagagtaggaatcgaaaaattaaaaaaaaattttgcgaaaccaaaggtggacccttttgattcgcaatttttttaaatttttggtgcctcccttccctggtttttgcaacaaaaaattttaatttctagacctttattttgattttgtcgacgactcctaactctatataaatgcctaatttttttaatttgcaaatttcactctttctctccccatttttttctctctctctctcaccttggtgtgccaaccctttgaagcatgctcgcccttcagttttcgctttctgtttgagtattcacgaatttgcttaaaattggggaaggagttataaataataattttaaaaaatggatgaaaaaatatgaaaaataggaaaggcacttctgttgttttgtttttttgttacaaacagcaacagcaagtaaacttggtaatccaacggacttggtgtcccaacaagaaaaaaaaaacaaattttctttgcacatatttagggtaaaatgcgctaacacgaatccgagagcagatttagcaaaacccattgatttttgtcatggctttcatcaattatttgaaatttttaggtttttataaaattagttagcggtaataaacccatatactaaatggttttatatttctgtaaatttgaaaaggtaccccccccccaaaaaaaaataaaaacctgaaaaacgtttcgaaaccgcgaactgccggcgatgtcaatgccgactccgttcaatgtcaccgagtccgtgctcacatcgggcccaattgtgatgtgtgtggtggcgctcagctcatcaattgtgatagcaatggaatcgttgagcggaaggacgagttcctgggcaatggacaaaattaggcaaattattaggtggttttaaaaaagattttaggtgtggctcgtcttaaaatgtttattttattttgttttaaatagacaaacaataaacgctcatttgtctccgagatttagggttaaaaatttattaacattgaccaaatttttgggaagtcagtcacagagacggtcccgtgaataaaagcaaatcccactttttccttcgccaatataaaaaagaaaatatgaattttttgttgttttcttgttgtaactttttttttgtggttgattaacctaaccgattaagcccggtgtaacaggaaaaaacagatatgaaacccaacggcccaaatcacaaaggtaaattaagcaactaatggcattttaaaattaaaattttttaaacaaaacgtttacctcattcctcttgccccaatatttgatcagtgcgatgttcactggtgcttgaatcgtaatatggaagccaccgcctctgttcattcgaattaattgtactaagttttgaattttatctaaaattaggtaatttgaattgtgtcatgtataaggggatgaaaggatttcggtagggcttggactttcactttcttaggcacctgctgatttgattgtgagccataattttgggtaataaaaatgccaaaaagtatgtttagagttgcttttcaaatcaattttttacgaagcatttttcaaaaatttttgggaagaggacggtgtccggcggtgccgataaacgttgccaggaactttttttgatcatttcttaacggtgttcttaacagatttttaaaaaatgactcaccgctcaatgtgctttttcataacgccaataaatttattgtaaattttttgcgctaattcaaaaaaagttgtcactgccttttttgactgtttagtagagattggcattttccgcacacatgggcacgggctacggggttagaaacataaaattaaaaatgttttcggttttttgcttgaaaattttttttctgcttttaacagaatctttttatatcagggttgccatccgtccttgaatggcaaggacgtccttgaaaatgatcctctttcttgaaaataaaaaatgtccttgtatgcaaggacgtccttgaaaatgagcatttggatatgtttaaaaaaaatcaagaaatttgagaaatctatgtaattctcaacaatatttttgataaattatggcattattatgtcatttaaaaatgtatttttgagatttttgaaattttatgtattaagtcatagtcatatttttcttaaaaattaaccaaaatcccaagttttggtctttttgaaaaaaacttggaaaaaatctcgattaaaaattacaaatttttcccggaccccccatccccaaaaaaattttaaaaaggccccccaactttaaaaaaaaaaaagcgtggaagggtttaaatcccaaaaaaaaaggaagtttttggggaaaatttttaaaaaaatatttttaaatttttaaaatattttctccccggggggggtgggggcgggcctccgaaaaacatctctctctatatacaacaacaaacccctcccccacccccccaccccccccccccccaccccccccccccccccccccccccggggggggggggggggggggggggggggggggggggggggggggcccttctcttttttttttttttgttgggttgtttgcccccccccccccccccccccccaaaaaaaaaaaaaaaaaaaaaaaaaaaccccccccccccccccccccccccccccccccgggggggggggggtgtttttttttttttttttttttttttaaaaaaaaaaaaggggggggggggggggggggggggcccccccccccccccccaaaaaaaaaaaaagaaaggggggggggggggggggggggcgccccttctttttttttttttttttttttttttttcccccacaaaaaaaaaaaaaaaaaaaaaaaaattttttttttttccccccggcccccccctttttttttttttaagaaaagaaaaaaaaaaaaaattttttttgtgggggggggggggggggggggggcccccccccccccgaaaatattttttttttttttttttctccccccccaaaaaaaaaaaacaaaaaatatttttcgggggttttttttttatttttgggaaaaaaaaaaaaaaaaatttttccccccatattatttttttttttttttttttaaaaaaaaaaaatttttttttttgcgggccaaagggggcccaaagagggttcccacgggggcttaaaaaaaattttttttttcccccaatttttcgagttttttggaaaattttttttttttttttttttaagaaattttgggggccccccaaaaaggccccccccccccaattgtggtttttcaactctggcccaacaaaaagttttttggatcagaccaaagggcctggcctggaaaaaatgccagaccgaggtcatctcattttggacacttcagtaccaggcgaataccgcgtccgggtttgatgcgagcgagggggcgccagcggactttttgtagagctttcgaagctctatctatccatctttaaaaattttaaaaattttcaaaaattttcgagctaggcctaaaat

SEQ ID NO: 3832 - DNA, 688 bp, Heterodera glycines
ggccccccccccccccctctgtcccacaaaatttttggaaaaagcgcgccacaaaaaaagcgtttttaaagcagaaaaaagtcgtcgtaaatgaagaaaatgataagtgaaaacaaaaaaaatgttggaaaaaaacaattccggtgaaaaatacaagccatttgaataaatagtgaaaaaaagtccgaaatagtgacgttttatgatataattcagtcaaaattaagcaaaaataatttactcactacattattgttgcaattgaggtacatttctttcctaatattttcttagcaaatattgaatttttaaatcaaaaatttttgtcaagaaaaagaaatttggtggatgaatttttgagaaaattttccaaaaatttttaggtctattattagtgaagtatttttttgaaaaaaaattttgttcgattcttaggggtgttatttattttttttttaggtcgattcttaggggtgtattttttgattttatgtattgcatttttgttaaggaattttccaaaaaatgtcgaaatagtaaaaaaatagtgacaaaatttcactattttaaatgaagaaacgctaaaatagtgatttttagtgacaaaaaatgacgttcgaacgaaaaattttaacgcagaaatgctttttttgagctcatttcttcaaaacaattgagcaaaaaaaaa

SEQ ID NO: 3833 - DNA, 1716 bp, Heterodera glycines
cgtatccaactgagaatctgctgaatcggctgtatgcatgcgctgaccctgaatccgatgccgctgttgttataggagcccaaataattttttcggtcagttattgtacctgtttcgaggtaggctttaaaatgaggcttttgccaaattagctctcgagaatgtagccagacggaagcagggcccagccgttcgtccagttgattttttatagaagtttggggtggtattttcaccaatcagttttttatactgttattgatcgtatccaactgagaatctgctgaatggggtttttggctgcgctgaacccgaatttgatgccgccgttgttataggagcccaaataattttttaggaattttattgtacctgtttcgaggtaggctttaaaatgaggcttttgccaaattagctcttgagactgtagccagacggaagcagggcccagccgttcgtccagttgactttttacagaagtttggggtggtatttttaccatcagttttttatactgtttcaaggtaggctttaaaatgaggctttttccaaattagctctcgagactgtagccagacggaagcagggcccagccgttcgtccagttgactttttacagaagtttggggtggtatttttaccaatcagttttttatactgttattgatcgtatccaactgagaatctgctgaatggggtttttggctgcgctgaacccgaatttgatgccgccgttgttataggagcccaaataattttttaggaattttattgtacctgtttcgaggtaggctttaaaatgaggcttttgccaaattagctctcgagactgtagccagacggaagcagggcccagccgttcgtccagatgactttttacagaagtttgggatggtatttttaccaatcagttttttatactgttattgatcgtatccaactgagaatctgctgaatggggtttttggctgcgctgaactcgaatttgatgccgccgttgtcataggagcccaaataattttttaggaattttattgtacctgtttcgaggtaggctttaaaatgaggcttttgccaaattagctcttgagactgtagccagacggaagcagggcccagccgttcgtccagttgactttttacagaagtttggggtggtatttttaccatcagttttttatactgtttcaaggtaggctttaaaatgaggctttttccaaattagctctcgagactgtagccagacggaagcagggcccagccgttcgtccagatgactttttacagaagtttggggtggtatttttaccaatcagttttttatactgttattgatcgtatccaactgagaatctgctgaatggggtttttggctgcgctgaacccgaatttgatgccgccgttgtcatagaggagcccaaataattttttaggaattttattgtacctgtttcgaggtaggctttaaaatgaggcttttgccaaattagctctcgagactgtagccagacggaagcagggcccagccgttcgtccaattgactttttacagaagtttggggtggtatttttaccaatcagttttttatcctgtttcgaggtaggctttaaaatgaggcttttgccaaattagctctcgagactgtagccagacggaagcagggcccagccgttcatcgagttgattttctatagaagtttggggtggtattttta

SEQ ID NO: 3834 - DNA, 1667 bp, Heterodera glycines
  unsure (1)..(1667): unsure at all n locations
aaagtcaactggacgaacggctggccctgcttccgtctggctacagtctcgagagctaatttcaccaaagcctcattttaaagcctacctcgaaacaggtacaataaaattcctaaaaaattatttgggctcctataacaacggcggcatcaaattcgggttcagcgcagccaaaaaccccattcagcagattctcagttggatacgatcaataacagtataaaaaactgattggtaaaaataccaccccaaacttctgtaaaaagtcaactggacgaacggctgggccctgcttccgtctggctacagtctcgagagctaatttggaaaaagcctcattttaaagcctaccttgaaacagtataaaaaactgatggtaaaaataccaccccaaacttctgtaaaaagtcaactggacgaacggctgggccctgcttccgtctggctacagtctcaagagctaatttggcaaaagcctcattttaaagcctacctcgaaacaggtacaataaaattcctaaaaaattatttgggctcctatgacaacggcggcatcaaattcgggttcagcgcagccaaaaaccccattcagcagattctcagttggatacgatcaataacagtataaaaaactgattggtaaaaataccaccccaaacttctgtaaaaagtcatctggacgaacggctgggccctgcttccgtctggctacagtctcgagagctaatttggcaaaagcctcattttaaagcctacctcgaaacaggtacaataaaattcctaaaaaattatttgggctcctataacaacggcggcatcaaattcgggttcagcgcagccaaaaaccccattcagcagattctcagttggatacgatcaataacagtataaaaaactgattggtaaaaataccaccccaaacttcggtaaaaagtcaactggacgaacggctgggccctgcttccgtctggctacagtctcgagagctaatttggcaaaagcctcattttaaagcctacctcgaaacaggataaaaaactgattggtaaaaataccaccccaaacttctataaaaaatcaactggacgaacggctgggccctgcttccgtctggctacagtctcgagagctaatttggcaaaagcctcattttaaagcctacctcgaaacaggtacaataaaattcctaaaaaattatttgggctcctatgacaacggcggcatcaaattcgggttcagcgcagccaaaaaccccattcagcagattctcagttggatacgatcaataacagtataaaaaactgattggtaaaaataccaccccaaacttctgtaaaaagtcaactggacgaacggctgggccctgcttccgtctggctacagtctcgagagctaatttggaaaaagcctcattttaaagcctaccttgaaacagtataaaaaactgatggtaaaaataccaccccaaacttctgtaaaaagtcaactggacgaacggctgggccctgcttccgtctggctacagtctcaagagctaatttggcaaaagcctcattttaaagcctacctcgaaacaggtacaataaaattcctanaaaattatttgggctccctatgacacggcggcatcaaattcgggttcagcgcagccaaaaaccccattcagc

SEQ ID NO: 3835 - DNA, 1137 bp, Heterodera glycines
aaaaattccacccccaaacttctgtaaaaagtcaactggacgaacggctgggccctgcttccgtctggctacagtctcgagagctaatttggaaaaagcctcattttaaagcctacctcgaaacaggtacaataaaaattcctaaaaaattatttgggctcctatgacaacggcggcatcaaattcgggttcagcgcagccaaaaaccccattcagcagattctcagttggatacgatcaataacagtataaaaaactgattggtaaaaataccaccccaaacttctgtaaaaagtcaactggacgaacggctgggccctgcttccgtctggctacagtctcgagagctaatttggaaaaagcctcattttaaagcctaccttgaaacagtataaaaaactgatggtaaaaataccaccccaaacttctataaaaaatcaactggacgaacggctgggccctgcttccgtctggctacagtctcgagagctaatttggcaaaagcctcattttaaagcctacctcgaaacaggtacaataaaattcctaaaaaattatttgggctcctatgacaacggcggcatcaaattcgggttcagcgcagccaaaaaccccattcagcagattctcagttggatacgatcaataacagtataaaaaactgattggtaaaaataccaccccaaacttctgtaaaaagtcaactggacgaacggctgggccctgcttccgtctggctacagtctcgagagctaatttggcaaaagcctcattttaaagcctacctcgaaacaggataaaaaactgattggtaaaaataccaccccaaacttctataaaaatcaactggacgaacggctgggccctgcttccgccaaaggctacattctccagattctaatttggatacgatcaataacattataaaaaactgcctggtaaaaataccaccccaaacttccgtaaaaagtcatctggacgaacggctgggccctgcttccgtctggctacagtctcgagagctaatttgccaaaaacctcattttaaagcctacctcgaaacagatacgatcaaaaacagtataaaaaactgattggtaaaaataccaccccaaacttctataaaaatcaactgga

SEQ ID NO: 3836 - DNA, 2602 bp, Heterodera glycines
tgccatcagtacgccgtgctccattcctccagggaatgttagtgcctgtggatgaagaaccggacattctcgttggaatggcagacttctggaagttttttaacggcgtccaaagagtgtctccgcaactgttcaaagttcaaactttaatcggttccactgtctgcgggcgagatgaaattccgtcccgtccaactgccgatcatccactgtccgtcatgcccgtaaccgtccatgtttctgccaatgaagacgagatgaccaattcggctgtcaagtgaattcagaaaaatgagtccatctctgatctcgactcgctacgacaattctgggatcttcaaaacattggcatcagagatgaccctctcgaaaacgatgacgatacggcacaacaaatcttcgaccagacgactacgcgcctggcaaacggaagatacagcgtgggatggccatggaagaattttccgccggacctgccctcaaattttgccatggcccatcgccgattgtcttcaattctcaaccgtcttcaacattttcccgaactgcttgccaagtacgaagccgcaatacaagaacagcttcgactggggctcatcgaaccagccgttcgtacccgaggactcgagcatttcctgcctcatcattgtgttgtcacacacaaaggaatactcatgcgctttcgcctggctgggattgcgctatggggtgacttgaaaaaggccttcaattcactcagcctgctggaatgcgaccgagaattctgcaaagtgctctgggttaacgacgtccgtaaaccaccgttgccggataacgtggtcatctaccgatggtcaagggtgccattcggtgtcattgcctcgccctttttgctggcagccaccatccagaagcacctgaagcaggacgggtccccattggccattgaaatggctgaaaatgcctacgtcgacaacctgctcatgcaatgcacttcaccctcagaagcgctgaacaagtacatgagcagcaagactctgttccgcgcctgtcaaatgaacattcgcgaattcatctgcaactcagacgaagtcatgtgccgaattccgaaggaagaccaactcgtgaaagaagtgcccaaagtgctcggccttcactgggagttgaggccggacaagctttacatcgactttccgcccatgacaccgaaagtcgctgccttactcgtcgaactgttctccagcagctcgcctctgtttttgaccctctcggactggtgtgcccggcacttcatgttgccaaaatgtttttccaatcactttgggaaaccaagcttgactgggatgattctcttccgactgagaaagtgcaagaatggaacacgattgccacgacttggaaccagcaaaaggtccgtgtcccgcgcagagtcatcccgttggaagtgacctctcatcaactacatgcctttgttgacgcaagcaaagatgcctatggagcgtgcatcttcattcgggcacaacatgaagtcgcaatcacggcccatctcatctttgccaagagccgagtgaaaccaaagggatcaaatctcactattccgcgcatggagctcatgggaatgctgattggcattcggatgcttcaatttgccgaaaaacagctcggacttgccattcgccacaaattcatttggtgtgactccaaaccagtccttggttgggtgtcatcttctgagcagcaacctcgttttgtggagaatcgcctaaaagaaatccgtgctgtcgaccaagttcgctttctctacatatcgacggagcaaaacccagccgatgtcgcctcacgcggatgtactgtgcttgaactcacctcccatccactctgatggagcggcccaagttggctagtccatcccgaggatcgttggcctatcaccatggaagtcaagcctgccaatgatgacatccaaaacgaagctggaatcgcggccatcgtgcctatcgttcaaagggacgaagcatgggttcgtgtcgaccggttcagcaattggacttgccttcggaacgtggtcgtactcgtcctccgtgccctccgtcgttggctcacaatgtccggcaagcccatcatcggattgtgctcacgtgtttctacctctgggccaatccaagacagcgatttccagttcgccgagtgtcttctgatcgaacttgcccaacgtgaatgtaccgatttggccaagcaaaggccagaactacgtcttcgctctgatgaacatggactgatccgcctggagaccagactcggcagctgtacagcaaatgatgactggaagagctcaattctgcttccagatcagtcaccaatcactctgtggagaatcgcctaaaagaaatccgtgctgtcgaccaagttcgctttctctacatatcgacggagcaaaacccagccgatgtcgcctcacgcggatgtactgtgcttgaactcacctcccatccactctgatggagcggcccaagttggctagtccatcccgaggatcgttggcctatcaccatggaagtcaagcctgccaatgatgacatccaaaacgaagctggaatcgcggccatcgtgcctatcgttcaaa

SEQ ID NO: 3837 - DNA, 7697 bp, Heterodera glycines
cgttgcgacgagcactacgcccgccacccgatgttgaaactttgtcggctgcctcgtccgatgaaggcacaattatggttgaaccatcctctttggcggggagtgtcgcgaaagcgactaagaaagtggagaaaaagaagaaatgatgggaaatgagggaaaaggagagagagaaaatggaaaaaaattgaggaagagaaatttaattgagttaaattggataattttaataattgtgattcattttattatttctgtgatattttcatatttaatatgtgatttctgtgcttagtattagtcactcttcattgttgttcgccgctctgtccaaattgctccacctacgccttttcgctctttataagcatcacataaaaattaacaaaaactttaattttgcttacatttcaattgttttaagttttttcacataaggacacttttagaccaaaaattttatcaagaaaaaaataatttatttttggggatcaatttttgtgaaaattttttcttttctttgggagtgtattttctgaaattttttcgggtcgatgcttaggggtgtattttttgtttttattgcatttttgttaaggatttttccgatctccgctgtccctgttccccgggttggcggggatcgtcccccctccccctctctcggctcctacccttgttcaagttaatgttttcacttttcgtcgtctactaactaaaatgaaatctaaacattcgactgattggagttcgttttatcgtatttatggaaaatttccaaggcaaattgagaagctcttcatttaacccagagttttcgtgtccattcatcgtccacctcatagaattcacaaagacggtacaagtctaaaatgtaatgggcaagactcataaatataataaattatagaattttttgcagttaaataggctgagatttaataaaaaaatatttacgaagaagactgccaaaatgaaaattgaaaaaaaccattaatgaatttgaatataatgttttaaatttaaaattttcgtttcgctttcatcagacgaaatttgtaggaaaagaaacgaaaattacaaaaggcctatatgaaccaatgctgggcgtaattacggattatggaaatttcggcctttttggacccggtcatgactgattatgggttaaggattttgggatttttcgtaattttaatctgtaattgtgtttttggattgtttttcgacgatttcatgcaagataattttttttaacgattttttctacttcatttaaaggactacccgaatttcatgatttcttctggattaaaaaccacttattcttgttaatttgtagtattattaaggtaacatcataatttgagtttttcgcttagaaaatagttgcgtttttgtcgttttttgctcctattttttcctcacctagcttttttaaaattcttatcaataatgaaataactatataaatcatttttgttaataatttttcaaaaatatcaaaagagttttttttcaattttttttaggtttttggctctaaaaaacctagaaaatagatactaaaaacacgaaaagtagctgaataaccaccaaaaaaaacttgttttgcgtgtgtttcaggccactggagctgaggaaaaaatagataaaaccctaaaaactggatccctgctaatgattagattcaaaaaatttaaatccagtcacgcccagccctgattccttttcgctctctctatccacacaaaaaattttgtaattttcctttttttctcattactctccggtatttttttttgttgaggaatccaataaaatgcacagtttagctgaaaaatcatcggaaatgacttgagagagaaaatggaacacaaattgtgcacacgttgaaaagcccagctctgatatgacctcgttctgaatttgtcaattcaattttttgaaaggttcaaaaattaaaataataaaatttagctaatctttgttttcaaaatattctaaaatttttgacttacacatattgtaaaaaaattgaaaaatttacttattttccgagaatttacttttttccactaaagcattttctacgggcccatttcccggtgacgatttggagatacaaaaaaagtctttcggttctattcctctcataacggaagatgttagcagctatttgaaacattttactgaaaactgcttcatttttacaaaatatatctactaaaaatccaagtccttttttctgataaaatctttaaaccaatttagccaaaaattctcaacattttcccggcggcgcctatttatttttttaatttgttacagaaatcaacaaattggtcattgttagtttattaacaaagcttacctgaaaagaaaatagttaatttaaagaaattaaatttcctaataaattttgaaaaatattaaatattttaaaaatcttcatcattgatatttattggccttctaaactttttttcaaaaattatatttggtttttaaccttaaattttcaaatttatttgctagttttaaaaaaacccaaaaattgacaaaaatttcttatttttctccaataccaaaaattttctatcaaaatttaaaaaataggccggagctgtactttcaggaaaacttggaccgttactgaccagtgccgggaccgggacctgcggtcagtccctccattggcttacattgaggaacgctggaagagttcgatatcatccagaagcatgtcgcgaataatggccatgtctttgcgatacaattcgaagttatatgagtgataacggcccgcaattcacttcaaaggaatttgcgaagttctgtgaagaacgtggcattacgcacacgctcacagcgccataccatccgcaaagcaatggagaagcggagcgattcgtccaaaccttcaagaaaggaatgcttctcaacaagaaggagaaaaattgggaaaacgaactcgcgaaaaaccaatttctgctgaaatatcggatcacaccgcattaagcgacaggacaatcaccggcaaaaatgatgttcaacagagaactaaggacaaaactcgatttggtccagccggttttcaacccaaagaaaagggaagaaaaggaggaaaagcaaaaagttgtggacaactacagagaccgagtcaaaaggaacttcgatcgaagcacttggaaaaggtcattcgacattggcctgaaaatcttcgctaggaatttccgcgacggaacaaagtggatggaaggcgaaattgtgcgccaaatctcaccatcacttttccttgtcagaaccaaaagaggaatttggaaaaggcacttagatcagcttaaatccaacgaaacggacagcgaaagtgccgataccgattcaaattcgtcaatggcagagcaagctgagatggacacggacgttgaaaatcagccggacattgatgcgcaagatgaaccgcaaaatgtgctgacgaatgatcaagaggagctcagacgatcgagcagacagcgtaagccgagaaccatcttcgatccaagtcgatgaaccgattgaattggtggggaggagatgtcatgtctgagaacttatttgatgggactcaaatggacttttttcatatttgccctcttaatccacaactgctctgtctatttaaatgctgtctttccctcttattcccgcagtcttcccagtcattcttcatttattattttgttctccctcatcaactttgacctccgcatatatttgtttatttcttcactgcaaataaaatcaatttatttggctgttgagtcggacacaacacaaataaatgttaataaatgaaggaaaaatagattttacacagaataaaaaaatataaaaacatataatgttgagaagatgaatttaacaaaaaataaactctttttctttacaatatgaaaattaaaaaagaaaaaagcttacaacaccttcgattcccaggacgtctccgttccaagtactaagaaggcccaacgttgcttaacttgccagatcggacgggatggcgtgttttcaacgtggtatggtcgtaagcgaaagggctccatttgaaagcaactaaatagtcaattttataatgcattttttctcttttaacttaatcattaatcaaaacaaaggatatttaaagaatttggaatacacttaaataaggtaaaataaaagaaaaattcaatagtttttatcaaaattaaagtgcaaaaattcggaatttgaattctttttttaactaatttcccaactgcaaatcggctgaaattgaaaatgagttatataaattttgcatttcatcaaaaattctctttaaaaagcacttataaatccttttcctaggaataatttaattttttaattagaaaaaacattgaaaatcaaaatttcttatgaaaattggttaggtggtgattttaagaaagtaatacacccatcatttatagtggctaaagtcatcttttgagatgcaaattcgcattttattgtattccgttaagaaatctaaaaaaccatttcggcacaaaatgccaaaaaaggcaaaatggggatacaaaagtcatacaaaatttatcaccacgtttatagctgttcttttgaattcaaaaagagattttcttgaccctttggataaaacaaattttatttaacaaaattttttgttcacttttcattttttgttgaacaaattttacctttctctcaaattattttttctcacattctgagacaacaaataaatgttaaaaaatgaagaaaaatagattttacacagaataaaaaattataaaaacatataatgttgagaagataaactctttttctttacaatatgaaaattaaaaaagaaaaaagcttacaacaccttcgattcccaggacgtctccgttccaagtactaagaaggcccaacgttgcttaacttgccagatcggacgggatggcgtgttttcaacgtggtatggtcgtaagcgaaagcgctccatttgaaagcaactaaatagtcaattttataatgcattttttctcttttaacttaatcattaatcaaaacaaggatatttaaagaatttggaatacacttaaataaggtaaaataaaagaaaaattcaatagtttttatcaaaattaaagtgcaaaaattcggaatttgaattctttttttaactaatttcccaactgcaaatcggctgaaattgaaaatgagttatataaatttgcatttcatcaaaaattctctttaaaaagcacttataaatccttttcctaggaataatttaattttttaattagaaaaaacattgaaaatcaaaatttcttatgaaaattggttaggtggtgattttaagaaagtaatacacccatcatttatagtggttaaagtcatcttttaaaaaatctaaaaaaccatttcggcacaaaatgccaaaaaaggcaaaatggggatacaaaagtcatacaaaatttatcaccacgtttatagctgttcttttgaattcaaaaagagattttcttgaccttttggatctaattcatcagattgtggtcttttttcagatgtatagtggctttgtgtggcagcaacggtactgtgccggtgccgaatgggtgctcaaggtggacgatgacattgcggtccatctccgacggatggtcgaatggacggagaaaaaatttcaaaaaatagccacagaacatccgttgatttatttcggagtcccggctgatagaggcctatctcgggacaagaacagcaaatggtagttgaaaattatataatgtaaaatgccgtttaaaaaatataagtaacatgtcaacagtaacacattcagtgcagaataattatatgtggaagcgaaaagttttaaaaaataaagtgttcccacaaaaaacccaaaaattaaattcaaaaataaatttactatgtcaaaaaattgattatttaaaaacaatttttaaaattttatttccaatcctaaatcacataaaataaaaatgaaataatttatttaaaaattgggcagcgaaacaatgtattttttatttgtttattaaaataatattttgtatgatgtcatgaaaattatgtaaaaaagtaacatttattcttttatggatattttatgttttacgaaatttttccgcttttttcttaatttgtgatattttgggcttcaaatgttgcattaattagatgacatacaattagcagcagagcagaaaaagcttcctaaattattttatggccatgggttcttttttaggtacgtcccttatggaatgtttacgggagaacattttccaccgtttttgtacggtggctgctatttgacaactccaagcaccatcaaagccgtcttggaacaagctcacaaaaccgacagcttttatttggaggacgtgctgtacacgggcattttggccgagttggccaatgtcaccgtatcggaccaattgagccatttttatgggaatggattgcaggtaattaataattagggatgtcaattttatgtaaatacggaaatcctcaaaaaaagccaaaatttcgacaaatttcattttttatatatattttgagaattttcgaaaattttttagaaattttttgtgaaaaataaaaaatcttttttttttaaatgtaccctaaaaaataccaaaaataatttttataaacatattgaagtcatttttctttattatgtgccaatttaacaatttacgaagattttttccaaaaaataacttttaataaaaattttatttacatattttcgtatacattttggttttttttacatattttttttctacatatttatgtacatatttttgacatccttattaattaataatcagtgtgcataataaacaataaataaaaaattcttggaatgttgatagcccgttatattttcaaaatttaaaaatggttgtcataagtttgtgattatccatttcttaattataaattaaaaaaatatataattattataaaatttaaaattacttataaactaaggatgcaaatttgatagtgttaagcaattttatgaatttttacatacaataagaaaaccagggccctgcgggccctgtgaaagcgccgggggcgctttaaacgctggctctagtgggagatataatttggggcgtgcaaaaaacatctattggccgctaagcgatcctcatagtttaggaatatgagaattatacaaaaccaaaaaaaataaaaataatttttaataattttttaaaattaaaaaataaaaaaagcttggaaatgaacaaatagttaatttaaaaacgatattgttttaaatttaatttaaatgagatatttttatttatatgattgtgattttttataagattttttgttaaatgtcataattctaaaataaataattttcgagttgtcgctcttccactttctgttcctcttccactttctgttcctcttccactttctgttccgcttccactttatcttccactttctgttcctcttccactttctgttcctcttccactttctgttccgcttccactttatcttccactttctgttcctcttccactttctgttccgcttccactttatcttccactttctgttcctcttacactttatcttccactttttgttcctcttccactttctgttcc

SEQ ID NO: 3838 - DNA, 2775 bp, Heterodera glycines
  unsure (1)..(2775): unsure at all n locations
atatttcgggcatttttagtccatattttacgtttttttagtcattattttggagggtgcaaaaaatatattttaaatgaggatgtttttattaaaatatatctttatttaaattattctcagaaatgactatttagaagaaaaaacatttatgccccccgcatgactaattatgtaattgcatttttgttgcctttcaaatgacaaaaattgtaaccgaattgatttattattatgaattccaaatgcgaagaaccacgtccatttacatttacacacttttgccccttttcttatcattcaaatgcaaaaataagcatacaaattattattaattatgctatgtatttgttgttaattactatgcgtagtaataaagtgtgattattgcataatttagtttaatttaaaaatgtgatcagggattggattttatttagaaaaaatttaaatattaaaagttatgtgaacattaaaatctgagaaagttccgaaataagcaaaaaaaaaaaaaaaatatatatatatatatatatatatatatatgtgtgtgtgtgtgtgtgtgtgtgtgtgtgtgtgtgtgtgtgtgtgtggtgtgtgtgtgtgtgtgtgtgtgtgtgtgtgtgtgtgtgtgtgtgtgtgtgtgtgtgtgtgtgtgtgtgtgtgtgtgtgtgtgtgtgtgtgtgtgtgtgtgtgtgtgtgtgtgtgtgtgtgtgtgtgtgtgtgtgtgtgtgtgtgtgtgtgtgtgtgtgtgtgtgtgtgtgtgtgtgtgtgtgtgtgtgtgtgtgtgtgtgtgtgtgtgagatagataatgtacaaattacaatgtgtgtccaaaattcagcacattgaaattgaccccgatgattccctttcccacaaacgggcgataacatttttgcataggcatggaaaccacccgacctccctccctgatgtttggacgaaggaagttggggtatgtgatgattatcggctcgtattcaccacttgtcgcgtaccggaccacctcctctttgaagttctcatagcgcatcccctggttgttgatcacatcataatttagcgtcagcccgcgcacttttagtacatgttccaattgggctcccgcctccgcgccctttcgtcgcagacacaggccgtactagagtgttaatgttcattaattaccgcaaaatgagccgaaaattcacttgttttgccccgccactgcaaaattccacaatgtcgtggtcggggtattcgtcggtgaactggcccaaatgggggccagttttcagtgggcaccgctcctccgggtggacgaggatgaggctgtcagtgtctaaaataaatgtttgtgcacaaaaaattttttgtagtttgacttaccagtgtacaacagatccgagcccggtgatctgaccaccttctgcattgccttgagcagaacgaggcgcgctgctgaggtggtccatagtgaaatgactgaagtactttaacaatttattgtgagtgtgtgtgtctcaccaatgtttgagcatgagtgctcatccacccagtccttcttctgcagataggtgatgagtatgtgctgctcgtccaactcgtcgattgatgtcacttcgatggatttgttgtccaggtactccgccaaagttgctgggtcgtcagtgatgagtgtttgagcgagtccaaagttgcgaagcgaaaatcgtccccctatttttttttaaatataataataatggacgacagtactcacataagttgttcaagcagagcttggccagggaccgcttccctttgttgaccgccattttggttgggtcgatggtgatgtcgaactgctctgcgcactcccgcacaaactgttgttccttctccgcatcgcctctgatactgttgtcaaacccactggcctggatcttttggccataaactcagcgatgtacgggcggaagagcttgtcgtcactttgctcatactcgaggacacggaagacctttgtgacgaggtagccctcgtccaacgcctcgttgagctcaatggaggtgcacgtgctcacccacccccgctgtctgtcggaatgctcgcagtggtagtcgttgtccactcctcctgtcgggtgctctttggcgcaagtgatgcacagggggaagcaaagccgctctccaactttcacaggtagaacggggacgtcgacgcgtcggggaggctcaacccacactttgagcaatgccaaagggtaggggttgtccgctgcactgcgccactccgcttcctggttcaacacatgcactttgggagtgccaatggggtagcaggtggtaaaactgtgaaggaaaaaatgttaaaagttgttacaaatttaactgtgctcaatttatgtacgggtagagcgatgtgaagtcataataggagattttctctcccggtccagccttgcgcagcagcttcagtggtccggttcgccctcccataaacgcgtcgcggatcaccagcggcccatcatcgacgtagtcctcaaaagctttgcgcatttctttgctcctctccagcatccgatggatttcgcattcccagtagacgtccatccggttgaccttccccctcagaaattccatccgcttggcatcccgttcgcgcattggtcccgcagtcttcccactgnggagcagcatgnnntgtcgttggggtaacaccttttgcacccgtgccacgtgcagccttaaaatttcccattttaaaataattgtgcataaaattcagctaccattgacttcaattgcgcgt

SEQ ID NO: 3839 - DNA, 4583 bp, Heterodera glycines
tatttccactcgttgctgcaataactgagaatcgagaacaaaattattgttatagcaaaatatttttacagtacctcgctaacgcctcatccaatttgaaaggctcgtggcgatgctcggcgtaccacacatcaaatttctgccttttgctgggcatcattccactagccaagtagtcttcgggcgtcgggtgaatctcacggccgtagttctcgggtcggttggccaaatgggggaagaagggcttgtcctcgacgtccagaccgtaggaggggatgagcgccgccagcgcgcacggcatcaaattgaaagagtcacggaagacgatgtttgggttgcgcctcttctgcttgcgtaccttcatctcatacattttgttgccctgagatttttaaaatatttttagacaaaaaaattcttaattgagtacccgtcgaagcatctccgggttgaacccaatacggaatagctcgcgaaagaccagaaccatgtcaaaacgccctccaaagtgtgagttggctcaatgggctgaatgaagcatccgcgctcgggattgtgaaacgtgttgcacagctgacaataggtctcgtggcatttgtgaccctaaatccggcaaagaaatacaaaattttatttaaaaatcaccacttactcgctttccatttcgattgttgtccttgacattccaaataacgccatcggacgcatttggactttattaatcaatggcatttcacaaaattgacactgactccgtgaactcaatcaccaatgctttggactttttccgcattcccccgaccaatgtgagcgtctcttcgtccaaagtgtttgagcttttgcctagcaaccctctgaccgacacaccataccacttcaaactccactcatgccaaaactacattgatctttccaaatgctatttgctcaccgagtttcgaatccagaaggaaaatgctaatggacaacttgttaacctaaccattgatgatataaacattgcaccaatccaaatgattggccaaactttcatccgtaacataaaaatgagcatcaatgggcgcgaaattttcaatgccaatgcactgatggcttacaaaacatatttttcacatgagctttcctattcaacaacggcaaaggactcccatctgaatgccgcggggtactaccgagacacgggcgactcactggaaatgggagacggatgcacagcgcgacgtgatttgtttgcgaatagtaatgtagcccaattcattgccaaaattgacaccgacctgttcaatcagccgctgtatctgatcaacttttgtgagctggacattgaaatattgcccaacgacaacgaatttgtgttaatcgcgccgaccggtggtcggtaccgtttcgaggttgtgggactgaaattatatgtgaaaaaggtgtctctgatggacgggttggcattggacattgcacgaaagttggaggtgaagcctgcccgttatgcagtgaggaagacaatgatgaagtctgtgttcatcagtccgggcaggtatgagttcacagccaatctgttcatggaccaaattccccgtcgtgttacaatggggctggtggcgaatactgactatgtcggctcaattaggcgcagcccattcaactttcaaccatttaatgtgcgcgagatttccattgttgccaatggtcgatcttacccacaagcaccctatgacttagactacccgaacggaaagtatgttcgtccattcaatgatatgaacgaagcggtgggattcgcaaattcatctgagagcaatggcataacttttgcccaatacggtaaaacccattgcatttacgtgttcaatttgaccaacagcggggatgatcaagcggcactgtttgatttgataaagaatgggaccacagcggtgagcgtcaaatttaaccatccagtgcccgagggaggaataatgttggtggtgatgggcgaatgtgactctcttgtgatgttggacaaaaatcgatcgataagcaccgataccactatttaaacgcgcatcacattgtcccatttcatttgcataaaatgtattcaaaaaaattgggtatcattttgttcttgctccgcgtttctattcctgttgtttcaacattccatgaacaaccgcaaaagccaccgccagagaatacatattctgcttatttgaaaaatttgactttgtctcggcaacaacaccacccagaatattcctacactgaatatctgagaagattgtctttgtcaaagattgctacgacaacaacatttaaacccaacataacgaccaccccgaaaagcgacaagttaattgatgagcatttctctgctgttcttccaccgcttatccaactgtgtaaggatctaccagcggaaagcaactttgcgcagaaagccatttgcggggcattgttcgccctttatttaatgctcatcctcagtctgattcttcatcaactttgttcaattttttggctaaagaatggacgcctccaaattataaagatattgagcgaaaatcggcagaccgagccagtgtttcggggctgcttcgccagtgaccaattgccgcctcccttcacactacagtaccccgcagcgctcgtcgtgaacagggacgcccaccacaaggagggctctcattggtgcgccatttatgcgaagggaatggatacgccaggctctactatgacagtcttgctcaacccatccctccctccatcacatcatcatttttgtgccaattccccaagggattaacgaagaattcacacccatatcagtccccccttgtctccacttatgccgcccactgcattgtttttatttaccatttgtccctcggagacacatttaatcaatttctcaaccgacttgagtcttgttcaaacccagatttatatgccacggttgtactccataaaattttaaataaataaattaaatggttgaaaaaaaagaaaaaataaaagcccgatgattgagcataaacatcaagatagccaatttcatcatcaaaatgcgggttctttaaaatgtatgcctgatcatcatcattggccgacaaaggctcagttggctcaatcccgcatgctaccatttcgctcggtgttgccttcaaaattgccggaaaattgtcgcggtgcacaagatcgatggatgtgcacttcttcattgagaacgggttcgcactttttgtgatgtggttgagcaccagattgcaaagtgcaccattttccttaacatttttccataaaaaattgaaaaagcaaaaatagttcaaaagttttacgagcgaattgtgcgagtcgaccaaaattcgggagcagaaaatgcgcccagatttgccgaagcaaatatatcggacgaactcatcgaaaaagcccgggtcacacagctcattgttgttgaaacggaaatgcaggtagagctgtccgtctgacatccatccttttgcactgatcatgtcaaagttgagagcaagccgtttctgaattgacaaattaaaaataaacaaaattaaattgaattattattacaatttgggtgaagtttaggtgacgcttggcccgaaatatttccataattcgattgaccaccgagattccagatggtgggcggccttaaattttgcgaaaaatttgaaatttgaaatttttttttcccacctggcttgggtgttaccccgccaaacaaatacattatgggaagtgagtagataatttcgaagaggagctcggctggtaatcgcttgggcatcatattggtcatgaaatttgaatgaatgaatgaatgaagagtgaattaaaatatttttgtgcccggtcctcatgggctcattaattattcaatagttaatattgacttcaaaagacatttgaatttgcgacaatagtgaaggagatgagttcaaaggaaatttgaatttgccgacaataacgaagaagagttcgagaaaattaattggtattcggatggggacaccccgcccccaatcttcataaatatccagtccaaatcacatttcattcacatctgctcatatctttactcactttaataataataataataatatttgtaaaaataattaaattacaataaaatttttattttattgctgttaaccagggcggttgctctccaattgttgggctccgtttatcctggcagcacttgtgtgtcttttagggcttggggttgtgcgcgtgatctttactaattatcagagccgtttaggtgccctgtcgtcttatgcttcatgggtggcagtgcgctgctcttcagggcatagttggttaaaaaattttaaaattattattattattatccattaatttgcattcacaacgacaatttccatgcctcaaaaatatgtgtcaagattgttcattttcatgcattcttttcattatttttccctgaaaaattagataatgcaaaatcagcctcccaagcatccctctctgttttccattgaccaaattctatccggcccaagcaaaaaggcccgtcgcggcttcctcattcatgaattggttggagaagtggttccagaggg

SEQ ID NO: 3840 - DNA, 1310 bp, Heterodera glycines
aaaataaaaattaaagtagaagcttcaaaccaaatggaaaacgtttacacaaatcgcagttgcgttccactaaagaacgctttaagtctctaatgaattttctgtgcgtttataaatgtcaaaattaattggttgatatttaggcgcttctatctgatacacattgtgccgacaacggaagtggaatttgtttaagagagaagcacagcaacggaagaaggtgaagaagtggttgcttgtagtaagaaacatttgtggacattgatggaacttttttgttttttcgctttatggtaacacgggaaggggttaaacgatgcagggtcggttgaaaggagtttttagttaaaacaattaaccaattaattgattgacactttctgattaattgggcaggcgcaacaatccatggagttttatttgtccgagtccctcttcttccttccgtgttacctaaatctcacacagtttctttgaatttaaaacattatatccttctgttttgggccattttttatttatctgacttcgattgtttgttcaaatgatgaagcaaagataaagacttttctgggaattgaattattaaaattaattggcattaacggaagttaaaatttttttaaaaaaatatagtaattattttttattttttcgaacttaatttatgcttatcaaaaacaatatttccagacgactaattttcttcaaatatttttaattgataaattataaaatatagctataaataaaattaaaaattttgatattttatttcttatgccatatttgatgattttataccataatttaatttcaagtagagtgccacggggccgggaccgggaccgggccgggaattctcggtcatccgaggtcccggattttgaaaagctcaggtcccggtcccggtagggcaaccgggaaccgggaaaaacaagcactggtaagaatgggggtctgagtgaaaaattagtgaagaaaattggagttaaaaggaaaaaatttaaaaaatatattaatatattctttgaaagtacactgccaagtgtgcaaaagcctattggctatctccttgactttcccttcttctttcccctggttcaatccctctacagaaattaaattattttgaattttctttttgtatactcgtgggtttcctatagagaaaatatgattcctcatagtttttttttaaattgatacatatttatcattttttaaataaaatcctaccaattgagcttaataatcccaaaaaccaacccttttttgttgaaaatctgttaacaaattacactcaaatt

SEQ ID NO: 3841 - DNA, 3852 bp, Heterodera glycines
ccggacccctttctttcccaaaagttttttggaaaagcgcgccgaaaaaaattatgtgaaacgtaaatctgaatttctaataatattctatcacttagtccaaaaatgattaattgtttgaaataaatgaagaaaatttgatttgaaaattttcattaatttaatttagctttaacttttggattttattaaataaaaaacaaaataaaaatttaattttgtattattttcagttgaaaaaaaattaaaatttgaatttttttaaaaatttttgaatttttttgaattttaaaaaattcccggttggtcccggttcccggtcccggtttttgcaaaaattcccggtcccgtggcactctagtttcaagcctcccaaagagcgtaaataaacacaaaaaaccttaaaaaactgattcaattattatttgctattttttattaccttttatttatgtttttgtatgaaaaattccttttccaaaaaacattaaaaatgtcttttataattcgaaaaaagcaaacgcagacattccgcagcagttgagtgagatcgcatttcatttaatggatttttccgctcttccaattatttgcccatttaaatgctatcattccccaacagttaaattccttaaattgaataaaaattaattaaattaaaaaagcatatttaaataaattttaccgtgttaaaaaatggaaattcaaaataacatcgacgtttccgggcttgtcgctctcatcaaatttcacgatttaaacactgtggtaattggcgcatttaaaatttaatttgaaagcaaaagcattttgggctggcgcaattgcctcgctgatctgcgcgacaacagttgctgtgttctttagctcatctcatttcttaaaactaaacaaagtgcaatttctgtccgtgtgttaattattaaattaatttattatttttaattgctacgacaacattcagttgcttgcccttctgtccgttgccgacttgtgcagttgcctgggcattttggctttgggactgatgcgcaaagcgctctatgaacgaattgtggagacgagccaagtgccattggaagtgaagggccatcattatcttttaaaataatccatgtctcgaatttgaaattccgggattggtaaacaaattaaaattacaagggaaagaaaatagcttttttttattttggcattttttccagaaaaacgattgtttggcttttaaatcccgacaacgaacagtcccataaatccataaatattttcaaaatattactcatcaattattcacataataaatttccttcttccgctgcttaagacaatttggtcttgtgccagcaaacccttcgtttttctgcgcctaatcggcgtaattgtgccgccttgggttattctgtggatcagtgccgaacgtttcatggccgttttgacaccaaaaatttattgtcggcacatttttaaacggtaagtaaaaaatgattaaaaatgccttttttttttgttttggattttcacgatttgtgatgccaatcattcttacatatgcctttttctcgctgctttttgtttattccatcgcttggacaaaacgaaacgaaccggtggaagcgtattgcggacggagggttcgaaattttgaaaaattcaaaaataaatatttatttattttattttaaagaaagttttcaccaaatactactcaatttacacttttatggtggacatattttcttattcaattgcgtaagtgttcagcaggaaatgggaattattagtctcataaattgaatttggggcgcaattattattataatacggacgcgcatttgtatttaaaattagattagcatttatcactttgaaaaacggatttgcgattaagaagcctccataatatttatcgtatggagcccatgcttctcataattttgaattcttggaaaaggtgaaaaattagacaaggggagggaatcgccagtaattttgaactttatgtcattttaatttaattagattaatttatctcttcttttcataacatttttcaaatttatgtccattttgccaagtttggccattaattgtgccaccgccctccgtttggcgcgccttcggtcgcacctcaaaagtcgcgggcacattcagcggcagctgaaccgcgtgcattacatgctgctcatttcgctgttctccacgctgaccgtaaccgtgcccaatgtgcttttcctcagcaacattttgttctgcaaatggatgcattccgacctgaccgacccgtccaattggatgatcacggcaaaatgtgccgcaaatttctttgtgtttctgctgtttaaagaggtgagaaaatgtgtaaaatttttcaataaataaattcgttctgtaccgtaaaccccggtcattcattcccctgggtgtacggtaaccaatgtgtggtagtcattcatgccttttgtaggaattccgtgtccgaatctacgaaattcttggctgtataagccgagacccgagcaatgaaagacagtacgaagtgtcggcattgggcatagccatgacgagcagacggaggaaaatatcagtggcagtggtggagcagcagaggaacgaccagcaacaggtcacaattggaggcacaaatcaaatacatttggaaaccaaatgaatttgtggctaaaattttaatttccgcccttccaccgccggtgggcgactttctttctttttttttgcttggcacggcacagggaaattttttgatgtacttttgttaaatttagccatttttactttttccaataaactcagtacttcgttctcatgtggtatgaatattcgaattattactgcattttttttttagtatttttggaaaatttccatataaatttaattagaaaaaaaaattcttttacaaattttaattgcgttgggcaattattttcccttcaaagctattaattagcacttcagaaaatgcaagatgaaggctttttcatcttggctgatatgctggtgaacaaaagctccaagtcaaacaacgaacttacggtcgaaatgggaaggggcaaccgcggggaagaacaaacgacgcgaagatcggccaatttttagtcacggcgaatgagtgaatttaattggcattgccccgaataagcacgaaaaaatgttttatttaattgcataaattatgagtcaatttcaaaggacttttgggaattttgagcagttttacccatttaacctcagctcaatgtttgaattattttatgaacttttgcaactaaaacagttgccaataaaaaggagggctaagattctttgatttatttaaaaataaaaaagaaccaaaagaagggcattgctgccgcttacacttttggtgaaaatcaggtcaataagtaggaacgccgacttgcgccgtgacacttgcgccgcccagccaaataatccggtgctgggacgttagtcaaaaaccatcaaaatgggcgttagtcaaaaaaccatcaaatgaataatttttgacagaaaattattcataatttcgcataaaatggatcaaattttataatatagatatttttagatagccctaagtgttttctattatcctgcaaaatttttaaaaaattctttaagtttaaaaaaagttatgacctgagaagctcaaaaaaccaagtttttttgaacatttttagtcataactttcttgatacttaacgaaactttttggaattttgtaggctaatagaaaacacttagtgctatgtaatgatatcaagaattaaaaatttagatgcttttgaaaaaggttatatcaaaaaatattttcatttgatggttttttga

SEQ ID NO: 3842 - DNA, 2980 bp, Heterodera glycines
cttgtcagactaaaccgaccctctgactaaaccggccagactaaaccgaccctctgactaaaccggccagactaaaacggccggactaaaccgaccctctgactaaaccgaccctgactaaaccggccagactaaaacggccagactaaaccggccagactaaaccgacccccaccgttcattagctcattttcttattatgaaaagccaaatcattaggggtgtaaaaaagtctcggtctcgagtctcgaaaatcgagaccgagacttgaaaacccgagactcgagaccgagaccaaaaaaacccgagacttctcgagtcgagaccgagagtctcgaacagcactactcgtcagactgcttcctccgccctccgtctcgccccgctacttgctccgtcttcgcatgctcccttttgcgaaatttttgcttttaaatggttatttattttggtactgaagtgtccattttctctgggactcagttgtcccagtgcttagatggcattggttcgagtttataccttgttttttagacttagctcatcaaaagctttcgaatgataccaaatttgtccgaatttgggcgttttaaaaggtcaggagccccccttttcactcaacttttcgagttttaaaccggtacaaaaaccggttttttggcatttccgcaattggagacctactttttcgtgcatagctcgtcgagacgaatcgattggtatatcatttatgtcatttttttccggggggttgactatagtacacccaaaattcccggtcccgtactaccctaataaaaacatagaaaataagcgctaataactcgaaaaatcaccaaaaattaattgttttggtacttttctagtttactgggcagatttcacatacattttcggaacgccgacatttgcgcctcggacatttgcgccgtgacttttgcgccgcagacacttgcgccgcgacttttgcgccgcagacacttgcgccgcccagcaaaatcgacatttgcgccgcgacacttgcgccgcccaaacaaatattttttttaatttgcaacaatttattaatcctattgctaatagttaacactaattccattcttcgaatcccttcattccgattcggtattgaagggcatgaatgtggctgatcaaatcctcgtcatttttatcttctttggcatcgtaggcaacaactagtcttcttattgcttcatcgttttcaacatatttttttggacgtggacgatcatcaagcccgcgtgtcacgtcaatttcgaatggtcgcagtctgttttgttgatactcttcttcatttttcaggacgtttatctttgtgattagtcatttgctaacttctattagggttttatcaaatattagcgttaataaattgttgccaattaaaaaaaaaatttttttgggcggcgcaaatgtcgcgctacgaataagtaatagtgctgaagtcaattgacattttgaaataggaaatgagatcgaatgggtagttgtatagaagatagttgaatttgagttgaagaagcggtcaaagggaaattttgttttttatgggaggagaaaattttggggagaattttagtaagaatgtttggagtatttgaggaagttgttggaggtctgggcaggactatttcttgaatagctggggaattgttttttgaaggattgcaattggctgtttaacttgtcgaggaggatttcttcttcaacggagttctgcgttttgggaaagtgttcgtttgccttcttctgttctggtccatttttgttgacgggaatcgggacatttgtttgtgggagttgcattgccggtaccattggagagcaaatgcactccaagaggaattcggcgggaagcgcccgactgattttttcactcaaacactgcgttttgtcatcacattatgcgaccctaatcatcgaaatggtctttgagcagcaactccaatttcttgtagaattcggtgtaaaagttcatcttgtgcacttttattggttttacaaaagtcgtcgattagagtccctaaaaacaattaattaatttcatattaattttagactttttaccgttaattcccctataattgcacataaatatgccttgttgtcatcactttcgttgtcggcagtttctaaatttaatgccattacaaagttttcctgcataaaaatttcggcacaatttgctaaaataatcatgtgtaatctcgagagtccggactgaggacgtgacccccgctgggcttccaccccccgtatttttgagggaaatattggggacgggaatttttgaaacggtgccccgtccccggcccatcgttaacccccgtccccgcattttttaaaatttcgttctctaatgtttcttcttatgttcaaacttggagcacaaaaacaccaattagcaaggccattgattttagccgactgacccaccaaaaattgccgtgtcgatggccttgccaaatcctctaattttccttttattctcctccattgcgaacttttgccgttttgcgaattccctcgtggtcattccttcggaacttttaatagttttctcattaatttcgctgatgaatttttccgtttctgtttttgaatttttcatttcttcaacaaggcctaaaattcggctttctttttcaaaatccacaagaagttgatcaacaatatcattatcagcagcagcatctgtgcagactttaccttagaaaagaaatcattaacaattttatatacacacctatggcaattaacgatagcgaatttcatcgtaaattaataattgccttaattagagttaattatccaataatagatttatttatttgtcgttttttgccttggctctgcagatgtgctttctgcttttaaatgctaaattttcttatttattttattggctaattcaaatgaattcaaatgtttttactttgtcgctaaattgcggaagtgt

SEQ ID NO: 3843 - DNA, 3756 bp, Heterodera glycines
ccctagtcgatcgtgtgcgctgtttttcgcgcaataaacaaaactcattcttttaaattttatggtattttacaattgtcatacttctctcaattccatttttgtacagtaattctttctgattcttagtttacaagccaagagagattccatgcgttttaaatgagttgaaggttcagtcccaaaggtacttggccatttcagtcccgggtctgtaattcgattgtgattgatttcaagttttttgtgaaagaattgttaccgattgttgaacgaaatttctttctccgtaaaatacttctgctttatttaatctctgcagttgttttgtgcaaatttacaccaattagtaaaattaagttaaaatttattatttctttatgaattcatttgctccgtttcttcctcgtctttgctgctttcccacagatctctgaacagtttcgtcggcttttcctgctcttccgtcgcttttcgtttccttttctgtgccgtcgtttccgtgccgtttgtcccctgcctttgctgcgcgtccctttcgagctgtttctgcagcaattgggctgcgtattgcgggtgtccctgcacaatgtgccaacccatcgccgcctcttccgtggtcataaaccttaaaaaataaattaattaataaatggaattggccattctcatggaaaacgaattgtccatcaaatttataaggcaccaaattttgatccactttttaattcagcttaaaaatgcattgaaatcccaaatacaaatgagttaacggcactaactttttcccgcattccatgcattgggccaaagaattgccgttgcgaaactgacgaagttcgaacaaatcgatggcccaaatggacgcctaaaaggaaaaaaagggagaattcgaactgaacaataaaaaaaggattggtcatttggcttagttttttctcacttttaaattttgttgccgccgaagggaatgattttccgttgtcggagtaaatggggaagaagcttaaaaaatccaaattaaattaaagatttaatttatttttacggcaccgaaatgcgtttggctctcccttagccaaatgtcgaaaaatttgataatctcagcaaattcgtaattgacttctttttggttctgccgtaattgcgcatgattttgctccattttggcggcatttacaaaaattctctcctaaattttttttgttttaaatattatattcacttttttaaaatttattcaccttaattagtctattttcgccttccctttcaattggcattttttcaatttccctgtaagggaaaaatgaaaataaaataaaaaatgagttaaaatgggaaaatttgttcaaaattcacaaatttatttattgtttttttacataaattgcaagattttcttttttcctgttcgcatttattgacaccaattggatatttatttatataaattgctttaaataaaattgtggttttgctttttctttttgctttaccctttcccttttcgaaattgatcatttcgcgccaattgatccttcagctgatcactcacttccatcaattcgttttcaatctgatctaactttgaacgaaactgctgtaaaaaagcggaaactttttaagtaaaaaagaggaataaaagtcggacaatgtgtcattaaattatttttaaattagattataaatatgactttcattttaggtgacccttttaattgggaatcacctccaattcgttgtgctttttctgcatgttctgttgctggcgttgttgatcaacagttcgcttactcattttgttttgtgcttttcactttttgttatggtggtcatataaaataaattaatatatttaatttaaactttattaaaatgctaaagaaaatcaattgatgtcatttaggaacaaatgaattgatttttaattgtctccaattgttcaccagttatattatttcatcaaaagtaattgaaagaaaggaaagggtggaataatctttaacatttaatgccatgcaatcactattttgcttcgggcaaatttggttaattgtcggattaaattttaaggaataatcaatgaaaattggaaaatttgcaaaaatgaatttttttttttaaattttttctttttggtcagcagcaaaagtcaaaaattccgtcccccgcaaaaattcaatgggcaaagcaaaaaaaaaaatgacaccaacggacgcatcgcatcgcattgacccgacgaacgccgccatgtccaaaggatcgataggcggaaaagttgcggaaaaaagcatttgaagcactttcccgccacttttcagcaaaaatcagtcaaaatcttaaggggggacatttccacttgtgagtggccaaaccaattttaaatacgtttaattgtgtgtagagagagagagagcgagagaagagaaagcaccatcatcaaattaccattataaatgtttttccgcacccaaagaaatcgaaaattggaaattaaaaaaaagatcgactcatttgttgccatgatttctgttgaaaatgattaggacagaattaatctatcgaacgataaatatctgaaatttagttaattagggagtcaattatagctaattataataattttcttaaagaaaaaataaataaaatctaccacattggaatggattcaaaaacctgctaatttcattaatattaaggaaaaatttttcaaacaaagacaaaaaaaaccttgcttccatatgtgaggcttaagaaatggacgaggctttgcctaattttctggctttttgagatgaagatgaggttaactttttttttaaaaaagattttctgcaaattatggcttttaaattttcatattggaggttactaatttgtaagatgagctgaattggttacgatttttatgaatgtcaataacttttttggattaaattaaattaaaatatttgtgtcgtggggcggaatcgaacccacacctcttttacattgaccatctcacaaaaaccactgagacacagataaaaatactttctgaaccgggagcctaaattttcgatgttttttcaaacaaacaaagcttacttctttattaaattattgtaattatttttgatcaaaaagaattaatggatctatatttttgaattgtttttccttgggaaaaaatattttaaaatatagtttttttagatttttattttattaatttattatttaaaaaaatttgtctgcgttttgtttgcgatgcataggcaattaaataatatgaataaataaacgtggattatcctcccataattaagaaaataaagaaaaaattcattttgactttttaaataaacaactcttatttaaaactaattcaattattattgaaaattcattttaaaaaggcattattatgatcataagaattgcagcaattctgccgattatttttgtttatggcatggaacgtaagagaacatcaaaaaattgattaataggttattaaaaattttcaaaaaataattaaggtaatttagggtacccggacacaacaaataaaagagacaatttagcaatgaagaaaaagcagcaggggaatttgagctatttatattcaattggagaagacgaaaaagtgttaattgattattaattaattaactatttaattttaaaattaatcttttaaatgaatccgcagaaaactttggacgaagaaatgtatgaagctgatttgaacattaaacgctttaaattgga

SEQ ID NO: 3844 - DNA, 7075 bp, Heterodera glycines
cttaaatgattaaaaacaaattattattgtaaatcaaatatttttagagttcccaattttttcaaaatgtcgagctctaaaataatattttccattgggctaaaaatgaaaccaatatatatatatatatatatatattaaatgacttttgcctttggtataaaggctgttttttagggtgtccattaccaatttgcttaaaagggcatttgaaaaatgaaatttaaatcaaattgaaaatagaattcaatagaattgctagaaatgtcctttgaaaataattaaaaattacaatttacattttcaaaatttatataaaataattttattttcgaaataattcaaaaaatcaaaaaaaaaaatttctgccgaataaaaacataaaaaagcacaactattaatatgaggtagccaattttttaaacagaatcagcttttttagcttccaatatatttatgagtggaataaatataatttatttaagtaaaagaaaatattcaaatttattttaattaaaaaaacagtttttcaaaaactttacttttttttatctgtttacttttatgttcagttcatgcctttgccaatcgtcaaatgcccaaaaattaatttccgcccccaaaaaaagtaaagggcaatggcaatacaatttaatgccactcgggggaatttgtgttgtgtggcaaaaaaaaactaagccaccctccgatgcgacagaagaagaagaagccatggagcagaatttttggctatacataaaaatgaattaaaattccaaaagtcaaaagggaaaggaaacaatttaaaaattgaaaaaataaataattatgattttatttaaatttttttaaaaaaggatgaaaataatttatatgagaaatgtttttacgacagatgttcagaaaaaaataataattaaaggaagtgaaagcagacagagaacatttcccatgggttttgggcgacattaaaagtctgaaaatttttggtctttgaacatttatctgtttggatgaagcggcttttgccaaattaattttatacggaacaaattttgcattcgcagtttggtttaaaaaagaaatgccatttttagattatgtttttgttttgtctggcgtcagatgtggcgctaattagaaattttgatcttgaatttaacaattccttttcattggattcggaatcatttaatttataaaatgtttaaattagtcatttaaagcttataatttaaaaaaattttaaaattttgtttaattttttcaatttctttttttcattaaaatattttgtttatcgagcttaaacaaataaatcgatggttttagtggaattaaaccgggcatttttcgcctgtgaggcaatgctgaaaattcaattttcgctttgctagaaaaatgaatttgtaagcgtaagttttgttcacaccattgtaaatgtgttagagcttagagcagaaaaaatgaaataaaaaattctaaaaatataaataaataaataatagaattaaaggtaataaaacaatttctaaaataattaaaaattgattcattttgattgaaaacacttggcaaaatgaacttttattaaaaatgtttttaagcagattggctggcaagcaaacgatcaatcaaattgtgatcggcttcgtgagaacaaaatatcatcgaggatttcaattgaaaattatcagagatcggctgtcggcaatcgatggaagaattttaaaaaaatttaagaaacaataaacaattaattgcattagtttagggagggaaattattcaaaaagttttgcgggggcttttctgctaaatctatatatattatatatatataatatattatataatatataactctttttataacgattcatattcgatatacatttcaaggatttgaaaaatttcttaagaacatgtaaaacattttaattttttgattttttatttttgaataaaaaaaaagtttttgcttttatgatataataaataaaaatcagacttagttggttttttctagaaaatatataaaatattttgacaaacatttcactgattgtcgaaattgcaatttaattaaatcgctcctttttcaaaacgaagaaaaaagttttccccacttaaaagtcgatttttaaagtgatttttttcatttttataatttttttcaaaataaaatttttataagttttgttattaatctgagaataagaatttcattttcaaaatagaaaaatgaattaaaatacaccatgaattttaactgataaaaaacaaattctacaaaaaacatttaaaaaaaattcatatctaaattatatatatgtatatttttaatttattttgttttttatttgctctaaaggaataaaatgtaaaaattttttattctcgcagaaaatcaattcgtatagggtggaattgtacaagggcacaaatacatatgtgcattataattatggattaacatatgcatagccattcaacaaaataatttaatatataagcattaaataaatcgataactcacgtgaatattcattgaaaatatttcttaatataatgggaatgagaaaacataaataagccatcaaatcatttctttacaacaagaggaaaaatcttttttttattattattatttaaaattttgctagaatataaatttcaaaggcgacaaatgaaaccgatagctttggtttttatcattttatttaattcattttctaatgccatcgctttaccaattccaaacacaaagctgctgatgagtgatggtgaagcaagcgaaatggaagccgaatttggaaagcgccaaatgattaagcgtaatttgtttattagtagagccgggattttgaggcatatgcctttttttgctaacttgctatggcctatacgcacgaaaaacgagtttttaacttggtttgaagcttctagcttgaacttttttggtgccttttttgccttttggtgcctttttcatgccttttttagtattttttgaaaagaaaaatggaaaattttgcaatttttcttatcatatttcttacaatttccaaaaaaattttcccagcggcgcctgtcggcaccgccggacccccattgagaaattttcgtgcctaaaagtccgggctctatttattagtaatgaattaatttgtttatttttaatgggttacggatggtcccttcgcaaatcatttttggcattgattactttatattaaagcactgaatcgggatttggtactgagttgggattttcgctttttgcttaagattttaaaattgatctcatttacctatacattctttaaatcaaaattttaagaaaataatcattaccataaatttgttcaacaaaatgagcatggcttaagcaatcgaagaggacagcgttcagttgacgattgtccagattgttttgggccaatgttcgtctacatcagtgataaaaccagttcaagcgcgcaaaattcaaaaaattcaccgcaaaatatagcagttttttacgccatcattatgatcattgtcgttggcatatttcgcattcgcaacggaatttttttctgattttttaaaatatttttgttattgtgcttgggatggactgcccaaatgtgtaaatctcctcagcgccttttgtagggcaatttctgagttggaccaggtgtttactgatggcatttcccaatttctcccttaatatgaaaaatttgctaaattttagactttttccctaaaggaaattggaattccaatacccaaatatttttcggaaatttcaaaaatttagaattgagaatgttgagcttatttattttgatttcttcgaattcaattttttcatttttctttcgatttcggttaaaacatccaaatttttattcattagcgcctaatttgttcgtttgccaaacaatgtttaattaagtgaaaatttcgacgaaattggtaattataaatgtccaccatattaattttgtataggcgtactttagagaagacaaggcttccccgagaggatgattatggatcaattaagcagacaattgatactatataatcaaaattattacagtagtattttgatcaggtgtacttttttcgaagtctttttatgttttaaaatatttttaatgatgtaataagaaaatatccttatatttgacctatttttcggccaaataatttgcataatatgaaaaaatatcgaaaaatgatttacatagagaggatccggtccaaaaaagaaaagcgaaatgtgctattcaaattaattgaacaattaactaattaaatagttggaagggtcattggcacaccgtaaaaagttatttttaaaagggattttgtcattttctttatattttccctcttaaaattaaattttttcaaaatttccaaaatcccgcaatcccgcgctgtatcccgcagattttaaatgcgggattaatcccgcgggatcccgtcccgcaaaaaatttgaattccaatcccgcagcgggatccgcaatttgaaatttcccgtctctatgcagcaacacgggctttatttatttatttatcatgacaatatcgaaaaatcagtcatttaaatgttacgaaatacatcaatcgactacaatttgcatagctcagactcgaaaacacgtgaatatttatcgaaaatatttctataattttatttaaatgagaaaatgtaaattaatcaatcaaatcatttcttacaaattacaaactaaaaaaaaataaatcaaatatataccgatttatatatctatagtataacatgtgaagattcattgaaaatattttctaatattattatttagaattaatcaataaatgatttcattacaaactacaggcttaatgtctaaaactaaaaccaaaaaattaccaatttttaaagcttaatcttccttatggaaccaaattcgcataatttgttggctaaagccgaacgattattaattgttatatttgtgatcaggtaatcatttttcaatttcgctagcacaatgttaatcaaatgttttccaatgcttttaggcgtaaatcttatggaactttgaaacccaaattcgaattcaaatagaacaatttcatcaaaaattgagtactaaagggaagataaattaaaaattacttcgtttatttatgtgttaaaatttttaattaaaattgattgtttacccctggcattcaaaaaatgaattttattatgtatttattattacgtgttatttattaataaaatatttgtaaacaaatgtcgccattccatcgttgtggacaatttccaatcttccgccatttctttacatccattcgtttcttacaatcagatgactaaattgaggctgactttggcacaaattttaaattcaatttaaatttttatttactttaaacttgttgcggttgcaattcattcattttaattataaataattatataagaaatttaaactgaaatgataattttaaataaatataaattaatagggcttcgatttttaggtaaatacctaaaatttttgcgcacttgtaacgttgagataagcataaaaaacataaaaaacgagtggttttgagcttctacacccacttttataatacctatttttacctatttcgggatttttctacctattacctaggtacctatttttatacctatttcggcattttggttacctattttaaggattttcaaaaaattcttaacaaaaatgcaataaaatcaaaaaatatacccataagaatcgaccaaaaaaattttcaaaaatgcaccctaagaattggaaaaatttctcaaaaatttatcccaaaatttatttattttttctattgacaaaatttttaatttaaaatgtcaatattatctaagaaaatattaatatatttaaattttcgtttacaaagagatatgtagaaccaaaattttccctctttgtttgcttttttccactaaaaaatcgttaataaaaatttttatttacctattttggtacctattttggaatttttgtacctatttaatacctattttgagattttttttttaactttttaagtacctattctgcgattttttttacctaaaaatcgaagccctataaattaattgttagaataaattatttctttaataaatgaacaaatatttattgggctcaataattcattattttcccgttttcaatggatggtgatgattcattttgcttcagaacattaatcaaaaatttaatgtttaaaaaagaaaagaaaattaattgactattcataattgatatgatcgtatgaatggatgggtggtctaaatgaaattatcggataaattaaaaagacatttttcgaatggtttttcagtccaatgctttattagtttattgttgcgaattgctcatttcaagcattagtcactgttgttgagataatataataaatttaaaattcgaatttattatttctattttttagttcgatggatatatcaaattaattgataatctgcataaaatgggtcactggtcacccatttggcctataaattagtttgccaggaatgttcgcatgggtctccgttttgttcaacagttcgttaattttggtcacttttacgaaaatgtaagattttttaaaattcaaatttaatttattttcggtttaatgaaaggatcacaaggtgtggtattggctttcaattcgttttgccaactgtttttcgcttgtcctttccttgccaattttttggccctcattttacagtataatacagtccattaccgtatctgtactggtactcttatggcatcaactttgacatcgtatgcctcatttttgacactttttttgatatctgccgaacgattattgattgttctgtttccaattaagaaaataaattttaattatttaatcattttttagaatgaattggatcaaacaacaaacaattccaatacccggtacccgaccgggtaggtccgggtacccgggtaccaaaagtgcactggtaagaatgggggtttgattgaaaattagtgaagaaaa

SEQ ID NO: 3845 - DNA, 2350 bp, Heterodera glycines
gttcataaggtaatttggactatacaacaaaaactcctgtgttcattcgatagttgcgagaaattccccggagaaactgcaaaataatgtgaaaatgtgcaaatcagaatgtacatcaaattggttaactattaaaaaataataagatttggaataagtaaaattgtaaaaaatgagcgaatgttaattaatcctaacttatgccaagtggcgagggatccctcaggtttagtttttagaatcttaatttttaaaaaagcacatttttctatttttgggttggggcccaaacgaccccggggcccaaaaacgggggcccaaacgctctggtctctgaagacaaacatgagaaagatcaaataactacaaataatatttaaatgtaaatgataacgcgaaaagaatcgccatgaaaaataacaaataaaaggataaagcactatttattttcgaaaaatttttatccaaaaatgtaatttaaaattttatttacatatttaatttacatatttgctacatattttgtatttttatacatatttcttacataatatattttgcgcttttttcttacatataatcgctagggttataaattatatggattaacatattttttctgcgcatatgctacgaagaaaggggctcaaaaatagcatttctaagttaaaattttttggtttggtgaaagtttttagtctatataaatccatattttgggggttttcgggaataaacccatatttcgacatttttgaatttttagtccatatttggcaaattttcacaagaaaaatgcaaaaaagcgaaaaatacacccctaaagatcgacttttttggaaatttttaaaaaatacacacctaaaaagagaattttttcgaaatttcgtaaattttttttaggtattttatccacttccaaaaattttcgctgaaaacatgaggttattacaaaaattttgggttatatttgatttgcaattgtgaagcttgtgccgcccaacaaaagcgacacactttttgctactgtactaaagattttgtacataatttcaattagcaggaatattactagacaaaactttaaataaaactaaacaaagccaactaatagtttcctagtttagttaatgcttcattttaaaatttatttttgagtgggtggcgaaaatgccggtttttctggtcggcccaaatgtcgtagcggaaatataggccaagcaaaacaatcattttatgtcattaacaccaggaattggttttgcatacatcttttatcttttagggtaaaattgaagaattatgttatttaattgaaaataaatttattaaatttttaaattcaaaaaattcctccgatggaattattgctatttcgtcgcgccgattttgaaaaattgtacaattgtacggattcaatgcgtaaaatcccactggaacagcgaacagacattgtgaatggatgtgttttggtcacactttttttcgtttttgaggtttttttgaggggagataattaaggctgaccaaaagatgacaaaaaagcctagaaaatttctgaaaattttaaaagaaatattcgtggttggccacttcacacaaaagtgcaaatttggcggttcaaaaaaagtgcacatttgggcacttcactgaagtgcaaaaatcaaacatttcacttttcctatgattttttatcaattttttaaattttaaatatgttaaaatttaaatttttgcttaaatacaattcacatagaagtttttttgatctcgaataaaaataattaaaaatctcgaataaaaatatttaaatttttccaaatattaaataaaatcattaatcagattactttgaatttttaataattttgaagcttaaatggtgcctaaaaaattttataaaataaagcctaagcataggcataggcccatctaatttagcttgatatgaagcggacaaatttctatataaatatttcaattttttatataatttgagtgctaattgaactttcaaatatttaaaaaattaaaagtaatcttgctaatgattttatttaatattaagaaattttaattatttttattcgaaatccaacaaaattttagatgcatttcagcatcaatttaattaaattttaacatatataaaaactaaaaaaattgataaaaatcataggaaaaatcaaatgtttgatttttgcactttttgtgtagtggcctagcaacgaaatattttttaagtttctttacttcccgtgtatggtgtcaattttcaaatacatgaacaacaatccatgttacaaattgatgtttctgattggcatattggacatggttattattttaa

SEQ ID NO: 3846 - DNA, 3960 bp, Heterodera glycines
gttttcgaggtcgctgaatacgtactgggcctatgcctaagcctaagcttaagcataagctgaagcctaagcctaggcctaagcaagctgaagcctaggtctaagctgaaccctaagcctaagctgaagcctaagctgaagcctaagcctaggcctaagctgaaccctaagcctaagctgaagcctaagcctaggcctaggcaagctgaagcctaagcctaggcctaagcaagctgaagcctaagcctaggcctaagctgaaccctaagcctaagctgaagcctaagcctaggcctaggcaagctgaagcctaagcctagatacatgccaccaaattagcgcaaattttattacgcatttctcggcagtttggccaatattttgatgattttgtgtttgctgaaaaaaaactccgatttctcgagttaaggttatttaattggtcaaaatggatgtcataaccgttttcagcgacctcgaaaacccataaaaatatgttttccttgtaatttatgaatttcgaattttggttcgaattcgggttcgggattcggaattatgaaaaataaatgtcatattcgtgatcagcgccccaaattaccctagaaatgactttttatttgaaaatttcagggggggggtcacaaaacagaaaagagccgaaaattcgcctacattgaatttgcgactgatatcgttttttataacccgtctaaatgtttataatagcttaagaaagcttccccttgccaagagctttcaaagattgcccatttttgacaaaaaatcttcaaaagtgattttcaaaacccgttaaaaaattccaatttgcctaataaaagtcaatattagtaattcatccttcgaagacgagaggtccgtcagtcatcagtcgatcacacgataaatcaaattcataactcattcggttggcagttcacgaaccgacccgactttcataaattcgtgcgttattaatgtgctctcatttctttttcctaattgtttcttcgatttcccattttctgttcgtccaatggctggccaaccgaaaaaataaatgatggattatgtaaaaagaaaaattcgttaagaatttgttggaggaacgatgcaagaaaaaggtgtcgatcataaccgatcgacacacgaaccaaacaaagtaaaacatcgattgagttttgtttttgattaatgagtcaacggatgaaacggcggacgaacggagtaatggcgaaggtcgaaggaaaaggaagaagaagcattatcatttatgatagccggagattgcgtaaatagtgcagaaataagccatcactaaaaatagagaagtgatgacgacaaaacggggatgacaaaagcggcggatgaaatgaaatgaatgaatgaagcagcacccggcgagaaccattcatcggcgcagtttcatacttcacacatcaaagcactaaaaattatatcccaattaaacgaatcaaaacgcaaaaatggatggattaattgccaaagaaaacggcggcaattaatttacaaattgtttctatagcgcagcaacagaataaagctaataaaagttttatttttattttctcaaaatcttttaatgcgtcgaatcaacggaaatgaaaatggtggccaattgtttcccctgacagcagttccggaaatgcatgttccgtaacaaattcctattcttccaattatattccgaattcctttaaaagaacgcatcgcataaaagaaacatttcgccgcaccaattttaattaaaatttgttgtttttttcacgtaccgcaaacaacaacaatcaattcaattattgttttcattttattttatttgccggtatttttttttgatgcggtaatttcggcccggcgccaagcgctaaaagttggcacaatttaaataatttcgaatcattaaaaaaccggaatttgaaaagtttacttttcggcttttccgggtgtatgtataagattcgtcatcagcgaccccaataacctcgtttacaaatcactctcagagtttcataataccgcaaaaaacagaaaaaaggcatacctaaattcagttaaaaaatttgctgcgcaggttagtaaactgttgaattaccttcaaatgattcataaattaataaatcttttttgcccctttgttgcatggttaccattcattccgccggtgtaaaaaatttgccttgccttttcttcaccttatgctattcattttttctttttcttttcatattttgcaaattcgtttcgtccgttttgaatggttccgcgccgaatgacgtcacttgtgctgaacattggccaagacgaggccaaggcgcagcagcagcagaagcactgcgttttgctgggagagaaaggcggcgaagcggagcacggcattttgttgttgggggaagagagggaaggaggcaaaagaggacggagaatggacggcaaaagcaatggcgggcccagaagaaacagcggggaggaggaggcggaggaagagggcacggacagtgccgacgacacagcatcgatcatgacggcggcacttcattttgcacattccacacgatatttggtctcattttatgttcttacacaaaaaagaagagccggggggacttttatgggaaaagtgtgccgaattacttgaaattgaagatttgtgtttcaaattccaatgttttaaggtgctctttctgacaattttgtgcctcacaatggccatgtccaattcggtggcgctccatttcaccgtcatttgtatgtacaaagatgctgctgatgtcgtccaattgggcgatggttcggctgatcctccgatgagtgacagcggctgggaaccgaccgtaccaccaccgcaaattgattttgacgggcagcgacagcatttttattccaatttcaccgccaccgtattgtcgtcatccaccagcagaaacaacggcagtcagtaaaacgacagaccattaaaaatcggccattattttttgccaactttaagcacccaatcaactgatgttcagcaacacccaacgtgccgttctcttctccgccgtccccgttggctctttgctcggctctttgcccatcactccgcttgttttgcgttatggcatgcggtaattagcatctagccacattgattttgtacacatttcacctaatttgggatgccacaatctgtcattcagtttatttcaagtccgaatgctagacattagtcttttttcacactgattatcattttgaaaattgggaagggataccttaacataaagtacggcatcggatttagaggtttcccttccccactttagcaagacgttctttctgtacggtcttctgtccatgttcgccactttgttcacccccgtgtccgcctacacgcactttttccttttgcttctgatgcgtttgcttcagggcgttgcggttgcaatttgtttccctgccagtggtcagtccgactttttttttcactcatttatatttttggggaggcgagtcggtcacagcgaaacatcctttccgagaatttttttaaaagtttttcaaataattattaaaacaatttggtgaggggaaatgagttgcgttccgtttgtcttgtatgagttttggttttccccttttggtggcattatttccgagtggtgtccgttgcgcagtgctggcactgtcattgcgcttctctcctgtcacattcaggtgctttgttgtaatggttgtctaattccttttaccacatctcatttttcacttttgcttctcacagttcggccccattttaacgatgccattggcgggcgaactgtgcgagtcgcgttggggttggccggcactttattacattcaggtgggggtgggaagtggaggttaatggatttttaaaatctgcatgctgtgtgcaaataaccgttacattgggctttataccgtattccctcattt

SEQ ID NO: 3847 - DNA, 4220 bp, Heterodera glycines
  unsure (1)..(4220): unsure at all n locations
tataaaaaatntannaattaattttcacttttcacctccgttttcagtctctgctcaccgccctgtgttttgtcgcatttttcgcctttttccgcgattcgcctcgtcatcacagaaatgtttcgagaagagaattgggcaaaatctcacgcggaaagtcttcctcccactcggacggttcggcacgcagagaaatcccttacggcgcaatggtggacaaagcaaaatgccaccattggcattttttggaatttctccaatttctttcattttttacagttccgtgacccggcagtgtggggcatctttacgtgtacaatgggcaccacttttggcttttacgttttcgtgcagtacggccccatttatctgaacaaagtccgcttcgaattcccttccccccttcccaatgcatttatttttgtctaaaggccctcaaatttgatgtcgaacgcaccggctttgcggtggcattgccaagtcttttgtcggtgttggccaaattcatcgttgggcccgccagtgattatgcgacgtatgtgctcaatttggtttttctgttacccttaatttgccactaattaccgttcctttgtgagtcattcccccgtcctaaaatttcagctttttgtccgaccgttcccgtgtcattttcttcgccactctctcccaattttcgatggccctttgcttttgtgcgttggctcttctcccctccgattcgccgcgttggcttctccaaatgtttttcaccgccgttactgtcgcttgtggcataaattgcgcgggggtaatttaaaaaacaaattttatttttgtaattttatgttttaggttgggaaaagtgtacaattggtcagtgttattatgaattattacaaaattaaacatagagactaatatattttttaaatttcaacagaaatttctccccattttttcagatttcgcgtcaatacgctcccgttttgtccacgttcaagtgatcaaaccaataatcctttttcccatttgttgcttcctcggtgttcagtgtgttcgcctgttcctgcaccatcatgctcatccccgtgttggtcagtgcgctggcgcccgacaacgaaccgtaccaggcgagaaaagcaattaatgcacacaaatgccgatcagaaaatgatataacgcccttgctgctgttctgtttcagtggtctcgcatctttctgatcgccgctgcggtgattctcgtctgtctgctggtgttcgactgcaccgccgaggcgtctccgcgtccgtggacaaagacggcgacatttgccaaacaatcgacagacgaagaggacgtgaaaacggacgaaagaaagggccagatggaagagacggaagagagacagacggagaaagagagggggacggacaatggaacggcacggacgacggacacggcatcgagagcgatataatgagagttgacaccctgaggctcgggagcgaaactctcgagctgcaccaattttgatttttttatcattcgatgaatttgcccatcaatttggccaattaaaaaaacgcgttcgctttctcattttgtgtaatttgtcacttactttaccattcttttttttgttgttgtgatttgctacgcttaatttgtaacactttttgttttttgatctcccccccccccccccacaatccctcacacattttttgctgaattcgacattttacagcccaattttgcagatcaatcaatgctcattcattgttttgctttacaatttcatcactttctttcattttttatttcttttattgtaactttcgttggtattattttcctattaatatttttgttcaaaattttattcccttcagtttttatttcaataaaaaaatggtaataaattttgtgagtgtatttgtgtaaagatttgagtgtatataaacaaaaaaaacaccggaaaatgaattgtgaaaatggcaaattgggcagaaaatgttggaaaatccataaaaaaagagcaattgagaaagagttttgaggtgaaagacagacaaatcccatcttttgggaaaagaggataagccgaagactgactagtgatcactgatcggaaatgatttccaatcacaaaatggatgggttttgtcccctggaaaattgggcacaaagtcgctattatattgtataatccagagtaaattgttttctgttttagtgtccaattctccataggattgacccacgctgatcactgcttttccctgatcaggcgggcttggcccagtctgaggatcaaggttaagtgggtttagccctgactaccggagatcattccctgatcaggtgggtcggctgggcttagcccggcccgctcgctgattagaggaggatccaattggattttgattgcttgcttctaagccggggagtgatgagatttccaatcacaaatctgggcaggcttggtggtctgcttctgactgatcacagttttgcttgtccccttccgtttttcctctgctgatcacagtgaccccgttcttcctcgctgtgccgaggaaaccgtcgagtcggtgttttcccgcttcagcggcaacggtggcctctgctgcagctgctgctgcgagtggcgaccgttggcgccgccatgccgcaccgccgtcgtccgttggcgccgttctccgccgctcccgcgccgtccactctgaacactttcggagtccatgtcgctgaactcgtccgtcagcggcgccccatggccccgcggaggtctcagcggtggcggcggcggacgatgcgagcggtggtgggcgtgtgccgtgaccgaaacgcattggtcagacgcggcggacgcgcgcgagcggcgtcgctcatctgaaatacaattgttggtttgtctttggctattcccctgaactcgcatcgtgccggcagcggtggtggcggtggcggcactcgcggtggcggaggaggcggaaagggcacgtcgtgccggaatgccgctacatcatccgcccccatggcgccgccgctttccaccgcccactcgatgtgatggcgtggacgcggcggcggtcgcccgcgcggcggtggcggcggatattgcccctccgcgtcacattcgttctgtccacgccgaacactccggtagcgccgctggcgacgtaattcgtccgccgcactttcgccaggcggaggggacgcgtccaacaaaggctgccggtgcctctttttcttgccccattttgcgtgcccattgtcgcggtcgtccagcgtggccaacttaaaaaggagtcaagagtctcgaagttcaggcacgacatcggcacatgaaggcgcaagtgccatgtttgtgtatgccattagttggcaacccgtctgtacctcgtcctcctctagcccagtgaaagccctgttgcgcgcctggtcgcgccgctccctccgctccgcgcgcggttcttccgcgtcccatgagtccgcttcgctctccattccctcgtcgtcctcctctgtgcccatccactcttcgtcttcctccgtgtctctggccgtcctgtgcttctgccgcactctctcgcgcctccgcctccgtctgtttctgttccgtctcttccgtcgtcgttcttcctcatcctcttcctccccctctccgttctgttgcgcgtcctttcgctgcaaaagcgcgttcagaatggcgtacagaatgatgaagaaggcgagcagtgcaaggccaagtgcgagcagcaaataggggaacagacctaaatgacggaaaaatttacacacaaattttaagagaaaaaaattttattgtattttttcgtccccccgtgcccgcggcacaaatccccgtgaaagcggaagcattccccccaaaaatgcctgaattggctagccaagggcggcattcattcattaattcattcactgcttgggctttgctcaccgtccatgtcctggcccatgtcaatgccccacccgccccctcctccgccagcgtttgccgtcgcgccccgcgccgcgtcattcggctgtgccgtccgcttctgttgttgctgcaagacgttgttgttccaccgtcttcgatgctgatgggtgtgctcctccgcttcaacagtctaagcacatgacaattcgtcatcttttttgatttgtccatttcttattgacaatttgtctctttttttactaattatcgaagctcctttgtccatttttgtgtatcatttgtcttt

SEQ ID NO: 3848 - DNA, 1238 bp, Heterodera glycines
atttgcgaaaggatcctcatccatttgatgagcctcgatgagggggaggaggaggcggggaggggccatttcctgcgactttaccccgtcgtcctttgctgttacgtcatggaaacgccgagccgagtgtccgccgctttggtcaatatgtgcacacaaatagcaaaagctaaaggtgagcgatgaagcaatcactaaacaaaataggggaaaattaatggtaaattcgttttaatttagaaaataaaaatggggacgaacattccgaattgattcgccaatggactcgccatttgttgaatttcctcaaggagagcgacctgtttaggcaagcactgaagacatatgacgtcgaaatcgctctaatggtcgcctcaatcgaccaatcttgttagttttatgaaatgtttttgtttaattatttttttaaattcaggatccaaaggaataccttccgtcccccccccccgcccccggggggttgtgacaatgagttgatcagtcgcgtggtggtggcgggggcgacaactcactcaccaaaccgaccgaccgaccgactcttccattattccccattgatttggtgatcagcgcggggaaaacgaatcggggagggggagaaattggtgagaaaaacggcagagaaatgataataagagagaaatgtcgaggaaatgcggggaaatgaagcggggaatggtcgaaaaattttcaaaaaatataaaataaaccgagaataaaatgatcggaaattggggagattcgtagaattaagtatggaaatgctgcagggaaataattaggggaaaattaacagcagggaaaaatatgaacaaattaaccggagaaaatttgagggggggggggggaactaattggaaaaatgcggtgcattaattgggacacaattagtcggagccggggaatgaccaaaaaacggggaactgatcggtggaaaatgcgagaaattggtcaaagaatgcgggaaataatcggagaaaaatgcgggggaaacgacaaaaaaagaaaccggggaaattgattttgaaagaatgctgagaagtgattagagagaaacatgcggcgaattaatgaataaaaaaggtcaaagaatgcgggaaaaaatcagagaaaaacgccgggggcgacagatcgaaagaggaattagtcatcgatttaaaagatgacaaaaactgtggtggacaacggacggcgcggcggaagtgatcggaggcact

SEQ ID NO: 3849 - DNA, 3078 bp, Heterodera glycines
  unsure (1)..(3078): unsure at all n locations
atgcgttggtggacaaacatttcaatggcaaaagcgcatttactattntggagacgaatcgaaattcgtcgcaagtacaaaggaccagaaacgaagctgtctgtgtggatgtatgacggatgtgcggaatttccattgccggacgaccgtccgttgcccagcaaaattcgctttaagaatcttcagacattcgccacttgcgcttttcccgtggtgatcatttggaccatttgcttcgtcaaatttcaccgacaattctcgctgatcttaaccaattgaattcaatccattcatttggtctgtcgcccgctgcgtttggtgatggttttgatgggccaatttcaacaatttcttctggccaagcattgtccaaatggttgcactctccgagaaaagatggacaaccaaagcgattgcattgcggtaattacaacaaacaaacgaacactgattggatcaacaatttcaaggaggtgtggccataattcgacaaatcactgattttgttttccaatcaaattgtttagcattttctccgtgccaatgccatttcttccgtcagttacgaaattcatttttctgttcatgtgccgtcaatacaaatggtgccatttgaattggtgaacgaatggacgaaggaaaagctgacattggccaaggcaaacgaaaatgaatgggagaaaaacagttggataatgaaacgatgcaaaattattggggagacagcggcggtcaattggaaagacggaaattgggacaacaattgtaacaatgtgttcatttggctttatatttgcaataattgcattgggtgagcaattaaaaaaaacatttgatttttatccaatttgaattttgcgcttaattaaggccattgtctccgccaccggcagaagaaacgggacaaagcatcacaaaagtggcgtcttctgctgacgatgaatgagtgaaggacaaaagaacgaaacaatggtgattagtggaagaagaaatgaattatttaaaaatggccaaccgatcataattcatcagtgatcaaatgcaatttatgatgaaaacctctcaatttcggtaaataaatcggacatataaaaatggcaaaaaatatatttacgaaacacaaaaattttgagatttgcacaaaataatcaacaaaaattgacttttcaggcagggatttccgggatcactgatcactagggcttccaattatatggaaatccatatttttttcctggacacgcaagaaaaacatgtttttagcttggtttgaagcttctaggatggatttattctatatccatatttcgcgattatgtccatattttgttagccattttagatgtattttaattgaatttaatgaatttgaagaatatttttgaaaatttacccctcaattcggaaaatttatgtccatatttttgctattttatgttcatatttcgcgatttttcctaggttttattgccatattccgagattttatatccatatttttggaagccctactaatcactagggctgggacaaatattttgataaaaaagccagaaatatttacgaaaaaatatttttctgtaagtttttggcgggccaggacgttttcgcgtggttgcatataaaagagaagtgcaaaatcaactctaagcacacttattgatgtcaacagaaattcaactaatataagaaaagaaaatttacaaaagcctagtaaaatgtcatgggacgcgtaaaatgttataggacgcgtaaaatgtcatgggacgcgtaaaatgttatgggacgcgtaaaatgttatgggacgcgtaaaatgttatgggacgcgtaaaatgttatgggacgcgtaaaatgtcatgggacgcgtaaaaccgactagaaccaattttaattattttttccgtttgacgcacatccgaccaaactgacaaattattgtagaagatactagccgcaagaaataaaaaagttaagaaatttgtccgaattcgggttcgggattcgaaacatggatgttttgcacaaatccgaccaatttcagtcctaaacagctactcacgcgaaaacgtaccccacgcgaaaacgaccccgaccggtttttggggtctattccttcaaaataaaaccctagaaaataggccctaataactcgaaaagtagcttaacaacagccaaaaaaaatatgtttttcgtgcgtttcaggccatggggagctcaggaaacaaatatgtaaaaacctaaaaacatagccctatttataacacatgaacaaaaagatacaacaaacttcatcaatccctcccttttcatgactataaaaggtaaaagtgaaggatactgacgggatggaaaatgtatataaattatataccaatcgactccgctcggtctctaatgaaagaatccgaaagaattttttggcggtaaccaatcgctgaagagttacagacccgggactgaaatgacaaaatggctttgggactgaaccgtccaaacccttagacgcatggaattgcgacaaaattcatataaatcgattccgctcggtctctaatgaaagaatccgaaagaattttttggcggtaaccaatcgctgaagagttacagacccgggactgaaatgacaaaatggctttgggactgaaccgtccaaacccttaaacgcatggaattgcgacaaaattcatataaatcgattccgcacggtctgctaataaagaattcgaaagaatttttggataaaaaagaaattgacaaaagttacgggtccttaaaaatctcaaaaaatgatttattgttaattaaaaaattaatttaggtgagccaaaaaaaacgtaaaaggtttttgaacttcgcaaaattaaaatagtcctaaaattttgaatgttatcatgattttccttgaacttataaagattttaatttaaaaaaatggcaattctgaataaaatctgataaaaacttgtgctgctccatttttcctaggccaatgacttcttttaaagattttttttaatagctcacgtttaaaattaactgtagttttaatatttgccanaaaattgcgcaaaatttcca

SEQ ID NO: 3850 - DNA, 3605 bp, Heterodera glycines
gcccgcgcccaagcgcaatggactttttaattttaaaaatttttttaggtaactattttgggttttttggtcttaaaaatcccagtccttctcatttgcaactgcaatcagtgaataaaaattattttggcttattttttggctgaaaattatgtcactattcgtcactatttcggactttttgtcactatttcttcactatttcgagatttttcgtcactaaaagttgctgccctaatgatgtatattaagcattaacagtacaattatggtgaataaaaagtatattcacaattttttgtctcaaaaaaattttgcaaaacaaaagtcactccccccttttgttttgataaaattaaaaatctgtcactttataactagcgccaaatttgcttaataggcccaaataattgtcatattcgtgatcagcgacctctaaaacccccgggcacttggtttcatgactttataaacaaaacaaaaaaatttaccaaaaaaaagtttaaaaaattttcaaaaacggtgactttttcactagcgcctcgagatttttagtcactaaaattcctagccctagttattaccaaaaatgttgtaaaaaacttggttttttgagcttctcaagtcctcccattggcacattgtccaacccctcggacgccaattggcaacaatttaaggcgaacaaaattcaaaaattatttggataaaatgtgatttttacgtttctttcatcaagtatatcagggttacccttgaaaatttcccgaaataagaacatcgctggtcaaaaataagattttagggtcaaaaataaggacattttttaaaacacgcttccaaaactttaaatgcatttttattcaacaaaaccaagcattactcaccgccaactatttttctgcgcaattccggcttagaaatgagaaatttatacatttccgaaaatcaattttaattttttaaattttttgggtatggatgagggaagagagtccggcggtgtcgataggcgccgcggggaaattttttgaaaatttaatgcaattttttaacaagttctgtccaaaaaatgaccaaaatttgcgatcttgggctaattttaagaaaaaaaaataggattggaaaattttaagaattttaatgaattttgttaggaattagccaaatttttcagaaatttcctcttttaaatgaaaataaggcactcccaaatcagaacatttcttagaaataataacagatacagctctaatagacgttgctggaaaaatttttgtaatttttaatacgaattcttaacgattttgttcaaaaaatgacaaaattacgattttgagccaattttttaaagagaataagaaaccgccgagagaaaaatttgaatattaaatgaatcttgttaagattttgcatattaattcgcttcaaaaaacatttctttcaaaaattatcatcaaaaactaaatttctccctaaatccaaaaaataagacgaaaataaggacaaagagcttaaataaggacaaatcttacaaataaggacaaagggtaaccctgtgttaaagcgtgttgatggattaaaaatagaaaatagtttcagatctgttcggccataaacaattttatgcgccatgaacagatcaaacagctttcgcctattctcaagtgttggcagttgcaggtattctaattgtctccgccaccgaaagaagaagaagcgggacaaagcatcacaaaagggcgaaatgagtgacggacaaaacaacaaaaaaacaatgatcagccgcagaagaagaagaaatgaattaattgagaagaatgaccgactgatcataattaaatcagtgatcaaatgcaatttatgaagaaaatcctctcgattggtaaatcaatcggatgcataaaaatggcttgctatctatcgagtgtatgaatttctctctgcttgaaaattgtgacattaattttcgggattttgacgcgggatttacgacgtccattagcaattagcaggcaaaattttaaaaagtgtcaatttgctgttgttcctctctcttcttttctgcttcattctctcctctttctccccctccttgcttagaatttttccttttcctctctttctcttccgtctctcctccttccccaatgctatttccttccttttccacctcttcccttgtttctccatttttgctgttatccatcttcatctccattcccaccaaaatttgcttttgttgttgctgctgtactgcttgaacttcttgcttttgttgttgctgctgtactgcttgaacttcttgcttttgttgttgctgctgtactgcttgaacttcttgcttttgttgttgttgtttttgatgatgttcaactgcaactttcttttccttttcctctgcttccgctgctgctcctttttctcctcccttttcctctcttttccccccattttctcttccttctcctcccaattcgttgtttcctttttgctgttgttgatttggcgttttcttccgattgtttggcgccggcactgatggtccaccaccggaggagccagttgaatgttttgctttcgcctaaaaatgccattttacaagccataaatgccggaatgtgtaattctggcgcaaaaactcccggattgcggtccaaccactgacggtatccggacaatccgtcagtggataatcttcggaagacaatatctatcagtgacggacaattcatcagtgacggacaattcgtcagtagactgacgtttcatccaagtacatctcgtccatactttgttgacggattgtccactgacagattgtccataaccgactgattgttttactgacagattattattctggattcccactggcgcacatccagtagcgacttttgccaaaaggcccaccgcttactgtatgccaattagctacagtatattctttttataaaaccagcaggaagaaatgtgtgaaattgctcttgcagagtcggccacccatactgtattttgcagacagctacttacagtatatgtaactgttacaaaagcccatcccaattctacagtacccttcccctgctgccgccgccgtcctccattttcgctgttgttgttggtgtcggtgttgttgtgctgtcctttttgtgccgcatgaagtcgatcattctgtcctgcacaatgtccggctcggaagcagcttcatccccctcatttcgtgactctgtcgaaatggagcgaccgccgccgccgccagcagtgatccatcgctcttaaaaatgtattatcccattttaaaatatttcttttatctccgaaatgccatgctgggtcgttttataaaatccaccaattttagcaaatttttcgacaaaacatggcataactttgtttaaaggcaaagcaaacacattttacattcttggtaccattcgatagccaagctttttctctattagcctgcaaaattgcaaaaaaagttaccaaatttaacagtagttatggtagaaatagtacttattttcatacaactttttctaaagtcgaccaaatttttatttttattctgcgggctaatagagaaaaagcttggcgatcga

SEQ ID NO: 3851 - DNA, 2395 bp, Heterodera glycines
  unsure (1)..(2395): unsure at all n locations
atgcctgcannggtcgcttgaaaaatttgattaaattttgaaaaattatatcgtaaagtgttcaaaaaaacaggctttttgactcttcctgaccatatatttttttgaatattcatgaaattgttttgaaatcttgcacactaatagagaatacatttacaaattagcgctatcaaatgatagtaggaattaaaatttgatcactttgaccaaatgataaatagttattttgctaaaaaattttataatttgattggttgttttaattaggcttaaagggggattaaaatataatgaatgcaattaatttgagtgacgagaaagaaattaagcaaacaatttttagaagattatttacattatcaattgcaaagaatggaatgaaatggaaatattaaaaataaaaatattaaatctttagatttttattaaaaagcttttaaacgaaaatttatatatattattatagtaaagaatatgataaaatataaaattatttgaaaattatatagaaattgaatgaaaaataaattaaattttttgacattttaagaaaatattttaaaaatctgcaactttattttttttaattcgcaaaatattaaaaaacgatttttaatatactattatttaaaaaataataatttaaattaaaaaaaattctcctaaaagagagggaattccaaaaaaaaaagtttgacattcgttgtcattgtcctaaaatttcatttatcgaccgaccgtcgatggcactgtcctttggcttaggttgggttggccctccctacccattcattgcttaagaaaaattctccagggaatttccattccgatggcttttctcctcgaggcaggaggcgccccaaagagtgccaaaaagacatttattagccgaagggaccattcactaatactctcaaaaaatgtacacaaaatttggaatggcatttaaaaaaaatcggattgataaccattcgcggcaaaaaaagagtcgctttacggcgacgccgacgcttttcccccgagcgaagtgactaggggacaaagtcttaaataaatgctaaaaagttggatttttaattgaatatagaaatattagataaatttaccatcaatataaaaaaataaaattgttttttatttgttcattaggccaaaacaaattgatttaacagggcatgatttagaaaattttcgttatttttaagggaagcgaaatttttcgattttcaaggtgaatatttaattttaagcttcgtccaagaatccctaaatttaaagtattaatatagaattcaatattatcttaaaataagataaaatcacaaaaagcaaaaggttttaaattaaaagaattacaccaattgataatatttttttaataaaaattctttatataatatttcctattgatttgccaatttgttccaattgggggcaaattttgcattaaataaaatgacattaatcggtttccatggtttcaaaaaggtgtgaatggtaccacagcacaacagctcattaattcatatttaattcatcacaaaagggtaaccgagtgaatggataccaaacaaatattcaagaattacgaaaacaaaaatggttcgatgcttgggaattgtaaaaaaaaaagtctacaaaattctttataattaaagacagtaattcatttttcagtctggtttggtgaaggttttcagtccaaataaatatttttggatttttggaaacgaatttttgatattttttcgagattttgccaaattttttaggtattttattcacttccaaaaatttttgctgacaacagaatgagtttattagcaaaaaatcttgaaatgtatttggtttgcatttgtgaagctataaattgataaagttggaatttttaaggcttaaatccattttttggtagttttttcgggtattttttaagtttgtttaagcgggagtggaacttaacaatagacaggaacccggacgaacgggactaattgtcccattttgtcaggattccctgacattttacccaaagagaaacctcggcaaacgcaaagcggaatcccgcaaatttgaaattcccgggctctagaaaattttgtacaaaaaacataggtttattgcaggctaattaggattgaattataagtaacttcaaaatttcacagattcatttcagcaattacttttttttacataatgccaagcctattttacattgccaaaatgccatgggatttcatgcctattcacattaatgccctttttttacacgtgttggacaccagcagatcctccaaaatggcattcattcatttgttttctaaaaatgcgtcggattccttttgcccaactgtcattctgctgatcattataattgaattgtcatttt

SEQ ID NO: 3852 - DNA, 2047 bp, Heterodera glycines
  unsure (1)..(2047): unsure at all n locations
aaaaggaaaatgatgccattggcagtcgatgcatttgtggggggagatttaaatgtgaaaccacaattggaactggtgtaaaacagcagctggacagaacccatcatcactccctaatgagctcagcaatggaagcgatcaaaacagttaaccgggacttattcacatggggcaaagggaatggattaaaagtcgagctaatttttgattttttttttaattttatagttatttttttagattattttggtaaatgagaaggattgcgaccttgatcaattgttatggactgatacgagaaaaaatttggatgggttaagtgcaacattaaagtgttgtggaaggtttcggtgcaactcggctcggtaattgaaaattataataaaatcttttttttaaagctaagatttattattaaattttgaaaaattttaaaacctgaaaattggtcaacaatttgcaatgttggaaaggatcacgagaaaaaagttactaatgaaccggattattctttgaaaaaagactttgtaacattgaaagaaattttattgcgccaattcgaccaaggaaattctctgaaacttgaaagatatattggcgttttgttaatggaatacaaaactcaaaaacaaatggtagcaacggacccatgtgaggaggccaaactgaaagtgatcaaactgatgaaagatgtacagaaatcattggacaaaaaggaaaaagatggagtgaccaaaactgacaaaggcggacagaacgaactgatcaaaatggaggaaacagaagtcgaaaaccggtacacgcaatgacaaagcaaagtgatcggagatgaaaaaagactgatcacaagtcaaaatggtgatcagagtgaggaaacgaagtgaagagtttttagatcattagtctgtttgtgcactatcatcatcacttttcttttgggtggcttttctttctagcataaatttttccatttccttgaccaaatgctttaatccgattggatcaatgaaaacttttaaatttttctaaacaataggatggaatgtaaggacatgtaaatgcgccgtaaatggtttagatcatgtggttgtttatgtaaaggaatgtttaattaagtgtcatttaggcattttgtcaaaagtttatcctttacaaaattcgacaaatttatatagaccgtttcgcccacccgtataaaaaccggtacaaattttttccttataaaaaatgcctttaaatttaaatcttattataaaattaattgtttgtcatcactatttttatcacttttttgccatttttcgtcattttttaattaattaacaattttggggtttgcgcaattaaaatccgcgctaaagttattaaccaaacatttttcttgatccggtatattgaaaaaataattgtttcccatgggttgaatcgtttgccggaactttctagaaataactaattttttttattttaaaagatcgctaaaagtgtaaataatgtatataatggccaaatatttatgaaatatttaaaaaaatcttccactaataattaaatctaatatgcaaaaaaaaaaaaatttctttgatttttcttacaaaattttctgagaaaagcggtgaataagcataaaattccataaaaagacgtaactagcttacattaagcttagagtttttaattgattttaatattttttttggaaaaacatcaacttttgaggtacatttttcattttttaatgcatactcgaaaattgaaaaagatttttgtcaatgaagacaaacaattttattattgttatatagtagagttgctcggtaatcggtaattgctaaaaaaccggtaccggtactgaccggtaatgcaaaaaccggtaccggtaccggtaccaactttttccaccggtaccggtaccggtaaaaaccggtaattttccaacgtaaaaatttttggacaaaatttttcaaatacaaaatttttattcagttttcgcgcgtgtgcctgttttttatcattagaattgttcaganagtatatgtatattgag

SEQ ID NO: 3853 - DNA, 7457 bp, Heterodera glycines
tttcaattgcctgttttccgtttcgttccgttctgcttctcggttccccgatttttcggacatgctgctccaaattttcaatttttctctgtgaggtgccacacttcattatttcgttgctgccttttttgatcaggtaaccattttgtaaatcgaggtaaaagggtgtctttttaaatgtgttgcgcccaattagcatgtcatatgcacctcttttaccaatttccttatcaatcaccgccacttctgttatgattttcactccggccagttccaattcaatttttccactgccaataactggtacaaattcaccactaattccgataaccccggccacctcaggactaagcaattttattccaagtttttctgcagtgcgtaggctgcagattgacacatgtgcgccagtgtccaattgaaaccgaattattttcccgttaacgaatccgttaattttaaaagtttcatcgcaccttgtgttccattcaatgattgccaacacgctcacttttaagcccttttttactggtttggtcggtttttgttccggagatggccatctttccgtcagcggaactgagtgcgtacgagttagccttttccgattttttgagtctttcttttgtatggttttcttttccacgggataggctccctcctcaatttcatctcggggttttttacctcttctcttccccctaaagaaaatatgccatgcaaatcgaaagaatctgaagaaaattcctccaagattgaggtactgtaaggcctgagcgattgtcgacggtaacaaaatttggattataattgttagcgtaacataacagcagcatccaaaaacccaaagttggtttagactcagaataccgccacgtaaaaatgaaaacagtccgctggtcactattccacccgaaatacggtttttgtgttccgagggactattccacgaatcaactcgcgataagcgggaaatctcctgaattattttggctccttccactgtttctttgaaattttcacgcgagtaaagttccgtaaaattggccaaaactttatttttgaaaaaagggaggtttatttctgggatgtctatttttccatatcggctgatttcccttattccttctgttgaaatttggctgacatttcctgttttttgatcatatcgtattatcatgccaaaaatctccataaaaatgaatcttccattaccgcaatccacctctttagattttgtatggataattaacgtgtttgggtcgataaaaccgtgcttttgctgacggtataaataaaatgttaccggaagaaactcaaaacagtgaccattttgccagtcaaaatgtacttcgccctcataaataggaaaacacgtttttacctccattagtttttccgtgatcaatcgagccgataaaaaaggatttcccaggaaaaacctcgctaataacgatgggtttgctatagacaaggttaaagcttggtctgccattatttgcatgctcgtgcaaattttacgaattgtctccgtaaatagccgctgagtcgttatggccatttttgtgcttaaggctgtaagctgtgcagcaagctgagaactataaacaggaccaatttcggttgtttctctcgttttcctggtgccgcttcctttggctttctcgaccatttcttggaagtccgaaacaggtacggcaaacgcttggtccgacacaattagttggcccgactcggcatagcacccgggctgactatgagacgaggtgttttcaaaactcaatgcaaaatcaccactttccgtcgtccatattagacttgcatattcaccagaccattttgacaaccaaacaaaagagcaaagttgggtcttgtcgggggtccaaatcagactaatttttacgcattgacattcgcctgatttataaaagcaattagagcactctccgattggtgtattcaatccctccattccatgacgtgtaaaaacaattgtcttatacacataataattatcgatttcttccgttctccaaaacaaatttgatggccattttccccacccaatttctagggaattatttgttgccattagcgtttcgtcattaacgtataattcgcctgctggagagtccttatcaactgccattttcctgcaaattgccgtaggcactaccgaatgaaaggcacttatttcttcatatgttccaccaaaaaatcctctcctccttgaaatgcgcgttaaaatgcagctgcaggctgtagcttcggttttgtattgtacagtgtttggtcgatatatatttaatgcaaaaggaacggggacctgcgttggaacccaattagggcagatagggtcgacaggcaatgaccaaatactggtgggagcatccgggaggcatatcatgggctttgccttcacttcggatgctccgttgcttccaaatagagcaaggaaggcaattatggccaaaaatagtggactggctactcggacagctgcaacttttcccctcttgaaatgcacccgcttccctggggaatgggagcgattggattcatctccatcacttgatggacttcgatgtggttttctttggtaatttctgcctgtccacggctttctctgatccggggttggtgagcgatcgtatctccaattaggcctttccggtgagcgaccgtatctccaattaggcctttccggtgagcgatcgtttctccaattaggcctttcccaattttcgtcgcgatggttttgcctaccccatctgttgctttcgcttggttcatttctataatctcttctccatgttccctcagccgccctgtcccccctataataactttgtcggtttccactttgtcttccttctttccttactcggcaatccctcacaatgtgccctgggcgattgcagtaataacagacacgcctctcgtcggctctttttcctatgttcctttgcgtctgaatagttaatgcctcaacccttgaagagagttctgcaacagagacttggctctgttttctcgatgccaacagcaattcaaaatgctgtgccatttcgtaggcgtttgagtaatttgagggtcggcctgcctttacctcaaattgtaggtcaggggtcaaacgctccataaattcctccaaaagtctctttttaatcgttccctcgttttctcccgccattgcggttcgaagtgcttcgcttaaccgattagcgaattcatagactttttcccctggcgcctgcttacaaattgacagtgtttggcgagcgattgatttcgtattttcattctcgaatttattttttaaaaaattaaatgcatcctggagcgtggttggggctgggctcataccctccatttccccccttgcctgtcctgaaagacttatccgtaaacggctaagtttttgctcttccgtgagctggggataaagcgaaagaaggtccatgaatctttcggaccatcgagaaaaagacgaacttgggtttccgtcatatacacccgggggaattacattcattaagaaagggtcagccatcattacttccaagtcctccgtttcgcccattagtgttttttccttttcctgcccctcattattttcgtccttattttcatcatttccaatttcatgactctcccttccattgtctgcatctcttttctctccattttctgacgaattattgccctgcgcaaattgtttttgtaggtcatggtgcccgttgtcctgccaatattcatcaagtgacgaatcgcccattttttcgagctcaaggaattccactctggtttccacaacgtcaatcgaaaatttcatttccttctccaccgactcaattttctcatttatcaagtcaactaaacatttcgattcctttacctgagtatcaattttctcaaaacattcctttaagttttcagacacattagctttaagaacttcaaatttgttatgtgtctcctccagtttctcttccaatttgaaaattttctccttagtctcgaattcatccatctcttcattctcgtccaaattttgtagcgatgactcgagacggctcaattggtcctttgtggctcgttcacttccattcagagaactttcaagctttcgaaattggctgcaaactgcagcttcaaaagaacgcaaacgctcgagaatggtttggtattgagcattttcctccaccgtgaaaaaagctgggttgaagtcagatccctcgcctgacattttactgtttttccactttttttttttgaaattggcacacagcccggttaggatcacacagatcgactaactcaaataattatccgtttgatcagctaggagcacacagcttcgactagccctccgcaattagtctcttcggttgggagcacacagcttcgaccaaccctcgacagcaattcggcactcggccttgctcagaaatttgggaaaagggaactttttttttttttgctcccgggtcgtggcaccaaaaagatgttgtgttcccgacttatttcccaatcaaaagtaagactttaggtttgttaatgaaagtttatttagcaaaagtgagaaatgcaagtaaaatgggaatgagtcaaagtgagtaaaaaaaagggtaataatgcaaggaatgaattcagtttaaatagcaaaagagaaaaggggtggagtcgagagtgagctgggatggacacaaattggcttggcttgggtttacagtaaagtgtaacgattggttaggatgggagaggaaatcggtgaagagagagaagaaaagttgtacaaaataaataagtgaaaattgatcattaaattaaataaatgattttgtcaaaaggggattcaacatttaagaaactaaaaaatcagctgaaagaattagtaaaaaaacttagagaatttttttaaagtttttctaggctagaaaatccaatttagatttttttatctaaaaattctaagttttagttgaaaattcttagaaaaattttttttttgtacgagttgccattgatccaaacaaagagattaataaaaaaatatggcgggccacctctttgaagttgttgacccattcgagattcagtggacccaacaaattattgcgatgtaatcgcttcggttgtccattttttgtcggagtgtgaagccatttgaccaaagcttggccagcagttgcattgggtccatcgtcagcaattccatcggagaatagagcaccagaatcgattgaattcaattgatcaagatcagtgagaattgttggcgatgtgcgacgacgcaaattgtccaaatgatcgccatcgtcaaagcccaaatgacgaatgtttgtcgcaaaaattggccaaatttcacggataaaaacatcccaaatcggttggacatccgtatcaaatgcatacacaaacactttcaatttggtgccatttctgtcccaaattggcttgttggaacggagaaatttgatcacggaatggtcaatgtagctgaaaagggggaacaatgaagacgacgaccaaccatattaattggtttccgtataagtttgatttactcaatccaaaggaaacgaaaacggattttgtttggcagcgaatggtccgacaacggaaaatccacaaaactgccatcgatctgtacagacagtttcgcttttggtcctttgtccttgcgaattacgacacttctccaaattgtcaattcgctttttctgtcgaaatgcgcgtccaccaaaacatcgaaacggtcggaaagcaatgccattttgagtccgagttgggcatggtcaaaagatgggagaatgtccatccacacgtcaccacaaatccaactgaaacatgggaaaaaatagcaaggaaaatgaaaatttgtaatttttcaaaagaaattgctgaccgtcgattcattttggtggttcaattagcacgcttttccctttttccaattaattaatttgtgtgtcacaaaaggcaaaaaatttgttgttaacttaaaacagagagaacaattagaaaaaatgagagagcaaaaaatttgcttattttagagaaggtaaattgaaaacagcaatttctcattaaaaatttgaaattaccaaaaaattatatgtgcataatctttttgtgagaaagaggagaaaaaagggcagttttatatttttatatgaaaacattagcgtatgtttgagtaccggtggtgaaaatgaaaatgccaataatttggcgagaaaaaaatgagaaaagctacataattgataattggcagggctgcaaaaaatatgcacgaaaaatggccaaaatatgcgcataaatatgcaaataaaatcgtgaaatatggatcaaatatgcacaaaaaaacttgaaatagtgcacttgccaatgagctgctacatttcttttataaaattctctttagcaaatattgacattttttaaatcaaaaattttctcatgaaaaaaaaatttgggggaagaatttttgagaaaatttccaatgcttagtggtgtttttaaaaattttcggtcgattcttaggggtgtatttttctgaattttagggccgattcttaggggtttccgttttattgaattttttttaacaaattttccaaaatatgcaaaaaatctgaaaatatgtacaaaaaatgtcaaaatatgcatgaaatatgcaaaaaaaccctaaatatgcaaatatgcacaaaaatcccgaaatatgcaaataaaagtcccaacttttgttcgcaaacacaaaaaagaaagtgtttttcctgttatttagagcatggagaagccagaaaaaaaatgcatgttttttgcagccctgctaatatgtaaaaaaaaatcccaaatatctacttataaacttataaatctattattgtacacaccgtttcaattttggcctcccagttccaaaaagatttgcatgtgtggctcagtggtttttgtaagatagtaaagggacaaagggtggtggttcgagcccgttgtgcaacatgaatattttcatttatttttgtccaaaatattaaaaaatcacgatatttggtaattatttttgaaggtttttaccaaccaaattggtccatcttgacatcattcgaaagctcttgatgaggagaagctttttctaagcaaatgctaagcaatttgacatctcagaaaagagtagtgagagtttcaaattttcataatggtttcatgcaaaaacgggatgtttaactcaaaaaagtatttgatacgttctatgcagaatttttttctctatcgatatacaaaatttgaagaaaatctgttaacgtaaaaaaaattttcttagagagaagtaaattcgggttttctctattaacagagataaagaaatagtacgccaaaaagagagatgtttttttctctgcgctctctctttattggttcatctctcgttttttgaaacggtgtgt

SEQ ID NO: 3854 - DNA, 6304 bp, Heterodera glycines
agaaacaggcgatcagcacgtaaacaaggccgaggactgggttttgcattttcttctgtgtgttgctgggaacttttcaacaaattaccttcggcttaatgtgtttaatttgtaccaattggcgaaggtcccacgggttttgtcgattcattttgaggtgccgaaactgtcgccgttgttgtaaacggatcgtctggcgtcaaaagactgaactcacaagcattctccctggtgcactaaaaagtaaaccagaacagagagaatttttaacagatccattccgagtggattcccccccccccccctccaaacgatgccaactcacatattggacgagggcaaccccggcgaccaaaatgagcagtgccccccattgaattatggataacttccgcttcaaaataagcacggcaaagaatgccgtggtgagaattttaagttgataagtgacctaagaaattggcgttagtcaattcacaaatgccttattttaccatataagtacccgtttccaaattttcaattgccttaattagtattttgaagacaaaattaatttattaaaaacagaccaaaaagatcaacaaattctggaccagataaatgaccgccggaacaccaacttttaatgtgtccaaacaatttggcccaaagtgatggtaaagaattttgaaaaacctaaattaattgaacgaaaatgaagaaaagagaagagcagacttgcacaaatcatttgtgctgatgaagaacaaaatcaaagacacgcaaagtttgacgagctcattgaacaaaatggccacctgaaagagtatttccgcaattaaatgcattttagcaaaaaaaaaatccatttccggtttcgagaagcgcggaagtcccacgcgagtcatggcatagcgagtgaccaacacatggcaggcattctgaagcacaagcaccagcagagacacgtatttaagcagaattggacggatggactccctccctaatttgtaaggtggaaaatactacaccaaaaaattatttaaatctcactgatttggaagtgatttagtaacccatgcccttcatcctcttccgttggttgcttttcgtcatccttttccgttgaaacgacctgcatattcttcgaggacaaaaatttgattcttaagaaattaagaattcggcaaaattaattatcttaagagttttcatggttggagaacccgcttcaaagattcaatttcaactcaatccgaactggggactcgaacaaaaactcaaaaaattcattttcaggaatttgtagcattgtggtccggaaaataaattatatttttgtttcaaaatcttagtaaattagtgtgacgtaaaaatttgagataaaaacaaaagaattaaaaatttatttaaaaaacaataaataaaacatttttagcatgaaaataaattaacacagatagtcaaattgatagtaccaaattcaaaaatgaatgaatgataagtgaaatgaaagccaataaaaatggacaaattacaaataaaatataagacatagtcgaggctagaagtccaaatcacaatatttattaatcgaattaagaggcagaaattttttaaaagtcaaaataaattttaaaaaatcaaaaataaaatgctttgaaagtagaaagaaatatcaaaaattatgtatgttgagtaaaagcagggctcgcagattttaaagagcagaaaatttgtaaaagaaatgacattgtccataattgctctgacaatgagcatttttaacatcgtaattgactttttatttgggaaaaattgggctaaagcctcatgtctacgaagcttgataaaatcaattttttggcgaaagaacactggacgaattcgatgaatctttcaaagacgaaatatgtgacgctgacgaaaagtaagaaggacgtgaagcagaggaagacccgtaaatgttgaagtggcgaagaaaaatggaagaagatgagtagaggaagatgctctaaagtaaaggaaagggacaatagaaatttaaaaatggaaaaaaatagccaaaaaggcaaatgctcttcaaaagccaaaactgagagcagtccaattaccataatgacgagcaaagcaccaagtgtgaaaagtaggtttggctgaaacccgaagaactgaatagagccaagtgtggccaaaattatagccacagaagtagcgaagttcttggcgatattatccgcgtattttatgcaaacggccaccgaaagaccaccgacggcgtaccaaaacgaagtcagccaaacaacggagtcccaaccgtacataaagccatgctctctaattttggatccatcctacaaaagagtggcaatgaaagggagccaaaggacagaaagtgcgacttgaacaatggcagcaaagaaactggcaggaattgcgaagaccgacatttgtacattcttaacgaatgggggggtcattcgagcgaaaaggtgccaaccgattgatgtacaaagggaggagttgggggctaataattgccaaaagctttaccctcccccctcccttgttagaagccaaaatgactccctccccgaggacatcaattgctaaagcttacacgcatccaaagagacacaggcgcagagcccttcaaaattttttcgaaaaaaacacccgaaaaccccgaaagaccacaagcgattgacgcagcaatgaaacctgaacaatagaaaaatcagagactgaaaaatgttcgctttgttattattaggccagaacaagtcagcaaatgccaaatgaatctcaacggtttctcggcgagtcgcccgccggtgccattggtaaatttgagtaaaaaagtgagtgacccctcccattccattccatcgccccttctccccacccgtcaacacatcctgctcaattgctaagtgttttcggttctccgatttgcgaggctcttccggctgaaattgcacaaaacaaacgccaacgaagagaacgcatagcgaaacccattgggcacgagccaacgaacgattgagcaaaaggatggagaaaatggcggcagaaaagattttcaattgggagacaatctgaagaagaaacgaaccattagagggataaataaaagggtacttatgtagtttaggggacagatttcacatacatttttagattcatataaatatgttttagaaattaatggccataagggcgctactgtaaaagtggtcccttttgaaaatttttttcactttttttcatatatttttattattattttttattacaattagcattattaatcacaaaaaattataattacgatgtaataaattgacaaaagccttaaaaacagacaatcctttagccctagcattcaatcggaaaatttgttcatgcatatatgattctgccaatttcatactggtgtcatgaattctttttgttttctgcttcaactgggcccataatccttcacatttgttggtgtttttggcacaataatttgttttggaaaagtccgttgtgtgccaaaaattgtaaaatctcttcagagtttttggaaaaaagccatctcaaatttatatcgtccaatgttggaaaagcgatgagcggcagattgttggaatcattaatggaatatcttgaaactttaaccatttgctaaaattgcatgaaaaaaatcatttataaaaaaaatatatgaaaaaagtgaaaaaaattttcaaaagggaccacttttacagtagcgcctaaaaaggtatgtgaaatctgtcccctaaactacataagtaccaataaaagaaagaaaaaagaatatttccatgaaagttgcggcgttaagatgagaagcggcggtataaaaaaggttgttttggaggatgtaaagcatcgagggaagacacactttgagagtgtccctcggctggtcaaagacttgtcgtcttatcagaccaaaagccctaaaagaattccaatcaccaaccaaatcgcatatttgggagttggggtgcgatagtctcagcgagtgaatttcaaatgaaattgttttaaaacgctaaattgagtgcacccctttcaacaaaacccactcgaaaattccaccatttgaatgatggcacaccataataagacaaacagacaatttgatgacttcagtccaaaagacagccaccgttgagaaatacatggccggcacatccctaaccttaaaacggcaagggaaagttgggacggcagtcggagtaaattgtctttttactctcgaatatctaagcaatagcgcatggacggcgttctgaacagtgagccaaatgagcacagcgaattttatggaagcggactgaacgccggaagggcgttcacgacgaacttcaatgcccatctgagggagaagggaagcaaaactaaaacatcaccaagaaatttcggattttgttccaactaaagacgtttctgcaccaacttccaacaaaacttaagtcgggagaagtgaatggacgccaaatgggagacggattggatgaggggggaaaggaggggggaggggttatccgtcgggcgtttcctcaattctctgattggcaggcgataagatctcaaaagtagcgttttaccgcctcattcaaaatcgagtaattgttgatgttcgttagatggagcaaggaaatgggacgcattcccattaacataattaagcaaaagcaaaaaattagaagcaaatgaatggcaaatcaatccctttttcgtcagtggtcagcaaaagcaaaacctttgaattccaaaacaaaacatagagaacaaacatttttgatgcaaaaattcagccaattcttttcaaatttgatggaattacgactagtacatagcctattccccatgtattttattaaaaatatttttaaatgaattagtacaaaaacagcaccggtatcctccgcaaattgccgttttcttccgtcgtcccacaaatgttttttgcgctctctccacttccatctttcaaaatcggcccattcttttgcaatggcgtttcactatcatttgggaattcgtcgtcaactaaaagaagggccgtcgcatcaccacccgtcaccttggaacccatgccaaatatctttgattagcaacttcttgttagcgaagacaatcgcattgaataggaaatgatggagcaaattccagtcaaaattaatttaggaaaaagaaatttttaaaagcatttatagcgaaagaaatttgtcaaataaaaaatgttttatgaaaaaagagaatgtcttgcatgcttttcattcacaaaaacgggttattggtccgacctccgccaagtgtgtcgatgtgctcaataaaagtggtccgattaacgcgacaggcgtagctgcatttattgcccccacattttttgcactaaattttttttgttgcctactaaattttgcttttcgtcacctgatattggcatccattgcacttttgatccaagcaatcgcaaaggtccacttctgtacgactcggcaggacgagtcgccccttattgttgtagcggagtttggatttggcagagcgagtttgtactaattcgagaataagatgaattatagcgaaaaaaaatttatgtttaaatcttttctatggtaatttcaggtgctgaaaacgaatcttacatttaattaaagtacagattttacgtgaaaaaaacctataaatttttaaattcaaaataaacaggaggcaaactaaaaaatacattttaaaaagattgtgtaatcataacactggtcacgtcaaatttcaagtaacttacgtaaagtggatgttaactttaaataaatgtcagattcgttttcagcgcctaaatttaccatagaaaaaatttttaaaaaaacattttgtaagggggcacaaaaaagataagaacctgggcggccgcaaagttgaggttcaataaggaatagtcaaacggaatattggggtttttagagcattttaccagcctcaaaagagttctactttttaactgaaccaaattacaagttttgaatgtttaaaatttcacttttttggttaaaatttttttatacattttattattaccatcagaatttgacccgtccttcttggccgtacgttttctcatgctccgtcgatcggccgaaggttcggcagatgtttttggttgttgcgcagaaatgacgacagttcgcttagcgcgtgaaggttcgggcaatgtgcaacgatagcccgggttacggaaactcaaatttctcagttcgcgatgcaatgcagcagaagtgccttaaaaacgaaagtaata

SEQ ID NO: 3855 - DNA, 1266 bp, Heterodera glycines
agattgtcatataaatcatgtaatctatgatttttcctcaagtgattttcgtcaaaatttttttgatagattttcacttttttaccgttgttcaaacagtaaaaaagtgaaaaccaatcaaaaaaattttttgacgttaaatcacttgatgaaaaatcatagattagatgatttatatgacaatctgatgtcagattcgtgatcagcgccatcgataacccccgagtagttcttagaattgaaaaaaacgaccttttttgcctttttttatgggaccaatgatgtgaacgattacccatttttaaatgcctataaatttgttttataaattgatgaaaataagttttacggggtttttcgggtcgctgaccatgaatccgggctcaggtcagcgctaccgttcactacatgagctgtacagggacaaagaattgataggcttcctgtaccaagggtaccctcatgggcagatgccaatgaggatatccatccatataaattttttaattcgattttttgttcgggttcgggtcaggggtacggaattggcaaaaatggatgctgttttcgtggtcagcgaccccaaaaccccttaaaacttattttgtttaatttataaaacatatttgtaagcatttaaaaatgtgtgttaaaagtacccggtaaacttaaaaattacccagaattggaatctccgacccggaaaatccctaaatactcaatttgattgcacattttaaatacttttatatagaaaatattcgaaattgtggctgccaaagaaatgtgtgccatatgtcttcaacagtaaaaattcggaacccgcatgatcccacacaaaaccaaacttgcagatcccgctgagattgggttttttttatatttattgcaacatttgcgcatacctatgcttgaaattggcttttctgtttttttcaattataaattcaaatgtattggggaacaaaagaacttaaatttataaaaaaatttttacttatattttcattgccgaattctgcaaattttgcgttccatcgacgaaatctctaaatcgaaaaattaaatcaatacaatcattgtcatatgtttagcgagttgtatgacatttgcggtctgctgaaaatcggacatttgcggcccatttctcaaagaccatttttttcttaaccccggactcggattcgaacaaaaagtcgaaaattcaaaattttcaaaattcacttttacattggcatcagtatagaatgaccattttttgatgtt

SEQ ID NO: 3856 - DNA, 8990 bp, Heterodera glycines
  unsure (1)..(8990): unsure at all n locations
cttcaatttaattgaaaaaaaaatttttctcataaatacacaagaagagaaagaaaatcttgtgttttatattttataaatactttgaaaataaaagaatgaaaaatcttgccatcaaaagaatctattcacaattatttttttgtgttatatcaaatttgctaaaatttaaaaactattatttattcgtgcttcttaaatacattgaattcagaaagttattattattacgtgttaaggaaaaatacgaaaacccattaacaaaataaaaataaaatttaattacagttaataacgctcaacaataataaattaaaaatgataataaattatacataaatatcctctgaaggaaaataaaatcccttatgggtaatcctcataatataacaaaaatttaaaactaatttaagaattgcagtaacatcaattataaccgcacgagaacaagagatttatgataatatataaatatataaaatgaatcatttaaaattttataacaagaaattagagtttgataatttaaatgtaacagatattcaaatgttcatgcgagaaataattatctgctaattaacaacaaaataaatattgcaatttgatttcaaagacaaatattttattgatataactaattcgggtttttaaaaacatatatatgaacatatttggcattttttaacacatataaatacggaacctgctaattaacgatgactctctttatgggaattgtagacatttttgaaaatattatttatacaattcgccaaaagaaatgtttattttcaccatnacctttgtcggtggctggacatttcgacaatgaccgtttcgccaatgaccgtttcgacaatgaccatttacgactatatcatatcgccaaaatttaaaatatcaaattaaatataataaaatgaatataaaaaataataaattaattaaaaaaaatattgatgaaatttaaagagaaaaatttaattaggtagttatattttttaaatttaatgaatgcattatctatcgcctattgtgtatgattattaatagttaggagtcggatttttaggttttacctatttctagattttttcaatttttaacacctattttcgcacctattttggccttttttggggtttttagcacctaaaaatccgagccctattaatagtgaagaaagaagacaaaatgagacggacctataatataaatccaaaatgaaaccatttatttaacttaatgtagtgtcctctttttacccaggcggcaatcctgaagaatggttgtccctaattttcatttttttttaattttgtgctcaaaaccagtttttaggcgtttttgagggtgctgataacggatcttaactcgggtttgcccaattccgaactccagacccgaattcgaacaaaaaaaaattgtttttttaatcaagaatagttttttcagggtaaaagcttctaattcattatcaactatttaggtgtaaaacaatgtttcaatttttaattaaaaaaaaataagcaatttgcgccgaaaattgacaaactaaagccattctcataatgctattttgaaaaaaaacgaaaaaaaaacttttttatattgatcccaaatccgcaccgtccatataattttgcagaaatttgaattttatttaaaaaaatatatttaattttattgtcgaaacggcattgtcgaaaaggtattgtcgaaacggtcattggcgaaacggtcattgtcgaaatgtccgggagccatttatttttattaatttggattaattattggttcttttttggatcacggccattgaaggttatttccattttaatgctgctgcgcatcaattggttttccaaatataaattaattgtaatattttatattttcataaatgtatgcattgtaattaattattactatgattattattacttaatattaatttcacatgatttcaattataatctttgaaaattatttcaatattcttttttttttgtcttatattttggttatattttttactattatatatatattattttgatttcttttttcaatttcattaaattatcataataacccgactgcttagaattttgttaatttgtttttcttatttaattttctttcttgtttttctagttttgttgttattcaatataattgcacattattaggttagataactaaatttttaaattgtttagaatgtttttccattttagttaattttgtgggttttagtgtataaaaatgttaaatttttagtgaacaataaaaattttgaaaaaaaatgtttcagtctcgagtcaccggaattttcagtcttgagcatatttacattgacattttttaaatttctatttgcctgttaataatattattagcgatggaaaataaggaggcctgaggctttctaaggaattttaaaaaaactctaaatttgggttctccaggaaaataaagccagaacacatatgtacacttaacagttagtatattatatttaattatttaagaagttaactatttttcatttttattttcttgtgttctattttttgttcttattatgtatttttaatgtttgtattttttatggctgttattaatttttaaaattattttatttaatataataatttatttttataattttgatactctattttttcttttatttaattatggttatggcaagatgatcatgctttctactctaatttatacataaatatttgttatcattttataaatatcaacaaaatgtacttatcgtttttatctttgttgattattatttttagtaattattatactgctttattattattatcatataaaaatagtaaaatggatatttttgtttcgttatattaaaaatattgtccgattattcttttttttttctttgctttttaataatttcgtttaaaataaactgtcaaaataatgtattggtataataaagctgtgcgattttttcatggattttatttatcaagtgttagagtgtcggtctttaattaaacaaaataataatttatttgaattaaaaatatatatatattaagtagaggatacgaagagctatagcccaatacaaaaatttattaatagattaagtttgagctaaaaacggcgccgatcaagcaaataatagctatgctttttaaataattacgaattttcacttaatcagaatttagtgttatttctatttaattccgattaatatttttgggaaaataaagaatatttatttatgttcacagcaggattgttctggtggttttatgtccagcaccattttcaatctctgttcgcgttccaattttttaaaagtcctggctctaaatcagggaattattattaatattttgttttccctgaatcttaatagtattcccaaaatttttaaaaatattttcatcatttcaaaaatcttaagagtttttcgaaatgaaggctgggtggcagtttttaggaaacgcactagcaccatttttgggcaccgtaaatattattaaggtttcaataaataaccacttatttttggttttgtttttaagtatttcgcaattgaaattaaattaattttttttggtagcaattattttctttccctttttaatttatcttttaaatctcatgttttcccaattctttcatatttctgggagaattattttcatcgtatacatttttataatatttttatttttgaattaatttcattttataaatttcactagcatttcaattacaacaataattatattattcaagaattaaattttaattttcggactattcttaaatatttgtttcatatttaactgaataaatgttttttttaattttctttagcttatgctttactcgaggtatagtttgactttttaaattagctttaattttttattctttattagttgattttgtttaattttctggctactattcttaaatatatgttcacttcgtatttattttttaatttaattaaaatcattatttttatattttcataaaactcatatttttcgtcatgtaaaatttttcgacgaaactcaggattaattaatctatgaaaaatattaaagatgcattttttgtttttatgctttctgcttgttaatattttaatgcatttctttttatttttaacttttacaaatttgatatttatataattacgagaagatcgttttaattaagtggtcgtaaacggtcgaataatttggttagacataataatctgcttttttttatttgatgcatttctctggtctatttgcgctcaaacacgagcggttatataaatttgttgttaattgaaaattatcattttgattttgtctatataattaatttttgaactttacaattttattatttgatttttttgtgtctttctttgtagtaccatttaattattaataacaaaaatttaggtatgtttaatgaaatgatattgaaatgtttttaactttcttccattaaataattgcctattaaatggtttatgtaaaagtattcaattttccatagactaaaatgattaaaaaaaagttgaattttttgttatttcttttatttgatcagcataatttttttcgtttattaattatatttttgtttttagaaacaattaatagcaattattgattacgcatatttttctcgtacgtacgataaaaattttctctactttcatggcgtcacttcatttttttactttttaaaaaaataatatttgttcttttctttagattattaagaaatttaagaaaattaccgcttaggaatatgcatttgaaaaatgatatagagtgagggatgcgcactgtgccccccagaccaaccgcaccgtctatcccggatggaacatgggagggaatggggaaagccatggccagtgactaagccccaaaatcccaacgactcattgactgtcgatatatttattcactcgttgttggatttacacgaagcgagaaaaggaataataattgaagtctgttccatcacaactaactgactaactgatcactgggggaaggagaaatgcgaagagaatgggcggagaaacattacagcgagaaaagaaacgtgtgaacggataaaatgtgattgaattgataatggccaatgggaaataattaagaaataattaaatgagggaaatgcgtcgaataacccttacaacttcccccttcccataggatcgtccccgatcctaaatgaaaaatgaaatgaaaatgaatgagacggatccaaactctcggcttcgcccttcgtctttccaatccgaacttcctcggccaagttgcgcattgaaataatgagcagcgcagtccaccttcatctcagatggatggcatgggaaatcgaagaaaagcaaccaggggtcattccggtttggggacgaaattaaaagcatgatgagaggaaagaaaaaatgggtccgagaaagtgtgaggaaaccgacgcattttaattaattttgagtttgagggaattataaaaaaggccatttaacaattcgaaataaaaggaaaataaatgaatatttggaaaataaattggacagtagagagagacaaagcagaaaatgaaattgacaaaagatggggaaaggaaaagaaggaagtccatgcgcatttgtcgttcatggctgaagtcgtacagcttggccttctttattcatctgcgcgcaccagaagttgaagcccgttcacgagtgccaccttgagaaagataagattagtatctgttctccgcccccttgactcaccagagttgttgcaccacacatttttaccgtattagctgtaaaagagctttgaccgtactgcaccgcccttggccgagatcacctgtccatccttgtcttaatagttgccggggttgttgaactgctcggtcaagtactccgggccaaccattgtcgtctccgccgtcgcttggtccaaatatcgtcgccacgtctcggtccggttgagcagcagcacgtcgccgaagatgatcattctgtggctagcctctacttatgggttcaggctcagacttacaaatgtccaagttcaagcagttcactttcactgctctcactttccacctcttcttccattcctttccgtgggcagctctaccattaagctaccgaggcacatccgccctttcttttatggatcttatcaacccccgctttccgcgttttaaccgcccagccagcttcttccttacagctccatcctcatcgggaccggtccctcggtccattagttaattgctgctggcgcggtggggcaaccatccggtgctgccaataagaaatgggcaaaatgttaaacctcgggtgggaatcgaacccactcatgcaccctttccgtgggcagctctaccattaagctaccgaggcacatccgccctttcttttatggatcttatcaacccccgctttccgcgtttttcgcccagccagcttcttccttacagctccatcctcatcgggaccggtccctcggtccattagttaattgctgctggcgcggtggggcaaccatccggtgctaccagtgagggatgcgcactgtgccccccagaccaaccgcaccgtctatcccggatggaacatgggagggaatggggaaagccatggccagtgactaagccccaaaatcccaacgactcattgactgtcgatatatttattcactcgttgttggatttacacgaagcgagaaaaggaataataattgaagtctgttccatcacaactaactgactaactgatcactgggggaaggagaaatgcgaagagaatgggcggagaaacattacagcgagaaaagaaacgtgtgaacggataaaatgtgattgaattgataatggccaatgggaaataattaagaaataattaaatgagggaaatgcgtcgaataacccttacaatagttattataaattttcagattatattcatcgccgcatataatatgttcaatttattaatttaaatatttgattttatttaattttgagaaaattcatttcatcagcccaattttttgtgtacttttgaaattttcatttgtcacttttcacattcggtaaattttatcagaatttttcagtaaatttttttgcaaattatttattaataggcattttaatatttttttctatcccttttttgtctaatttttaatttttttttgtcaatggtttttttatgtccttcaatttttatgcttaatttaagattgaaattttcctttttttgaatttaataatttttagctgcttttttgttgaaaaaaaatgtttatatttaaatattaataacatttttagctactgtttcattcactttttaaccattttatcgtcatgattcaatcaactagtttgtgcacttaatacgcatagataacagggatgggccaaattgaaaaataaaaagcgaaatgcgaaaagcgaaatttgcgaaactgaaaaatgcgaaatgaaaaaaaagcgaaatgcgaaaagccaaaatatgcgaaaagcgaaattttttctacaactttttaatagttaaaatcataaagcaaaaataattttttaaaattttattccaaatttaaaaatcaataaaacgcttttttgaggcgcgctttttccaaaaaaactttttgggaagagggggcaggcgccgccggcggggaaaaaattggaaattttgatcattataaacagtttttcactgaaaattagccaatttataggtaaaattttgaaaaattttatgggaatttaatccaattcttaggggtgtaaaagtcgcatttcgcgccaaaaagcgaaatctcattatgttaaaatagagtccggtaaaaaaaaatttccgggagcgggagcgggatcgggaatcccgtgaaaatcccgctcccgttaaaatcccgcagaaattttacgggagtcccgggcgggagcgggagtaattcgaaaatttaattaaaaactaacaaaaatatttttaatgcacaaatttgaaggaaaatcaatttattaaagaaaaaatagatagaaaaatttagtaagcagaatttgaaattaaaaaatcatatttatgggtcgaaaatcagtgttttttcaaattgcttcaaataaaaatttttaataatttatttgttgactccctttattaattttaacaattttttgcggcttattttttgaaaaaactttttggtgaccagggaggaagagggaggccggcggtgccgataggcgccgccgggaaaaatttttttcaaaattcattggtattctcgctaaaaaaaatccttcaaaaagtcaattcttaggggtgtaataatcggatttcaaggcaaaatccgattacgattatccgattccgattatggcccaaaatccgattaattgcgattccgattacgattccgatttttttttttaataattttttcccaaaaattttattcataatcaaaatcataaattttaagattgtgatgcaaaaataagtttgtccacattctcaggcaataaacgttttctcagatctgtcacaatcaacccagcggtggagaatattcccagatatttgacatttttgctaaataacaaaaaacttgattatatcggggagaattaacccggcactgctttgtgagaaaaatttaatttcagtcattatgttaaaattagattaaaacattcgtttcagaaaacattttttttcaaaattcattggtattctcgctaaaaaaattccttcaaaaggtcaattcttaggggtgtaataatcgaatttcaaggcaaaatccgattacgattatccgattccgattatggcccaaaatccgattaatagcgattctgattacgattacgattccgattttgaatttttaaaaaattaacatatggcacgtataattgaaaaatcttcataatttttt

SEQ ID NO: 3857 - DNA, 611 bp, Heterodera glycines
ggaagttaggaggccatttttgaggctttctaagaaatttaaaaaattaagtttacttatttttcattcatactttcttgcattctttttatttatctttaatgtttatattttttacggctgttataattttaaaaattattttatttaatatttataatttattttataatgttatttttttcttttatttaatcatggtcttgacgatagcgattcgacgacgatgatcatgctatctatggatattttagtttcataatatttaatcatttctgaatattattttttgtttttatgaatttcgtttaattaattttaaaatttttaatctatttatataattagagaaaattaattgtttaattaataggcagaaattatttttttcataataaacagcttttgttttttcatactccttggcatcacctcatcaccttcaaaaaaaagaatgtaagagtttttgaaaaaattagcttactttctttacgttttaaataattttcaattctttttaagagttttaatttaaaaattattttccattttattaaaatattcagattctatgtttgtgaatttatttatataatttggatgttttattt

SEQ ID NO: 3858 - DNA, 4999 bp, Heterodera glycines
aatcagtgggaattaaggccaaggcaatgccgtgctgtgccggtgccccttttttttaattgtctcggcatttatggcaaataatttgttccattttctcttaagaatccattggccaacacgtgtgcactgagctcagaaatcggaacccttccctcttccgaaagcggtgcaggtgctttaaattcaaattatacttttaaaaattaaaaaataattatgatagtgaaaataatattgtaaatcgaaaaatacatagtttattattcaaaactcaaaatgcttattagccttttaaatttaaaaattcattgggttaaataatatatgccttccaaggtcaataaataattttgaattttaatttgatttaaatgacctttgtagcaattaaaatttagaatgaatggagtccaatttttagaacggacgcggactttgccattttgcagtgctgccgcagctgtcgcacaaatgtggccgagttgggccgcgaaatgttcgcgacgggggtgaaaagccggcactgttttgaccggcacaaccgccaattctgcgcccattttgtccatcaagtgaagcagaattgatgaattaatgacataattaaaaagtaaaattacaatacataagacaatcattttaagtgatgctcgaagagtttggactcatttctaagaattaataaatttttacataaatttaattaattttaaaattattttttgtaaattaaaataaataaatttatttttggtggctatatttaagttcctttcccatttctctccaagagtggcttatgggcaacaaatgttggcaaatcggtcaattgcaacggggacggtgctccattggcatgccattgcccttccgttttgcttttcccataaaattctcttttaggcttttcgcgtgtgccgtcgcagttgtggcttttgcgaacccgagctgtaccagcagcaaaatcaaaattgcatctcaaaagtgtggaaaatgaccacaaatggcgcaccaacaacaacgaatggtgggtgctttaccatcggaaatttcagatttgcggatcccgctgttggattggaactcaaaattttgcaggacgggatcacgcgggattaatccccagaattttccaaaaaatgcgagattgcggtctgtcatctcgcaaaatcccgcgcctggctcaacatttagatgcttaattcatgctaattaattgattaattatgtttaattgcccaaaaatgcttaggcgagcgttggaagtcaaaaaaaataaaaacgacaacgccaaaacaaccgcgtccatttacattcccaaggagttcaagcagtacgatgaagcctaccaagtcggttatcgcttcgagcagaaaagcaacaacggaaagtgcaacaaggcgcagtaaggccaaattttggcgaatatttcgactgataagcggacccgaacagaatgggctatgccccccccccccctcatagaaaggggtgcgatttgccaaattcgcaaattcatttttggcatatctttacaaaaaatctcaaaatgacattttttcgtctaaatgccgatttgattgcatctccatccctccgcttcaggcactgctccttcccgaatcgttccgccgttcacacgtcggccaattcgtcctcctcctcggcttcttccttgcactgttccgcccctgcctcctttgccttccattccggtgccaacagcggtaattttgatcacttttccccattcttggggccgttggattttaatttttaaaattagccatttaagccgtggagtccgtccacgtgccttccgcttgagccgctggcaccgctaaaatcgctgacaactgccaccatcggcaccacaacatattcggcaccacggcccgagccaacaacggacgagtaaaaaaaaaagcatgacgcaaacaaaatgtttgccaaactccgttttttcgcaaattcagtccgtttcccttgccgccattgtctcccattgatccccctttggccaaccgtcgccggtcgggcacaaccataacaataacgtggaaaccgtcctcatcaacgggtggcatatgcccagaggtggtccaagaaaagtgtacattgaaatgctcgagagttaattaacaaattagggaaaataggaaaattatttttctaattagtgacgggcgaatgactttttaagttgccaattccattgccggacgaaatcatcgaggcaattctgaacaaattgtcgggtattgacgacaatggcgattacaccattggcgagtgcaaagagtgcggtgaaaaggcgcggaaagaaaaagagggagaagagagtgttggaagcatggagagtgcagagagacgagagggaagagaaaattcagcagaaaaaagtgaacaaaatggcaaggaggaagcagaagagggaagacagacagaagaaggggtggcccaactgattttggacattcttctgaaagcgttcaaatgggcggggggagagagtggggaagagagaagagaccagcagacggacagagatgagcgaaatgatcagtggaagagagcgaagtgatcagtggaagagagcgaagtgatcagtggaagagagcgaagtgatcagtggaagagagcgaagtgatcagtggaagagagcgaagtgatcagtggaagagagcgaagtgatcagtggaagagagcgaagtgatcagtggaagagagcgaagtgatcagagtaattagtggaatactgatcgaagggcgattagccatggaaatctgtcatgattaaattgttaaaaaattcatttatgaaaaaagaaattgggcatttctgtaaaatttcttttaaatatttttataaaataatatccaaaaataaataaaacaaaacgatggaatcgatgaatgaataggacctgggcagacaaaatgaatgaatgaatgcattgtgtgctgattgaacgcggcagcccattgtgtgccggcttatccaaaattaattgacagcaattaacgacagataatagcaaaacaattattattacccatcgaaatgcattcacttttcatcattttttgttttttcttcttccgttgcgtttttgcaacaaatggtaattggaaaatttccattcaattgaattttgtggcataattgaattgttacattaagaaacaaaatttgggagcgatgccgacgaaggcacttttggcaatggcacaatggcaaaggcacagcaaagtccgcgcatcaaatggacagacgaggagaaaccgacagcagacgaactgctgcaaagcacgcaactgttccgaacggcaaatgcaaaaagggtaaaaaaaatggggaagaaatgatcactgataagtgatcattgatcattggggcaatccctcagatgaaatgccaaaattaatcgccatgcattcaaacagtttcaaagcttaatgtcgtcgaatgaagagcgggcaacgagagacgaagcggcacggttgagaagtgtgaccaaagaggtggaggaaaagcttggacttgcgccatcgccggggacaaatcgccaagggccaacgacatttggcatcagtaggaaaaggggtaaaagaaggaaacgcggaaaagcacattaaaaacaattacctatattatactgaatccttattatattagtgttaattaatggaaataaaatccgtcaattaatcagctgatttgtacccttcggcaaatgaccccccggcactgttacggcgttttgttggcaccggtgaaagcgccgtagagcttaagaggtattttattagatttaaaactttaaaattggaacgtgccagaattcggtcacctccaaacgctttggtcgcttctctgctacgccagcaaagagaattgtcagcagtgcaaccaaacattatcagacccagcgttggcaccggcacttttatcggtcctttcttcgctttgaaaaatgccgacaaaaatttgggcgtttaaaaattaaacaaaaaaaaattaaatttaaataattaaataaaagaaattatagctcaacaacaacggcaacaacaacaccagcttgaatatgagcagcaaaggctggttgaacagcagcaacagttgcagacactgctccaacaattggccaccgttcagcgacagcgccaattgcagcagcagcaaatgttgatgaacagtcagaggcaaagtgggcaagccgttcagggacgaaacgagcgcctcgcgagcagagcaagcagtagcagcagcagctcttctcgggcagctaacattgaggtgggctaaccattagccgcgaaagaatccaaaaataaaacgataccctactaattagtaattactctcatgttgacagaaatttccgcctccatttgcttctcccagcttttttgggcctgctaacaacccttttcaacctccaccaccaatatctccaccatcatcatcatccgcattgttcccgggaaagtttttgccgagttcggcatcggcttttcgtctccccggcgggttgccttctccaacagctcccattttcggcggagttcagccatcagattcaaaattcgctgtccaaccgtcgccaatttcggcgccgttccgtccgatcagtagttctgtggactctgctgctgatctgtccgcacttctccaaaaattatcttggaataatcccacaaatcaaaatagcggcaattcggctaccgtagttgtgccgatccctacagtactgtcgaacgcggcgaatcgcggtggcgccgcacaatttgtggtgccaaaaccccaacaggaaaggccattggtggtcaaattggtggcagcaggcaaaagtgaacagcagtcacagcagcagaaccctaacaataacaacaacaatggtaatgacaatagttgggattactatatttaatgtctttcttactgtagattgagaattgtttttttaatatatcaaattggaattttttt

SEQ ID NO: 3859 - DNA, 2776 bp, Heterodera glycines
cgaaaaatacaccccctaagaatcgaccaaaaaaaattcggaaaaatacatccctaagaatctacctaaacattttcaaaagaaaatagacccctaagaatcgacccaaaaaatttcggaaaatacacccctaagaatcgaaccttaaatcctgaaaatttcaaaatttacttcatttctaactgcaatcagtgaataaaattttacatagagaaaaaagaaattttaataaatttctcccctacatttgaaattttttcgcccctattttcgtccttatttcgcgaattttttgcccctatttaggtccctattttgcactttttcgcccctaaaataccatctctaataataagaccaaatatcattaaaaatgactaataaaaataaattccccttatagaaaatttattctattcatttggcatattgttatttcaaaatcagtttttactctccaccgcaatccaacaattgaaattttcattttttaaattaaaatttcaaaattgtttaataatatgaaaaatgacacatacccaaaaatggaaaaaatgtggacggaatattacgacaacattttgacgaaaacttggagaaaatgtttaaattaaaggagaatgggacaaaaaaggatatgaattatcaattaaaaactgatgatcattgaaaatgtgtgggactaattagcatttaataattgattttaaatcagttttttacattttaaatggattattgttttattttttgctttttaaaatgacaaacgattttaataatatttttcattggaaaaacaattaataaaatatgtttttttaaattttttttatattacattgtttagcctttctcttcaacttctgcttcgccatgtgaaaagagaatggacggaaattagtggataaagaaagaaagaatttgtgaaagaatgaagaagcatatgtaataagtacagaaagaactataaattatctaaacatttatttaatgaattattgtaagcaaaattataaatgaatgtgaggaggaagtttgggcaccaaattaaggatttaaaatataaaaatagttttaattgtctgtaattgcaatcacctaatttaaatcatagtaaattcaattaacctgcttattttgctagatttattaccattcattctatatcaatgccacacatatgtatgttttatttgtatcattacaaggctcggtctgttcaaagacttaaaatttgatgagtttaaatagaattagatgggtctcttgacatttcgggcccaactaagccggcgggtagggtacatgtcaactcgccgacgcacgactcgccgacggactaatcttttgtttgtaacttttttctttttttaccaatttttatagaattaatgttattcggaagcactaagtgtttataaaatatcattaagcagatgttaagcgatttccaaagagttataatttttattatgcaaaacattgaaaaagatgtgaatttcatgagttttattttctaactctttggagaattatttaatcgtttaacatctgcttaatgatagtttctaaacacttaaagcttccgaataacattaattttataaaaattggtagaaaaagaaaaaagttgcgaacaaaaagattagtccgtcggcgagtcgtgcgtcggcgagttgacatgtgcccgtcaggaagttaataatttcggatattgagtccctccctaacaaaggagaggtacccaagtgaccatgggacttccgaatgaaactttcagggtaggtagattacccccccccctttgtattataaatttttttttatttttgctaaatgaagcttctggccgagatatgaagcttttcctttttgccttttcaatatcattttcaaagaatgtaaagccaatgtgagcgtcggtggcctggtggttgtgccttccatacttttttcttcttctaaagttcaattccccaaccctgtaaataattattttgtttttttttcatatccaaattagtttttaagctttttaatattaataaatttgaacataatatttttttcatttttattttatatgagagaataatttgtctattgacctattttgcttatcaggtaatctacctaccctgaaagtttcattcggaagtcccatggtcacttgggtacctctcctttgttaggaatttttcctaaacttttcccaattttcaatgttttttgggtgtacaatcaccataaaggaatgatctgatcaagttagtgcaagacttttttttaattataataaatttattttttgtcttgattttttcttttttaaacaaatcatttattaattactttatgatttcataaagaaatctgctgttttggctttattttttaaattttttcatggcaaaatatgttaatttaaaacatcaaaatcggcatcgatctgaaaactctttttaattttttttttgtttttgcagggaatgcgctcagaaggaaaagcgccgcgatgaagtggtaaaggaggaagaagaattgaagtgggactgaaaaattgtccgtttgaattgaatgaaaaggaagaaattacctcagggtttcgatcgaaaaatttaaatcagaacccagcgctctaaaatgagaaaaaattgtcattatcccaaaaaaagaacatttctgaccagaacagagatcgaagccctgcaataaaaaagaatcgctttagatttgattatttattcatacacccgaccattcacttaatgaa

SEQ ID NO: 3860 - DNA, 2738 bp, Heterodera glycines
  unsure (1)..(2738): unsure at all n locations
ttggctttacattctttgaaaatgatattgaaaaggcaaaaaggaaaagcttcatatctcggccagaagcttcatttagcaaaaataaaaaaaaatttataatacaaagggggggtaatctacctaccctgaaagtttcattcggaagtcccatggtcacttgggtacctctcctttgtaagggttcattaaaaatatttaatggtttcttttcaattaattgcgttaatgaaattaaaatgccattttttaaatgggtcgtttaatgtgtaaaattaaattaaatgtcggaaaattttaatcaaaagcctatagttaaaatatcataataaattcttgttccagctccaacccaacagcaatcacttgctgattccaatttgctccggggattgcttcaggcattttccaatttgctaacgcctcaggccacagcatcggggggagtgtcgccatcatcatcagcatttgtaccaccaacagtaggacaacaacagcagcaagtgccaaacattggcggcacaaataattttgggaagtcacaattcgtgggtgtaccccaaccgcagcagcaacaagtccaagcagtacaacaacaatcgcaaccgcaacaaattggacagccaaattcggctgtccaatttgttgcggtgtatgagccgtggagaatggcacaacaacagcagcaaattaatggggccaattttattactgcagcaacgagtggtgatggagcagtaccggcacaatcagcagcgggtagagagggagcacatttttctattttaattcccatcctgctgttcagttctacctcaagaagttggagcagtgggacaacttcagcaacaattcatcggctcatcacagccagtgcttcctcaactgccgcaacagcaacaacaacaagttggggcagtatctgtgcttggatggcttccgaccagagcaggcgaaaccaatgcattttctgctgatggactgttttggccgcagcaacagcaacagttgcagcaaaacaactttggcagcaacaacgacaatggcaacgacattttggtgcagcgacggacggcacaacgacgacgcgaagacggacaacaaacaaatggagaagaagcagcggaagaggaggcagaagacgggggaggagcagcggaacggggggaggcagaagaggaggagggggaagagaggaggagagaaggggacgaggggttggaggacacgggcaaatgggggaatgatgtttgacacggactgaaaattcaaaaatttaaaatatttttaatttctggcaatttttttagattttcccgtgtcatttatttattttttgtcatacatacataattattaagtaactgaaatgttcacttaaattgcaaacaaataaatcaccctccaagcccatttttctgggcaaaatgcccagcggacgaccgaccctttgggctttttgcctgcggcaattttcgctgcaaaaatgagtcatttgtcccctcacggggtggccacaaaagtttgtctccacggcttaaaatttgttgaaaaattgcgggtgccattttttgttttatttgaattcagccggcgggggtgggaaaaacggaaaaaaatatgagcagctgtcaaattctgtccatccgccaatccgccgattgatgcccgtggggcaaaactgaaaaatgaagtaaaaatggaaacctcggaggagggatggatcgcccccatcgcccccattgatcaagcaaatccaaggccaaaacaacaccatcatcatcattaagcaccaccaaatccgccccaatcaaacactttctttctgccagccgcggaccggcgattggctggcagaaggcacgggggggggggggaacgcctcgggggacgggggcggggagggcacacgcctttccgtcaccgccgccgaatgatcgatggttggcagcaaaattggctgcaccaaagtgtgggcctttgttttcagcagcaccttttccacaaattgcttttttatttttaattaaaaaaacagactttcattgccccaaaaaatgccattgaaattctccctttttctgttcattttcattgattttgtcggcacttttgctggtgccaatttggcccaacagcgaaaactttgctcaaaccgatgccatcgcctactgaagcggtctttggaacggaatgaacaggtaaaaccacatatgtatatgacactggatattgtacgaccatcacccatttttcaaccttttaaatgcttgaatttatttatttcataaaatattagtaaaacattaatgaatgacctctataacaatttattttattttctctcaggctggtacggtagaggaggtattgtaccgtaccgttgcctacagtcgccagcaattactcgcttcattaaaagaaggctccaacgacgctccggctaaatttgaacaacttcctgaacccttccaaaatatttgctggtgctatggcaaaaatctttagcaaaatttgaaattttaggaaattttttgacttcgaagactgctcaaggcaatgcgaaaaggcatttttccgccgtcggaaaagaaaaaatggccaaaaaacaatggggacggaggagaaggagaaggactcgtcaattggacgagaacagcgaatggtgttgcgcttctgtcgcgaaaacaaattaaatgggtgcaacacattttgaaatttgaatttcaanatttaaa

SEQ ID NO: 3861 - DNA, 7515 bp, Heterodera glycines
acatttttatttttaggtgaacagtgaatgtaacaaatgttgagagaaatacactaaatcggcgccttttatatagtggtatcggtgcttatcgatcggttcttgtccagcattaccagcgagtcgcattcgcccattacgaccagcatcagtccccccactggtaccgcacgattgaattttatgctcaccgcggttgttccgttctttatcagatcaaagagcgcggcttggtcgtcaccgctgcttgtcaagttgaacacatagatacaatgcgttttcccgaattggggaaaggttattccgttgctttccgacgagtttgcgaacccgaccgcctcattcatatcgttgaaagcgcgcacatatttaccatgcgggtagtccaaatcgtaaggggcctgggggtaggaacggccgttggcgatgatcgcaatttcccgcacattaaacggttgaaaattgaacgggctccgcgtgattgtgcccgagtagtcggcatttgaaacaagccccattgtgatgcggcggggaatttggtccatgaacagattggcggtaaactcgaaccggccctgactgatgaacatcgatttcatcatagttttccttactgcataacgtgcaggctttatctcaagctttcgcgcaatgtccagcgctaatccgtccattaatgacaccttcttcacatacattttgagtcccatcacctcgaaacggtaacgaggaacaacaccgccgatggcgggtgcaattagcacaaaatcgttgtcatttggccaaatttcgacatccaattcacaaaagttaatcaagtacagcggctgattgaataggtcggtatcaattttggcaataaattgggctgttttgctttcggcaaacaaatccctgcgttgaatgcagcccggccccgtctccagtgtctcgcccatatcccggtaatatcctgcagcattcaagtgcgagtcctttgctgttgttgagtaggagagttcatgtgaaaaataggttttgtaggccatcagtgcatttgcgttgaacacttcacgcccgttgatgctcattttgatgtttcggatgaatgtttgcccaatcatctggattggcgcaatgttttcgtcgtcaatggtcaggtccataagttgaccattcacattttccttccggattcggaactcggtgagcaaatagcatttggagaggtcaatgtaattctgacttgaatgaagtttgaaatggtagggggtgtcggtcagagggttgctgggaagcagttcaaacacctttgatgaaaagacactgacatttgtcggcggaatgcggaaaaagtccagcgcattggtgattgagttcacggagtcattgtcgattttatgaaatgtcatcctgctggtcgctgctaatcagtagagtccaaaggcgtccgaccgaacacgctttcttgttgtctgctttacggtgattgggggtccaccaattattgtttgatgacttggcgcacgtattcgtcttctttttatacccttctgtccagtaccaaactgcttaggcagtcctcctttgtccagcacggtgtctattcctcgctttccctcggtgaccagcgcctccttaatcggcattccctcgttcccaacgcgctccagcactcgttggccagtgctcaacgcctctgaccctactgtggtgcccacacgacgtaaaatgggcagaaagaagcgccaaagtcctcgaaacacgtcaccaacgcccgctccccgctgtgctgcaccatagcccctttgaaagggggtggagccccgaaagtagtcgaaatcgtctttttccaatccacccccgtattgcatcatcatgtaatcgtcatactgcgcaatgcttgggtcaaacacgatatgaaccatttttattcaaataaaatacaaaatgaatgacgagtgaataaatcagaaatttatcactttcttaaatatcaacacgaccatcgtcgtcccatacgcgaatggcaccagacggcctttgtccattgtgcgcagctcaatatcaatctcattgatctcccgtggcagtactcgcgcaaatattggcgagtcataaatcttctcattataatccccagggatggcaccactgatagacacaaccctgagcaacgagctcagcgtattgccgattatcatattttcggtcaatccttttgagtagaccgcaaagcttgagatgccgccccgtaaatcaaccggatactttgacagttcatttgacacaacatgttgagggttttctaagcccagaacatagcccagctgaggcgagaaggacaagtggctgataatatcattcttgaacaccactttgaaccgttccacatcatcgcgatattggattgacaccgagttgggcacaaattggagtgagtctatttcaactatgaagctgtttactggtaaatctaactcttctagagttaacgcagccgagacaggttcgtcgacggttggaagttgtttttcttttgaaggtaatccaataacagtccccgtcgtaggagaggaagtgaaagttttggtaggagcagttgttgttgttgttggctctggctgaggcggatgtgttgtagaagtgggaggaggaagtttaacagcaggcggcttaggcgatggaatctttggtgttgtagttgttgttgttgtttgaggggttggcgttgttattggttgttgtggtggagtcggtgttgtttgctttggctgtagagcaactgtcgttttaggcttaggtggcggtggcgttgctggctttgttgtaggggcgggtgttgttgttgttgttgctatttttggttcggacgtctgaggggcagatggttttggcgggacaggtgttggcttttgctgttgtgctgatggctttgcggacgactggggggccggtgttgttgttgttaccggttttacggctggaggagtcggtgttgttgttgttgttgttgttagcggtttaaccgccggaactgggggtgtcgctataggcgacgggctttttggatcaataattagtgtccctttttgtgctcgcatgtcatcgtcatcatcgctcatgtgttgctcttcgccagcattcggatcgtacaacgggggagacccgagtcgctttccgtgctcatcaaacagcacgggggattggggaggagtggtgttgttcacatctcttctgtctctcttccgtggcggtggagagccaagcggctttgtccgattccgatcggcctcctcttcatgagggagcggcaacatttttgcaccgatatggttcctcagtgtagcggcaatgaagtctctcagctgctcaaccctgttatgtgatgtcttgggcaccggcacccggatcactctcggcctgtcctcatccattgtgctgcgctgggtgaagtgaatgtcaatccattgtgcatccaatgtgccaatggttgaccatgagtatgggtagcttatgctatgcagcccacaaacccaagagccgttaaaatgcaacggctttgggagccggacccgaaatttattgggctgattgtccgggtaatccgtcacattgctaggcaaaaacacaaagaagctgttcgatgacatttttttatttcacgtaaaatttatgaaaatgtgatatgttgttatatgggtggggcttttatacaacaaattgtgactcgtgaacccattcgcgctcggggtatcctatgaacttgacaagcatctcagtggacccatccgccctctttctctttctgtacaccttttcaatacgatagctcgtctctgcatcctttcttacacgcgccaactcctgctcatagaagctgcccttgaatttctctccgcgctcatcccgtagcttgtaccgaacggggcgaaccgctttcagcacctcgtcaacctccaaaatttcgtcgccataatttggcaaatagcccttctcaaactgtcccttctctctgctcatgcgcacaaaatcgtctttgcggaagcgtgtcggtcgtcgtttttgtggtgcacggtgtgcataatcatataatcgcttccacaccctctgagcattggaaaagcccacatcaatcggacgcattccgtgggcacgtgacggggagcggttaatcccgtccacaattttctgtgctgcatccacccagttcagcgtctccgtttccgcaaaataccggtacagccgctgtttcacattacggatggcccgctcggcgaccgacgccttgaccgatgaatgcacgggttcatgattctcaatttctcgctgctcaaaaaagtccttcagcaatctgttcttaaactcggttcccttatcggagaaaatgcggtggggggccatgggcatttgatcgatgagcagcttgaatgcctccaacatctcctcggctctcttatttttgagtggcacaacaaacaggcgttttgagagcacatccaccgcgacaagcagatagcggtgaccccggttgtgtcgcgatagcgcttgaaaatcggccaaatccacctggacatcggtcatgaatcctgccgctacggtgctggcccttggaaagcgcaccctacgggggcgcatcagagtgtatgtgcggtgcccctccaaataatgctggacgtcctttttgcgtaaatgcttgatactttttcgcgcctctttccacagcgcggtaacgcccgcgaacgccgcgggcgacgatggactgttatacagcttgtcaagcgttgcgttgatcagctccattttttcggacgaaattcctttttgatttttggtgccgtccgcgtggttttgctctgtgacggtctctttggtggagccgtccatgaatacagaattgggtcctgctgaagcctttcttccaatatggccgctcctggtggtctaatggtggggcggcccgctcttctgtctattatatagcggatggccattcgcaaattggtatgcgccaacggcttgccgtttgcggtgttaattgtatttccacgaacgcccatacgatcagcgtaatggttgcatttgatgtatagccgttcaacccgctgagtcatggtcagctgatttgatggaatggcaaacagttcgcgttcttgttgtcgttgttgttgttcatcactttgtgcagatgtcgatgggcctggctcgggtgagtactgtacccttacccttctcggctgtctcactcgttttcttatctgcacctcatcatcttcatatacggggtagcgacgtttggcccccctcctaggcggaggaacaacgggcatttcttcgacgacaacagcggcagcaggaagaggttgttgctgttgtggcgcttcctcgacttttggttccctttttgggatacggtatggcatgggtctctttgttgtcggctcatgttttattttgggcgtcgggggaggcgggttatacccggcctgccttgatgtggatggtcgtggatcgagatcaacaaactctggcactctttttgccggagtggggcgaccggttttctttgatgtcgacggcggtttgaattctgactttggcttttgttgttgttctctcttgacgttaggacgcggccggggtgtaggaggcctcggctgctcaacttttacttttgcgcgaggcagtggtggaggttgataaatcatcatatactttttgcgttgcaaatcatcatcagcatcagcctcgtcctttttcaattttcttctgatggcaatcctgcgctgagcagtgtccatttcctcaatttcttccgcattgtcgggcagcacaggcaaatcgccatagtattgtgatggtgctggtagcgcgaatccattctctagcatatactcatcatcatcatcactttcgggcagtggcgccgcagctgcttccgcaaggaggtcccgcaccactagcggcggcggctgccgttgctgttgttgtatatcgtatcgccttttccgccattgctccatacgacctcctctacgagaagtcctgcccggtctcggggggcgttgtggacgaggcggaggacttgttggtggcgaaggagccccgggaccacccggaggactgggcggtggacgacgaggaggtcttccaggcggcggaggtggtggtggaggagcgggaggacggcgtggggtatcaacaacctcgccttcttcgccacctctattcatcagtacacttattcccttggtcagctcaactttggttggtctgtccgcatgttcctttctcatctgtaaataacgccggagctgctggttataatgcacatttttcgccgaaggatttgtctgtccacccctggcccggtccaggtcgtggcgaaccgcgtccaaattgaggtctcccgtctgcgagacggaggtgagaccccgataaatttcttgtggtacgagaatgaatttgtttgccatttttattaatgaatgaatgcgtgtgtgagacaattttacgagggtatttatgtgtttcgagtcacaaccgatttggccaattcaattaagacgggggttaaaaggctgcaaatagtccgccaaacccctctcctttctggatgacaagcgctcgcttagcgcccctctcgctcctcgctctgctcacgcggcgcaccgtgtccacgtagggcattagtcgtttcttctgccgagttgtcagtcggaatcgggaagcaacaatgttcaagcacacttccaccagtgacagcagctgatcagtgttcgcctttctgatcagtctcccgcatcgtttcacacattttgccttcgacagtgcacaaagccagttggcattatcttttattagttgactaactttagcttgttgttgttgttgttgttgttgtcgttgttgttgccgtttataccgctccatttttggggatgaacacaactgttccctcgtcctcctcctgctcctctttaaatatgttggtgcggaggcgaagcgccggatcagatgatgcgtgcatatcgattagcaaatagccataggggcgggcggtcgccttgcggtaggcgtcaaggaaaaaatcgagttgacgcggaaaaagctgaactccaatatttcgaatggacagcagcgagttgggcgcgcgcattagcaccaaatactgcgcagaaaggcgagccaccttgatcttccgctcaaacagattctgagtgatgaacactaccgcaaactgatggtgatgggattttttggtgaacaaatcggacagatagcgctcctctattgacagcatcagatcgtcgagaatgagcagcatcggtttgggaaggcgcctaatcagctcctcccgaatacacctcaactcccgccttttgcagtagcggaaccgccgaattcatctcaccaaaacagtacagaattgagatgggactgggtgcgatcagttcattgcactcagcaataaattttagtaggaattccgttttgcccgacgaggagggcccggaaataattataccgcacggc

SEQ ID NO: 3862 - DNA, 5599 bp, Heterodera glycines
aaaactgtacggcaagaaaatggcttcctccggcggcacgtcgccatcgtcttcaaagcgttttcccacgacggagaaattgacggagacaaataaaatggacagtaacacactgtcgccattttcggtgaagaaaaagtcaacggtgacaccagaaaagtcggcagtggcatccaattgggacggtgtcaatgacgcggaaaagaactgcggcaacccgctctaaaattgtttggatcagtaaaaatgccaaattgcggttgagattttcttaatttcctgaaaattccaacgatttccccgtccccactttcgtcccatttctgctgacctctgtcactgccgctgttttcgcgttgggcttcgtgccgagcacatgcgaccgaccgacgatagcgcacagtcgcaagtcatctttaccacaatttccgtctttattcgccatggaaaaacgtctcccaccgccggaatacatttttaggctgtcgatgtaaaagcctttaaaaagacaattatcaaaatattcggccaatgtaaaacaaatgggttgtgctttatacacacttaatatacatataattagatggctaattagataacaaaatacattcatatacaaagtgtaaaaggcgtatataaatcgatatttgattctacagtatctgtcgccaattttttcattggcgacgagaaggcgggtcaatccccgcctattgcacaaatgaacgggacgggactcaatcgaagcaaaaagaatgagggatgttcttggagaagatcggggcgagtcccgattcatcaattcattcaaaatcgatcattcctaatttttgccccttttccatccaatttctcatatgcatttctccatttcgtaccattcacattttgcccgttcctttgtcccatttttgccccatcgcatcccttcacaattcaaatctttctcatcggttggctcatcttcggccaactttgtgctcagatttcctttcagaatttctcactttttacatctgccaattcacattcaatttttgtgcgcccatttcctttgttcgcacttcgcttctagaattttctgtccgttttttgtctctctcacaatttgtccacgtgcatggccttttgcccgcccccttcgaaaattgtctatttaagcgcccccggccaaggggtcgctctcttctcttgcttccactccccttcgcttcatattcggtctgcctgtgaccaattcctccaattcccccgtcccatcgcccaattcgatcaattcgtcgcttttattcattattcgttttgctttaataaattcgtgctgaaacggcttggaggactcggaaaggagggaaaagcaccctccacactccatcacattcggcaaattctcgtgcggggccaaacggaggcgcccattcacgtcttgaccccttcctttcctggcagccctcgtcgttctcccccaatcctcccgatcccagttcctttccctttggcattggagaatccgggagttggcccggagcgtcagcgaatttcaagcagttcagactcccgcagccggagtctcgcggatcggtgtcagtctcccgccagccggagcagccgtagggacggggcgaattcccgtcgtcgacgaaaccaagcagggcagagaaggaaggaagagccgagcggtgccaaaccgtccaccgaagggcaggcccgttcgtcgccgctaatcccaccagccggagaagcgcgcatcgccggagtcagtctcccgccagccggagcatccacaggaggagacgggagtcgaaacccgtgctcatcaagtcgagagcgaacgtcacgaagttcgagcagttcagattcccgcagccggagtctcgcggttcggtctcagtctcccgccagccggagcatccgccgcaggaaacgggagtcaaaacccgtttcatcgagtcaagagcgaagagcaactcccgcccgttcggagcagctcaaagggtcggacaagcccccttcacaaccaatcttgtcgagcaactcccgcccgttcggagctgctcaaaggggtccgacaagcccttcaccaaaatcttgtcggtggtgccgttaagcaagcagcaaatcgctgtataacatccaacagtaccagttcaattttgtcacccctcccccctcccattctcgtccccctttggcgctgatcggatcggtcagcagcatcagacccatcaggacgaacggcgaaaaagggggccattccctttacggcacagcgagcggagtgagcagagagcaaaagggacgagagcggtgaagaggagcgggaaccaatcccgcctcagctgggccaagccgcacagggccaaaccccgcccgagtaaaagattggcgacaaactggtgccgttagcaggggctttctgcaaacgtcggcaaagcatcagtcgagagttttgtcgccgaggaccaacagcacaacgaagagaagctaacggcaaactggtgccgttagcaggggggtctgcaacgacatcgatcgggaccaaggactacgaattcgagaagctaacggcaaactggtgccgttagcaggggggtctgcaacgacatcgatcgggaccaaggactacgaattcgagaagctaacggcaaactggtgccgctagcaggggggtctgcaacgacatcgatcgggaccagagactacgaattcgagaagctaacggcaactggtgccgttagcaggggcaactgcagccaccaacaatcggtctatgagcgaccaatcggtctacgagcgaccaacgagcacgaattcgagaagctaacggcaaactagtgccgttagcaagggcaactacagccaccaacaatcggtctacgagcgaccaatcggtctacgagcgaccaacgagcacgaattcgagaagctaacggcaaactggtgccgttagcagggggctccagcgaaacatttcggtcgacgaacagaacaggcggaaacgaaaaatgcaacgactcgaattcgaggacgggagcgaaagcaacatggacccagcgaatgagggccatcgcaacggcgcacagcacgacgaaaatgtgcaggacggggatggtcccgtcgcttcaacgaacgaagagcaacaaaaagttgccagagtaaacgaagcaacgagaggaagcaacatggcgacaggcttggggacaaatcagcaagggatgctacccttcccatcacgcaatttgcggagtgtatccatcccggtacggacagcgcgggacagaatcgagagagcatccgggactctcgccgctcgaattgcggaggctcgagaagtgatcgaccaagaccttaccgaaggggaggcaggctaccaagcggcgcgactgttggccatggagagaggactcaaggaggcaactcaaatcttccaaggacatttcgagattggaatggcagcagcgggagcagaacccgcaggtcgccaggacttcttctacgacatactgacggcgccactgccggcggcaacgaaagagttgcagttgcgaaaccatccaacaccagctgaactgcttcaaattgcggacgagcacatcggagacttaaggacgatgcgactggcactcgaggatgaagaagaagcaatcgcgcggtctcgattgagcgggtcattcgggaccaacaacagccatccggtgggggacgacccacctccacccgaaaatcggaacatggaagaatgggagagatccttccaagtggcggccaaacgatggcaaaacgacggacaaggtgtacagcaacacaaccgcagaccaatgggacgagttgcgacacccgtcatgtcgaatttggacgggatttttcagcggcgtgccaaagtgccgtccgtcgccagcatgagagtgacgaacacagcgcgagaatggatcaatcgaaatcgagacgagatgggggcgttccccccagcaacagcccatcggccggcactgatgcaaccaaaaatcgaaaagcagcaggctcacgtgaacgacgactatcgggagcgtcagacatacccgattcgacggcatgctcgagacgagggagaacatgatcggaagcacgggagggacgaaagcacggggatgacaacattcgagaccgttcggctacaaccaccgacattttccggaaagcccgaggattggacgacattttgggcctatttcaagcgagctgtggacgacaaacccattcccgggtttgaaaaacaattgcatcttctgcgctgcttaaaggagggatcaccagcccggcgggctgtcgaagtctaccctccctccgacggcaactacccggtggtcgtgcaatttttgaaagaacgatttggcgacacggacgatttacagcgggcaattcgggcccggcttcttcatttggcaccggcaaaggacaatgtgaacagcttgacgacgatgatcgacgaatttgagcgatgcgtttgccaactcgagcagctcggggcgaacgtggacgacgactcatttgggccattgctggaagccaagttgccagtgcgagtgctcacggaattgcggatcagagaaagcatgatgggatcgaaatggtcagtgcgcgagttcaggagagcggtgacggcacaagtgcggtgcatgcgatcagctgagtcagcactggcggcaatgaaagacccggaagtacgcactgatcaccgaaccgaacgtgatcatacgggacgaggaggcaaagcaggtcgggaaccatttcaaagagcatttatggtacgggacagccaacaaacccgtgcgcagcccaacggaacacgaaaagaagagcagtgcgggacgagtgcccgtttcaccgggcgaacagtggcacgcggcaacgagaacggacacacgggcgggaatggaccccgcttcgcgcaaaatgggctccctccaagcttcgggagggggaattgttcgttttgtctggagagcggacatcggccgagtgaatgccgcgcctatccgacgccgcaggcacggaggaagcgactaattgagcaaaaacgatgcctgcgttgcctgggctctgatcacacattcgaacagtgccaacgaacggtccgatgtgacgcatgtcgaaaggacgatcatcattggcttatgtgctggaagaaccaaccgggaaaccaatcccggccctccggtgaaccctaacggaaggagaacaaccacgcgatgctgatcagtgggatggaccaacccactcacgtcactacatcacgagacgagccgaacagtcgagacatatccgagacgaatgccggggagcaacgggctttcaccgcttttggaagccgagtcccggcccagcaaatgatccgaagagtgaccgcagcagcagaagaaggcgaagatgaatgccaaacaacattgttgtttgatccaggaagccaccttgactgcgccgagactgagctaatttcaacctctcggaccgaagccgaccgaaaagcggcactaacagtttcagtttttggagggaaaaaacagcggttccgatccgcaacttatcgtttgcaactcaaaggggatcgttgggggatggg

SEQ ID NO: 3863 - DNA, 4226 bp, Heterodera glycines
ttatgtgtatttaaatttaattttaatatttttcgaaatttccaaaattccgcacgtactaggccagctcgaactgttccggcaacgtactgtttctcgaaaaaaatcgtcataactttggtcaaagtcaaccaaattacacatttttggtttcattcgatagccctaaaggttctttattcacatgcaaaatttttaaataattgatcatgttgaaaaaattctttgacaaaaagcacaaagttcgtcttcgtctttgaaaatatttggaaaataataaaataatttatagttttttttaaatgatcgaaaaaagagcacgcgaaaattttctgccaatcggacggaattaacagaaaaacaaattaaataaaatttgcttttttcaaaaaaaattcatttattgttccatttgttttccatgaattgtttgagctcaaaaattgtcgttctgagcccaccaaattcattgtgaagtgaattcatttcgctttcattttccttttcgaataaattttaattttttattatttaaaactaattattagagatcggaattttgaaaaaagcctgtacctgtacctgtattttccgattggcctgtacctgtatttcctgtacaaaagtacaggaaaatacaggtacaggaaaaatacaggctcctcgaggcctggatccaggcctgtacctgtatttttttaatttttttataaaaacgttttttattaaaaaataaacataaaaatacataaatatatttattatctattaaacaataaatattgcttaatattaaggtatttaaacttttttcttacatattttcattttcaaaaatattttaaaaatttttgaaaatttatagaaattttattcattaaattctagttaaaataaatctaaaatggtgaaatacggtataagaactcgttttaaaagaaaaaaaagacaatttctagagaaaaccgaccaaaaaatcaaaatttttcattttttgcttatttttgacataaattaaccaatttttaagaaaatttaattttagttcaatttttttgacaaaattttgctaaaaaatgtctttttcgaaaattttttcggtctttaggagtcaaaaaggccaatgtcagcgcctcagatcaccactagaaaaaatgaattaaaaaacaatttcgggaccaatgttctcaacaatcatggcctgattttttttggctattttttcatggaaaatgtacatattttccccctattttcccccgttttcctctttattgccccccgcggacgaaagaagtgttaaaaacatcgcaaatgaattctcaaaacactcgccacattagtttagaggcggtggtggttgtggtgcattgagtggtgcaatcgattcattcgttttcattttcatttcgtaaaatatggaaaaaatttgtcctccataataatcactaatcgtttttatggcgaatggcgtaagaaacgccgcggggcgattatctctattttctccattctctctctctctcaatccaggaatggagccactacacgcgcaatccgcggcatttttttccgcgattcgctaatgcgacaatttgccatccgcgtagcgcggggattttcatgtccgagctccacccctgcttcttccgagtcaatggcaactcgtacaatggcaatttgtacaataaaaaataaaataaagccttacctaagcttaagcatagcctggcctaaagtttaggcctaaacctcgtaattacggattttgtatgggttctgcgtaattggctttcaattatatacagccctgctgatctccttggcacacgcttcgatctgtaaatgcaataaaaattaccgtaattcatacgggccttattgacccaaaaaaatgatgagcatttacgattttccaggcttgaatatttagccttaacacattttccaacattggctaattaccgtccctaactaattggcttttttccctcccacttaattgggtaccatcaaaaatgccgaaggtggactttgactatttggacatgttttcacccatcttggtctgtttcgttggtatatatcattttcatttcctttttttcttgttcaggtggcatttatttttgcgctcatcctttttgtgagttctttttttcgtctggtcaataattgacctaattaggagtggacccgacaatcaattagcaattaaatagcaaaaaagccaatgaaagtcgccgaattcattaaaaagattttcttcttttggtgcacttaatcccccctcccgccataaaggaacttcgaacgaaaaaagtttaacgaaaaattcccaatacaattaaaaccacattccatggcactttcaaatttttaatttgatcattatttcccaatcccattttacagttcatctccttcacgtgcatcaattggtactgtatcacgcacaaggatgaccttacggtgttcgaaaaggtcggtgtactgtgtgatcggtcacacattctatacctaatttgatcactgatcatttttgggaaaaattagagctcgacattttgaaaaaaacatggaaagggattcctggacaaaatccaagaaaatccaggaaaaattcaggtgcctacgtatccccctgatcagtccccctcccgaaaaaattaattttttttataacacataaatctttcaagaaaaaaaatcttgaaacttgtttataagaaaattccaagaagaaaaattttcataaaatttatttgaatcactaaaacttcaaaaattttctaaaaaaaaactgcagaaaaatttctgagagttcttttttcttggatttcttataaaaaaaactttttaagatttcttgaaacgagctgctcccgaaaaatcaggttgctgaaaatggcacctggatttctgggcctggatccaggaaaaacacaggcccttgtaaaaatggcacttattttccagttcggcacccgcttgaaccttcgtcttggcccccattcaatggcagtgatcaaacgaggcggctacgcgtccacctacgcccgcgaggaggcaaagcggtcggaatgtaccggaccacaacagcaacaactgaacacgcttggggacggaaaatgccaaattagccacgcttgacaaaaatgattggcatttttttcaaaatcattttaattttgatgaaattttctatgggttttcaattaaccaaagaattttttttatgccaattaattcctcttcttttaatgcaataaatacattttgttcaattatttttgaaaatttttgtgagaagtttagaattaaaaattatttttaatgcattttttaaaaaatcatccaaaatttaaaaaaataaaataaaaataaatttcctcagtcaaatcaagcagtgaatgcttattgttggttgatttggtatattcattattatcatcatcattgcatttcttgttccgccatttttgacgccactaaatcattttgccaacgtcaaattagcgggtggggggggcattaataaaaaaatgcggttaattgttgaggaggaacaaaaagccccatttccgatccccgcttttcccgcattaatgctaacatatgccctggggtggacccaattaagcgcccatcccaaattaatgatgcttttgcatgtgattgatggaactgtcgggggaaagggcactcattcattcattgatcaccccacccaaccaaacacacaacaatggcatagtttcgatcagctaattgtttattttattaccacattgcactctctatctctctttctctccctctctctatctccgttcactctctctcctttctctctctatctcatcccctttattctgtcgggggataaacgcaaaaagggaaagtcgctaatttgcaagagtaattaagagaggggacgacggacagcgaagagcgaaggtggtccccctgtcgtcgccactctcccctcttgggctcggcttgttttcccatttgtttcgtcggtgaaaaggaggcggacgtggtactaattgattattattatgtataatgttgattggctctccgtgcgcgcccgggggcacgacggacggtccccccggatggtcaacggggacgatccggctagcggcaacacgatagctggggggagaagcatcacatcatacaagctggcgcgacttctgacaatgggcgtgggtggt

SEQ ID NO: 3864 - DNA, 1464 bp, Heterodera glycines
gtcccgcttctttgctgtttgttgtcgacttcgcctcgggcgatgccggatgcaataattgtttgatctcacaatttggctgctgttttcgcttcgctggggttgatcagcagggctatatctatctatgatcactgctgggctggacgtggagcaaaagccagtcagtcagtcaactgctagcccaaagccgacgcaaaatggtcttgatcacttatcactggtccatgctagctctgctgatcagcccccattaatatagcgcggtgatcaatgggttgatcagagctagaacaaaggcacttgtggagcaatcccggccctgcccgcttaaactagtaccaccatacatatatactacctacctactttccccttcgtcaaccaaccatcaatcagtcgtccgatcggggggactgattaacggtgattacaccattcacccctttttgcccgatttctcgggatatcgcaaccaaaaagtgtcgatcccgcgcgcattagccaatcctgctgccgatgagatgatccaccccgccgatcacctccacccacttttccgcctccagcagcaagctgtgataaatgtgatcagcagagcagcaggcccagttttgtgctgctagcgcttattttttgtcattgtgcaagcggaccccgcgcaattaaaagcaaaagcgtcgtcccatcacatttgcttttgcttatagcaccaatcggtggctgagaaatcagtcactgccattgccattgtgttcactttgttcaatttaattcggctccccccgctcattcatttcccattcgatcacctggaccagtggtgcttcccgatcagtgttctcctttgaatatgtgaatatgatcatttggttcttttgctgtacataaattatcaaccgaatactttgatcactcactttccactaattgttgagccctgatcagcaaactcactgatcatagcctcaaccgattagcatgtcctttgatcactcagactcacttcttaccagttcaattcccatgctatccggcactttatccatcgatagatcactcctccctcaaccaaccacgcagatcactcaatcattggtcctataatggagggaaattatcagccgatctctctgatcatttaaatttctattatgtccggcactttatccaccgatagatcactcctccctcaaccaaccacgcagatcactcaatcattggtcctataatggagggaaattatcagccgatctctctgatcatttaaatttctattatgtccggcactttatccatcgatagatcactcctccctcaaccaaccacgcagatcactcaatcattggtcctataatggagggaaattatcagccgatctctctgatcatttaaatttctattatgtccgggactttatccaccgatagatcactcctccctcaccaaccacgccgatcacgc

SEQ ID NO: 3865 - DNA, 3200 bp, Heterodera glycines
  unsure (1)..(3200): unsure at all n locations
gatttataaaattatgtttagagacatccaagcttgggttgatcatgnataagtgcctgaaattcaaaaaaaaggtctgctttcgccaaagtctgtgacaaagttgatcatatatctgcaacgatcaggaattctatgatcagagttggtccgagcgaaagataaagaaatttcgtttttttcttaaaaaaagttggccaaatgtattccaaattttcctaaagatttgtaaaatacaattctctacttagtggattttaaaataaagaaaataggaataatcagaatgccatcctaatcaattttagcaatttgatcaattttgctaatccaatcacgtcaaatggttggcatgccaatgatcaccaggagcagcagcagcagtcggtcaaatctgttgtgcctgatcaggacagtgccgctgctgatcaccaacagcatcttaacaatgttattattgtcactcgtccccactaccgtatacgcccagtacggtcggaacggtgtggcggtgccgttggtggatgcctcggactcagtcgacggtgtcggcacgggcggcggtgatggtggctacggccgggcgccgcccggcactcaaaatgccattctgatcaatgcccgcggggttgacgcgagcgcgggtaaagcggtgtactcgccggtgttgccggccaccaatgacttgtatttgccaccgcctgaagtgccgtcaaagagcggagcgatggcaccggtgccggtgcagctgaacgggtaggccaatcaatcaattaaaacgatcggtcggtcaatcaattaaaccaatcaaccggtatttaaatcaatcactcaatcaataagccggccaatcattatttcttcggcaaacaattgatcaaactttgctcgaggcatttgaaaggtttttatgggacgggaatgccggggcttattttggcattaattaatttaatttctttggagactaatttgcctcttttttgaaattcatttgcttttcggcgctgaaatggcatggctttttacagcgctgccgactcagaccgacaaccacaaggacaaccagcgccgcaacaaccaccacaacaggaagaactggtgccagccgcttctccgccggcagaggaaagtgttgcgccaaacaatcagccggttgtaccaatgatgccagcctccgctgggcccgagccacaaaacgaacttggcacgcagcatcaaacttcgccacctccgttaccggcacgggcaccgccccaattgcatttccaaatccgcaacctgggccccaacccggagggcattcccggctttggtgccaacgagtacaagcccaacaggaagccattgccgtcagctgccaaggaacagtcgccggctggcagcgctgctgctttttcacctgctccggcaccgcctgttgtgccgctagccgttggcggttctgctaatccatgcggcactgtggcagtgccgccaccagccgttgccgtgccatcatcagcggctggtgccgaatcaacgtatggtggcggaggtgagtatgtgtgagaagctctcggcttctgatcagagcattaattggtcgctcatataggaattgttagtcatttgatcagaggatgtaggtaaaatccaaatgattgaaacaacttgactgataattggtcattttatttttccttctttctgatcaaatgcgctaatatttcggctattcagttttaagctcaatttccgatcaaatcattgttatcagataaccccaaccattcagctgagccctcagccgctgcttctgctgtcggtgccgcggcaccagcaaccgctccgccagccggtggagacggcggttccgcagagacgaatgtgccgacaacagctggtggagtaaccgcatcgtcggctgtcacaacagcagcagctgtatcatcacccataacagcggcggcaccgcaagcttcatccggtgcgccatgcccgtcttctgcagcaccgttgctgccagccggtggccctgctgagcagcaacatgtgccagtaggtgtggaggtgaagccggcaccggccacggcacagattgggcccggcattgccgctgactacggcgaagagacaaacaacggcgccgcgtcgccatcgggtgctgagccacaaccggccactgtcgtcagtccggcgccaggacaacaagcaacaacagtttgtgccggaataagtgccgctccggcagtggccgccccgtccgccgcgtacggcgcggaagaagcggtcagcggcgatgggcccgcttcttcttccgacactgtgccgccttcgacgccaacgtctccatctgctgagggcggcgctgcttcttcgtccgctccgcttaccggaaccgcttcggccgttccaccgctttccgccactacgtcgtgcccctctcctgctgctgtcggaagcgtttcccctcccgctctacacattggcggtagtgaagcagatgggccggcttcagcagcagttggtgcacctgcagttgcaccatcttcaggagctaccgcatctgcatcttccggatacagtgaagaatccgcagcttccgggagcgcttctcccgctccgtccttgggcggcatttcttccgccgctccgttttccggaagtggcgcgtccgcagcgcccggacacgaacagactgaaagtgaattcgcttccggaagcgtttcatctgttgttggagtttcttccgccgctccgtctcccggaagtgccgcgtccggatcgcccggatatgttgaagaaggagccgcttcagtttctgcttccgggcctggcgaaactggtggaccgcctcctgtaagtgctccgtcagctgccccatcatacggaagtgtttctgccgctccgcgtgccggaaatgccgcatcagtctcacccgaacatggagaagaagtagccgtttcgcaatccgtgtctgaaactacttcttccggaatttcttccgccccgacttacggaagtggggcgtccgcttcatccgctgccggaatttctcccgcggctccgtcttccggaagtgccgcgtcaatttcgcccgaatatggagaagaaattgacttttcggaatccgcttccgaaagcgcttcttctgcttcagccgcagccggcatttcgcccacggctccgtcttccggaagtgcagcgtcagtctcacc

SEQ ID NO: 3866 - DNA, 2890 bp, Heterodera glycines
  unsure (1)..(2890): unsure at all n locations
ttgatttgttcacaacaacaaattgacagtctcacttttgattgtgggagtttggcacgaggggtaaatgcacagattagacccctatggatttatagctctgaccttgaagtctgatactacaaaacctcagaaactaagtttgaatcttgaaatctaatactttgattctgttgctcaaaatttagtcaagacctggaagccattgctaaaaatgaatgatcgatcgaatgagaataaagctaagaccttgaagtctcaaactcaattcgttgaaattccgcttttcgaccccttccctttatttctaaaagtattggcctggaaaccaaatactcaaagaaattgtgcagattttcgtaatccacctgttgatgagatgagtaccggcacaattgatggagtgcgcggcaattgggttgctgaacgggcttgaatgcactgtgtccaggtgatcaagtttgcgttgaacaggctcggtgctctgcgttcactttgatcaattgatgatgatgataatgatgacgacgatgatgatgatgatgatgatgatcagtcggtgatcagttgagttgcgcacgtcgtcgtgttacgtcggggtcaccaaaaagtttgttcgaacgcggtgtgggcgtccgaggtcaacttttactttgaacacgctagtccaaagtttattcgtggggtcggggtcggcgagtggtcgataggtaaaatgtgcacaaattcaaaagcgaataaaacaacaaatttatccggatctcaaacttgggtaattaaacctcgcccatataaatgagcgaaaaatgaatgaatgaatggggggaaaattgtacaatttacaattttacatcaatgatcgaatgaattggggggagaagagaaggcaatggtggcatgatttttgcctccccataaattgtgctgataaggtgggatgattgacaggggcttaaatatcgatgaattgacggttggcgacaatgaaatgcatgtgaaccaagtttttccggttctaatgcactttatgagtccaatcgagttttatgagtccgatcagagtttttgagtccaatcaaatatttatgagtccaatgaccctttatgagtccaatcatttttttgtaagtccaatcaaagtttatgagtccgatcaaaaatttgtgaataaagtacattgtacaattttattcaacttaggagatttttcattccacaataagatgaataaataaaaaaagttcactttgttcaatacgaccatcgttgggtaaatcatcggatgtacttcgttgatcccaatgacccaagagtgcacagtcaaggcattgaggcgacatggagagcactcaaaaatggattgcgacacttgcacggaactaactctgacatgttacccacctatcttataggactcataaatatttgattggactcataaagctcgattggactcataaaagtcagattggactcataaaaacttgattggactcataaaagggtgctagagccgtttttccaccggtaccggtaagtcgtaaaaaacagaagaggatattgttgtcgggggctttattaatgttgttgcactgcacacagcaaaagacaacagcccaaagcaaacacaaaacaatacagcccaatgccgaagataattatttatttcaaataaattaaggcgaagacaatcaataaaaactgacgacagcataaactaacaactaactaactcaaaatcacaaacaaaaatgacacaaaatcaaataacaaaacgccaaacatattttaaatcacaattatatcacatcctcgccctctaagaagcgatgtcctcagcgctttgggctcatcggtagtgcattcggcgttgaaaggggcggcaagggtgtcagcagtggaccggttcggcacgaagtcgcgttgcagagtcagatctgtaaaagcaacggacaaaacggaaatccgcccttttttctggccttaaaattccatcagtgtcagcttcttgcgcacatttgcgatcagcaattggaaaattcatgcttttgccgattttcaacaaattttcaagattggcggctgcgacatccgccaattcctccccggccttcggcgaaaaaattgtccccaattttccgaatgctttccgtcctttcacttcgtcggtgcgactcattgagcctttacttttccaaatttgtccacactttgacttttccttcgaaaatacgccggcgaacacaaccaacgcagcgaaaatagcattcaaaaaccattttggaatttccgccgatttttcctccatttttgttgcttttacgctgcaacttgacgacgaattgcgctgtcggttggacgctttccgttttggtccagcttccacgttcgttggttgtgccggtggttggttcgacaaccgcaaatcaatcaatttcttctcagcttctgaattttttcgaaaatcggcacttttcgtcgcaaaattttgttgtggcggttttcgtgcacagttggattgcttccgcgcaaagggcaacctacaatggcgagaaatgtgtcccgttttgttgcagttgtagcacacaattcggtttgtctttggcgcgaaaattttttgtggttgaaatgtcggtttctgttgaaattttggtcggtgcttgtttccagactcagccgatttcgtggccttttgcacttcttctgcgcgtactgcgagagcgacgaaactgtcgaagttcatccccatacggcgagccatttccaatcccaccgaaatttcagggttttcaagagcacgaattaagtgctttatcgcaaaatcggtgacaaagatgggcggcaaacctgggtaagcgcatttcacatcacgtanagtcgttccgcgaat

SEQ ID NO: 3867 - DNA, 2587 bp, Heterodera glycines
gcgtcaaatgcacgctctgcttttccatcattttgctttctagcgctgaaatgcgtcgactttccgtccattcttcggttgctgacgaaaattttttgaaaaattttcgaatttggttcgtcccttccgttcctttcagctcaggaagtcgttccatcgttagcacaaattccaacgcgccaatttgctgtccttcttgcttctgcggttgttccatccgatgccctttgtccgatgttttgttttggagaagttgctgcatgtcgaaatgggattagtttccctgtttgagagtcagttttgtcgaaggattttaccgaactgacaaattttgtgatttgtttcacaatttcctttcccgatgctgagatttgaagtgaagagggatttgcttttcccgttttcaaaaaaaattccgtcttgttcgtctgcttcttgattcgttttccgggtttttgttcacccctttttgtcgacagtccgttgaaatttgagggatttgtgtcccgtttttcagtcacttctatcgctatggctcgtctgttcgtgggttttactttacccgtttacaatttttagctgtccacagtcggttgattaggctcttctcttgctgggaatttgttttccctttttccgcacttgtcgagggatttacttttccctattttcaattcgaggccacgtccaatttgtttttgtccactgctgattcaccggtgccaggagcgccaagtcgtaaaaaacagaagaggatattgttgtcgggggctttattaatgttgttgcactgcacacagcaaaagacaacagcccaaagcaaacacaaaacaatacagcccaatgccgaagataattatttatttcaaataaattaaggcgaagacaatcaataaaaactgacgacagcataaactaacaactaactaactcaaaatcacaaacaaaaatgacacaaaatcaaataacaaaacgccaaacatattttaaatcacaattatatcacaaaaaccagtaattttccaacgttaaaaattttcggacaaaatttttcaaatacaaaatttttatcccgttttcgcgcgagtgcctgttttagcattagaattgttcagaagtatatgtatattcagggtgaccatgtttttttcaaattcaggataaagaacactaaaattcagatttataccccaaaattcagatttttacaaaaataagggggtcagcggccaattttccaattttgcgaaggggtccggccatgtaaattgatgaactttttttgttgctttcaacaccgcttttttcgtgctttttttcctatacttttgaggaacaaggggggtccggcggtgccgataggcgccgccggggaaattttttgtaatttttaatgcgatttgttaacagattttatccaaaaaattactaaattttgcgcttttaagccaattttttacggaaaaaatgactcgatcccaataaaatatgacgaaataaaaaaaggattgtgtttaaaatgctaaaatttggcaaaatgttctatttttataaattttccctttctctaaatttacatcaacaattttgtgctaagattccaattcttgccagtgctaatttttaccggcggtaccggtactagacaaaccggtataatgatttaaaaattgtatatatttaaccagatgttcgttagttttttaatttcaaaataaaaaatgccagttgaataatttttcagcgaaatcggatattttgcgaagacggaacgatgacctatagaattaatccgctaaattatcagctttgttgtcattggtggggcctcggcttggagaagattcgccaatgttttttggcaatttgccaatgccactgccatttgagcattcaaaaaaagaagccaagacaaataatggcaatagaaaggacaaaaaaaggacaacagtaaaaggtcattctgttggggctacgcagctgatcaatggtcacaattctgtgcttatttgtttttgcctgaaaagattgtggaaaactttgattgaaaaattttgacaaaagtttcagaaatgcttatttgttgattttttatttatctaattgaaatttaatacaaaatggtcaaattatttttttgtctcggtgccgaaacgggagggaaagaaacgacgccgactgatgccaatagccttaattttttttagaaaattctaacaaaggaggggtcggcaagtgactgccaatgccactgccatttgagcattcaaaaaaagaagccaagacaaataatggcaatagaaaggacaaaaaaaggacaacagtaaaaggtcattctgttggggctacgcagctgatcaatggtcacaattctgtgcttatttgtttttgcctgaaaagattgtggaaaactttgattgaaaaattttgacaaaagtttcagaaatgcttatttgttgattttttatttatctaattgaaatttaatacaaaatggtcaaattatttttttgtctcggtgccgaaacgggagggaaagaaacgacgccgactgatgccaatagccttaatttttttagaaaattct

SEQ ID NO: 3868 - DNA, 3088 bp, Heterodera glycines
  unsure (1)..(3088): unsure at all n locations
gtaggcaattaaaaaaataactattagagaatgagcctcattaacaacaaaaaatgaatttaattactcnggattttgaaatcaataaattnaatcattaataattttcaattccattctatntaataagtcatttttgataaagaatcaatccacattcattgattgctttcgtctgcggtcacttttgacctgtcatggtattttgaggcgaccatccttaagttgttttattattattttattattattttttattaaattttatttatttttttccatccttaatttcttttgttattttttctttaaatttcttttgttattattaaattatttttctctgaccgcagaagcaactgctgccatcatacacacaacctgcggcacataatctttggggatcttcgcacccatttaaagaaggattgtaaacgcactgggcacttgccatcagcaaaatgtccatggcaaagattgtggcgaaaagcatcacagcgatggggacaatttgggatttgttcatttttaggaatatttttgcattaactttgaatacttagcttaataatttaataataataaatgattatattaatattaaattatttgacattttgattctcagattctttttattcccttcaaaatcaaaaaacagaaaatttctcaaaaatggtatcaaatcgtttcgaattttaaaactaatagacaattttaacgaaaattgttgaattataaaaaaaatttacaaaaattttaagaattcagaaaattaccagcttttgtttgtttcattttacaaatttttgccggttattttttgcgccccatttattaagggccctttccggaaatccgcgcctaaaatatttattaattagggatatgttaaaattaaattaaattgatgcttaaatacacattcttccaaaagtgtttctctcgcgctataatttcatttatatttgtttttcacattttaataaaaaataaaaagaatgatgaataaataaaattttaattaatttttttaagcatttgcttgaatggaaaagcacttttcacttttatttacgactttttgataaataatttttcttccccaaaattctaattatataaaattgaaaacaaataaacaaatgtatgtaaaaacatacgcattttatgtgtcgcctttttcgagtaaaattaattaataattaaattttttttacttattatgaaaaatattaaaggtggaggaagcaaagtggcatgccaattccttctttcggcgcgccaatcggcaccgtcgggaagaatttctttaggtgctataatatatccgattgttgaaataaggacaaaaaataaagcaaacacaaaactgaacttgataaataaagtagccaaaatgggttttatatgtttttaggcaacggatgcgttggcattggtaattgctgccattcattcattaatattaaaatatctgtgttaattttgagtccagcagcaccattcaataagcgtacaattacaattgttttccaaattgccaatttagttatgccattaaaagtttgcctccaatgcatcgtaaacaaaatgaaagaaatgccgaattgagtcagaaaacggaattatgcccaaccaaaagtcgtaaagattcctgaaaatggtgcaaaatatgcaatttaaaatgttttcagtaaattgttattgtcttacacaaaaggctccattttttatgttattttgcacctcctcttttttgtgatacaattaattaataaaaataaattttttactgatataaaatggcaattgtgataatatgagacgggcatttgtgaaagtgatgtaatttttttggataatcattttgccgtaaatttattttgctttgaaagtctatgcataaatggtgcataaattcagcaacttagcagaaaaaggggacgagcaaaccgaaaaaaccgaccgacttttatcaaaaatcagttggccattttcttaacaaaattcattaaaaattcttaaaaatttcccccggcggcgcctatcggcatcgtcggcccccccaaaaactttcttttcttaaaaaaataagcccaaaatctcaaaatttgttatttttagacaaaatcagttaaaaaatagcattaaaattataaaaaaaaatttgaacctctttcttcattacagatgcgcagaaaaaatatgcaaaagaatataatttatatccatttttataacatattaggttattaattttcaaaaaagataatattgtctattttctttctttatatattttttctattgaaagcggatttttttctttgtacaaagatacgattattgtttaaagagcattttacttatttaaatagatgacattttcatatttttttttacactttttattttttgtgtttttggtttttttttattttgagtcaatcctgagttgaacgtaacttaacccggttgactaaccctcagcagctgtgggtaacttttcaactggcacctaataaaagttcatagaattaaattaggtattgaaagagttatgaatagaaaattcaatcatctctatttgtaaggtaatttcatcatagtgatattaaaagttttgtattagtcactatttgtcactattttggactttttttaactattttggcactttttctcactattttaaaaaaaaatgttttttggcttccttttttcaattttccaaaattagtacaccattcgatagagcttcaatagctttacaatttagttcagaggtgatctttagctttttctgttaataaaaatgttttattgctttttttggaaaaatataaaaattcaaaaaaaaatcgaaaccgaaacgatataccgaacatttttcttcggtttttttcggttcggttttttcggttttttaaccgaaaccgaccgaccgagaaagttttgagtttttcggtttttttcggtttcggtttttttttcggtttttaaccgaaaccaaccgaccgaccctcttgtacggtctctagttttgatattttcaatgctaatttatgggttttgttttgttttt

SEQ ID NO: 3869 - DNA, 4492 bp, Heterodera glycines
tggtgtatttgctggtggatttcaacaccatgttgcgtcaatttggtgccgggtttgtgttcggattttgatgagcactatttagctgaccaacgatgaccctcccaatttgttcggctaacagccctatttcattgaggttttgcgggccaaccccaacacagcggttttcattgaccggagtcgaagttcttctaatgtttggatgatcgaagaagtcatcttcattttgggtatgtccaaagccaaaatttcgaaaaatttgttgggttgggcctgccctctctcccaaattttgtgtccaatccgttcggtttcgcataaaaccttgctttgtctcctcttcttcgttttcgtcaaggctagcacgttcattttgtcgcaactgtccaagtgcgctgtcattgttcgggttcaaaaggcgccgtctcatttccatcgagtccagctgctccgaattctccaaattgggatccgccaccaccacgttttggttcatcacgcctaaagttctatttggtggattctcccgaaaaaaaacatttccatctctgtcgagcaatatcccttcattttgagctcgctgtctagtcaaacgagtatgattgagtgtccgttccaagttttccatttcaaaatcgactatttgcaccccccaggtgacttgagtgtcgaaaaatttccgaatttgtctcccccagagaacttaacaaacaattggtttttgtttgttctttttaagcgtttttgtttcgtctcccccagagaacgattgttgatgttgattgtctcccccagagaacaatatcaaaagtcgaaaagtttatcgtctcccccagagatcgataaaatgccgaaatcctccaaaaatttgaaccgatgtcgttgttaccttgtgttctgtccaggagcgccaaatagtaaaacttctcgccgttcgctgcttatttgccttagattaattagggcaggggcacgggaacagtctttaattaggacaggagagattggggacaatattattattagggactttgaccaattcgttcggcttctttccaattatgccgactcagtcaattcgcaataaatgcaattgactgcacaattaaaacacaaacaagattattccacagcacacaaatatccgcaattaccacgaatcattattaaaacaaattactacaattaacgactaaaaaaaacgcaaatgaaaaagctcaacaaaaataactaaacaaaatgccaaaaataataaattaaaataatatcgaatggtcaaagtcaaaatatcactacagcaaaaacaaatgtgttattatcacacacttatcatataacttaattatacaaacatgcataaaagtacgtacatattttgaaaatttaaaaaaagtttgaaaaattcaaaaatttttacttttttgagacgaaaaagaaaaattaaatttatagaaaaataaaatttatgaaaattacagcttcatattttggtgtttattcttggtgacttgaacaaccagcaccattgccgtctgcgattagctgtagcaattcaattcgtggatgatgcatttggcacgctgttggcccatgatggccagcagacggcatttgtgtgcctgttaatttttttttaaatttccactgctaaggttaccacagttattgaattagaacccccaggggctctattttcaaccaccctcgaaagtggggttttatttcagggggctctaattcagtaaatacggtatgtaagatctgatggattttcggtcttggtccaaggtcccatggtatcgcaagaccggttctaatccaagaaattttcctgattttggatttggactttacattaaaaaattgaccaaatgagcatcaatcgaatttttcattaaaaaaaaaatttaatttcttgatcgaattcggattaaaagatgaatttcatcggattagcgtgtactttcctcattttgggttcacaaactcactcataatattctcaagctgatctatttcgaagagattttaactgttgttgcatttatgtgcccaaaataatgctttacgcactttgtaaattcgcgcgcatttttgttgcttttttttttggcatgcgaccccaaaacaggaaaatacggattaatgtgatctttgatgatcaaaatgacatcaaaaaatactcaatatattcggaaatgaaaacttcccagctgactatgaggagtgctgatcaaaaaaaaaaaaaaaatcaaaaaatatatttctcacccagccgatcagagatgaacgaaagcatgacgcgccaggcgcgcactgtttcacgtcgttgacgcccagggggaagccaatgacagacggcgtctgtcaacgcttcgccaagacagtcccaatgggcacgccttatttattcggtgatggtattaagacaatatttaataaaatttaatttaaaaaaataaatatattttcacaagaaaagcgaaaaaagaaaattttttgaaaaatgcctccatttctaataaaaaataattttctgtagaggcaatggcagcaatagatggacacttttctcgagttaaggctcgagactgcgaccaaaaaaacccgaaaattttctcaagtcgaggttcccaagcatcttggaagagggggcttatttaaatgaaaaatagggcaaatttacaaaatggcaacttttacttgactttgaactgggcatggccttggccgatcagctccaaccactgggccaatggacgttccgactccgagcattgctatcaaataaaaaatatttaaaatttatttaaaaatattgagtgcctcaggggttggtcgcaaaaatgcgtccaccacacgctgaaccagctccgtgaaatagcgttgatgacgcacaattgtcgacgcgtcagagggcgggtcgaatagacgcacgacggcagggcaggcaccttaaaatcatcgagaaaagatgtttaattacattttaaaaaagtaattaaatttgtgcacctatcatatgttcgaagacggctttgccgaaagccgccttcggtattttgagccacgattttctggaaatgaaaaaaaaattgtgaaacgcgatttcttttgtaaaactggacgatggcaaactgggcgacagcccggtttttggagtataactcctttcatattgtccgaatttaaccaatttgttatcgttcggtaaacctaaaaattctctctgcaaattttaaaaattcgttatatttcaaagaaattatggatataaatcttcggaaagtaagttttttttagtttttagtcataaattttttgaaataaaaaaaattttgagatcttgcagcttgatagagaattattcgggctaccgaatgataacagattcattcaatttggacgactatgagttatacccaaaaatcgcgctgtcgcccaattgtccccatcggattttaaagcgatttttttcgaatttgcacctgatcagcatctgttgatcatggcttaacagaataccaagatgatactgttgttgaagcttgaggcgttgcatgctggtgatcggggacgcgctacgtgaccttgagaatattttttagacaatgtttaagccacactgatatttgatatgaattaaaaagggatgaaaggcggaaaaaacactaaaaacaaattttctacattgaattttagattttaaataattttctggctttagttatgtttaaaaattggagtcagaatgaaaaattaatttggaaattgggaaaaaagtaaacattttttgaaaattgtaatttatttataaaagctcgatttttttgtctttagctttattaattttattaccttcgcagtaattggtgtgaattttcaggtgcagtaagaaggtggctgaaacatggaattttaattttattaatttttacataatttaattttttataaaatataaaagcatttttcattacttgttgctacgactttgtggtccatcagtctggcaaaaaactaaatttgttggcgacaaattgttattgttgttattattatgattattatttataaatccgttgagggagtgtttctaaaaatacataattatttaattaattcatttatttattttcttcttacctcagtcacacttggatgcattttgtgctttttggataaattcaaatttttttttatttaaaaagaaatattatttttttgtatgataacaattttttaattaaaatatttatctgaatgaatcaaaattaaatataaaattgaatataaaatctagatttatttttaattatccgtattcaaatatttccgttaattaagaataaaatcaatgtaaaaattacctaaaaatttcctctttgggtatgaaacaataaaaggttcaacattttgcttaaaaataaattttttcattgttagggtgtttataattaaaaacacaaaaaaattgggcgacacggct

SEQ ID NO: 3870 - DNA, 1512 bp, Heterodera glycines
ttttttttcataataaggactcagaatcccaaaaaatggtccctttttgaagaaattctgttaattaatttgctcccaaattttgaaaaatttacccaagcggcgcttaccgggcacctccgggaaccacttcaccctgtttcaaaaaaaaattttttttttggatggaacgcacagcaaaaaactttttattaagttttataaattttggaataaaatttacaaaaatactgatttttgaccccaaatgctgattttttgccggccaaatactggttttgaaaatttttcagttgtgagtcctgtataaaacccttggataacatgttttcatgacttaaaaaaaaatcggttttggtcggttttatgcgtcctcatctaaaaaaaaagataaatttcaggaggggggcaatgaatatacaccaccacctaatgctaatgcaaacattcgggcccccaggggacaacacaacggtgtcagccgaaggcacacaaaaacatgtattagtctcagagtcattatggtgggatgaggagagaggtacaatttggaaatgacattttcgaggcgtcgtaaaaaaataaaaacctgaaaattggaagagttctcaaaaaattaatttaatttcctttgaaatttaaatggttatttaaatggcttctagaggagttccttctcattcttataaaaagcaatggctatttattattatttgatcgaactttataagcaacaaaaaaaaattaattaaatttgtaaattgctttacatttaaaaatgagaatgatgacgtgtgtttcaacttcaaaatgatgacaaacaaacaaattgcactttgaataattaatttcccttgggggattaggggacaaaatttttttgaacaaaatttgtaaattctgaaaaaattacatttttaaataacgacaccatatatttttttcaaaaattgaattcaaacttattttaattttaaaacaattttttttatttttacaatatttaatttccaatttttatcctccgacatgtaaatgtactataaaaaaagcgagatgagatagagggggaggggatgcattaaataaaagaagtggtaattattgaaattgttttgttgcttctgcgccccgggcgatgtgtgggaattatagtgaattatgcgtttagggggaaggggggagagacagataatgtgaaattgttttgttgtccctgctctgtctagaagaaaaataatggatggatggcttatacatttcacacacttaaatttaaaatgtttaaaaaaatttaaatttttttcatttttgtggcatagcatataatggctctagtttaatttttattgccaaaaaaccgactttgttcagaaaatcctgccatgaaaatgaggccaattgtgcaaaatcagcattttttttaaatagtcagaaattttttagagagtttaattttctcttttaaatgtttaaacaaatttcgaaaaatttattaagaatggaaaataa

SEQ ID NO: 3871 - DNA, 2469 bp, Heterodera glycines
aaatcctgggaccgtccctggcccattttccgggaacatggatttttccagggcctggattttttgtacaggaaattcaggttttttcaaaatgttaaactctaaatttttgaactcctcctcccaattcaatgctccataacttggcaaagaaacaaccaataaaatgctcttatgttcattcgatagcccaaaggaaaaagcttaaaattctaaaaccagtatttttcaacaaaaaataatttttttttttttgtaaatgaaaagctaattaaaaaaccccatagggttagagttatccaaatgtccatgaatgttcaatatatgattgcactctgggccaaattatgaaacattgaagagaaaaatgtgagaatattctattaaccacttgccctaaaaattcaatttttcatagggtatgcaagcaagcctcaattttttttttcaaaaaattttccaacgcgaaagttcgtgcaggcttccgctgctgatccctcctccaacacctccggcgcccatttcctgcgcatcaattgcgttactccaatcgatgctcatcggttgaatggggctgaccggactgatcggagagctaatattttcaaaaaaataaaaaatttgttttaaaattttgtaacaaaatgtaagcctttatacattttacatagtcccggattgtgtcataaaaataaaagttaagataaaatttaaaaaaaaactgcttttccgaacatttttggcacaaatttattgttttttttttgaaactcaacgtaattttttgaaattttacaggctaatagagcacagttacttgttaagaatattaaatgataacaaatttggttcatttcgaagaaatgagacagaacatttaaccaaaaaactgggccatcgccaacttggtcctttccgacatgggacaccacacttttgtgaactcaagtaatttagacatttctcttaaaaaaatttaaataaatttatacttacgaaaattggtcatcatttgaaccgccggattcttcttcttcatttgacgacatcattcacagcaaaaaaaaaggttacagaaatcaaactgtgtcaaatccaaattttaaatgcataaaaaaaaaaatttttttttggaaaattgtactacccatcaggatatggggggctctactgcagtttgcgtgtccaatcagagaccaccctcaatttcataggccataataacttttttcttacttggacaaaacttacattcttggtacaaattgaaagtcctgtctctttcttttgtctctatgtcatcctttcaccaaacctctctaagcactacccttctctctctcctctcttcttctctctcattctctctaaagcatattataaagtaattaattgtttaaagtatttaaaaaaaaaatttaaggaaaaagcaaaaacacaaattgtaaacaattttataaacattagtatttgttattctaaattttaaaaatttcttcttgccattttttattttcttttttttgcaagttttcgtgtcataaataatctctattcaaaaaaccatcgatttagtatagttagattaattaaattttaagttttttaaatttaccctaattatgataattaattaattaaattctttaattctttaaattccaccttttcttcttacaattaatgattttttaatcaaattatgtcaattatagcagatgctgtatccaacggggggggggagtccgaatacaaatttacatatatccatctgatgagggtttatttatctctgccgaatgaggattatttttttgaggatttttaaggctgtccaattaagtccatcacaatataccgtatttattcgattagagccccgggggctctattttatttatttatttgccttttcaatttgatattttgccaacttcattacatatgtgcataatttgttgggctcaaaatgatgacaatcggtggattggatcggccgatcagcagcagtccctttttcactggcgattggttcatttgttggtggtccgtcgtggacttggccaaatcatcagaaccaatttgcttttgctatcccttttttttcttttttttgtgccacgtatccatttgtgataattaccaccaccaacatttgcttggctctagctatcaatctgttcattcattcccatttaattgggatgggtgaagcaaatgagttggggttggccattagctaaaattatttttactaaaataattagaagccctccccttgaaatataagctaagccccctattggggggggggggggggaggtgaaaaagaaaagcgtcccccctgaagggtcggggtcgttttggcgccagccaaagttttcggactataacttttttgttgttaaccaaatccaacaatcttggtatcattcgtaaacggaacatgtttagaagctaattataagc

SEQ ID NO: 3872 - DNA, 1127 bp, Heterodera glycines
ctttcgaatgataccaagatcgttagatttggttaacaacaaaaaagttatagtccgaaaacttgggctggcgccaaaacgtcggcgccaaaacgacctagtccccccctgaatgagaagctccccaaacagaagcctcggggcttacattttagaaaataaaaaatattaacaaattttcaagggttgcccactaacaaacgagcagccttttaactttcttatcagttcattgttttcattgccactttccccccgtgtttttgctgtgtccacacatttttgccaccgctcccgcacattttgctcttcttatgttggcatttttttaaataaattaaatgttttacacatttttttcaaatacagcctcccccgtccgtgtacaaactaaataatcaaactacctaattagtatcataaaatgttgccccgttttgtgtgcccattcattgtgatgtttttgctgatggctctgttcgacaacagttggaagtgcagtgccgagctgcttcctggtccttttgaagatgaaacaactgtgcgtccgaccgtgaagccgactgccaagtcgggtgccattggtggtgtgcgggtgggccagcagttgttgcttttgcccatgccgttgttcatcgcgctgtcgctggccggcaattgtaaaaaccgtatcatattttctctattaaagcacccttccccctcagaagggttcaaaaattaaagcccctgtgggctctattagaggctaattacgataattatattgataataggtatgcacctagatttgtgttcaaaatatttttcttgaaccgttttttcaaaatttcttgatgctccaatggggccctacaagcactaacgggaaaatttttcgtcaatttaattttaacagatttttttgaaaaattgcaatttttgagatttttatcaaaaaaatgagaataaatcatcataatggatgtgtattagtagcactcagaattttatttttaaattaaattgcattaaatttttgtcagattttcatgtgctgctgccgctgcaataactgctgaggtcggaacaaaacggagcttaaccaagaaatgaaaatggaaaaagaatagatcgtcgcattaatt

SEQ ID NO: 3873 - DNA, 1011 bp, Heterodera glycines
tacttacccgcttctataaacattcaaaacaaaaacagactcgtcgattcttttttttattttttatttatatttttaaaaaatttacatacttcattatacatacctaattcaattcctattgtttagaattttacaagggaaaagcgttctcttctcctaatttcgggagagagaaggagcactccgaccttaggactgatttatcagagtttctccccaaatgcgtctttcttccattttactgcttctgttactttctttctccaacctttactccacaagggcactcaaaggtcagttgtttaatcaaaaagtgacggcgattatttcattatgaaaaatggaacaatgtcccaaattcggatgcaaatttcgatggaatgaaattggccgccgttttggcactctccgggttcctttttaaatgtcttctcaccttccccgttgtgcataaattatcgatagcaaataatgacaaccgaccaaaatgatcaaatgcctttttgatgtattgaaatgccttcgcccttttagcatttgccaatttcttttctttttttgcagttaatttgctcgacacattaaacgcaacttccgaactcaattggcgcacttattcaaaccttgacgagaaggacggggtcggtcaatttcgaagttaaacttttcaactctaagccattttcttttttgcgcacttccattttctgcgctgaatgcattggttcaaatcattcgagggaataatccatgaaaatgcattctctgaaagaccttagccatggtggtcattcgagtggacggaatgagggggggggggggaggggttgagaactggtgtcatacatggagtggacaatcgattggatgagcactttcagttcagcaactgcgcagggctggacgcagcacgagcccattgatccgcttaagaaggaggaacttagaagggaaaggaagtgatctaagttaataaaaagacggatgaccggtaatgactagaattat

SEQ ID NO: 3874 - DNA, 2308 bp, Heterodera glycines
agttatataaatggattcgtttaaaagcattctaatccttaattccttcagtggttggaggagacaattttttctcgcgtcgaaaatcggaaccaccaagtgtactcaacgtgcaaccaggagccgaacttcttggtggaaaattggctgctaatccccgccatcgaacgaggcgaagcgttacgactgtatttggacttcaacttcaccatcgtcagatgtgcggcaatgccaacactgatgcggacgagcagttgcaaagaaactctgaaactgtacgcagtgcaactcgaccatggcgaaacattgcggacacagaattggcacaacgaaacgaaatggtggggaggggttacggaaaatcgacagggtgaggggagatcttactcaaaaaataatgtcaaaagaaaaactacagcaacaagttgatgcatattttaccaatttggcagggattacgtggacactttggtatcccattccaccgacaccggcgttccgtcgccgtcggacgctgagaagacgtacgctcagatcagctcgtacaccgtctcccgccattccgtccatttcgcacttcgaaacaccggtgcctgttcttccattctttcagtcaaagtttgaaaatgaacaaaatccttccctcaatctatccattgttcagatttattacaacgtttgtcccgagcagacttcgccgccccatcggttgcgtttgccccgcacggtctcttcccgagatgcccatggcgttgtcactgtgccgggccgttgtgcagacaatgcgtcgccggtggtgccgacagacagcaaaagtgagtaatcgaaatgcgttactggttgtgaattcgttgtcctttcagcggggcaccgccattcttccgccgcctctacgtcctccttttcttcgccgtcgttgtctccaccgaccgcaatttgcaagtcggacggcacgtggcaagtgttgggtccgactgagtgcgcctgtgacgcggggcacattccttcactggacaacggcatttgcaccggtgggcatccaaactcttactttggcatttttttattcgttttgtttggtttattattctcatggttttggtccatcggcaaactaaggcaaagtgcggtgacctgcatctgctggtcaattattatttcgttccaaaagcaaatttgggttggactttcaaaatttgcgtatttcggcgaaaaacgaggactgcatttgaaaaattcttccgccccagcaatctgacagattttgcgccgcttagtgcgcttttttcctgctcctttctccctcaccaaattgactggggtgttctattaggtgtatttttctttttctttttacagtattttttatatgtttttttattgttgtgtccacgttttttcatgtcccattatttgtgacggtttatttccatcggattggtcattagttttgtttcatttcctttcatcgtttgttatttgacacgcgaccgatatttgagccattcattggacttaaaggcgacaaaattcgcgccagctgatgggggacgggcagtgtttaggccattcgcttggggagggtcactcgccactttcaacactgaaaaatgaatacacccccgctccgtttttattccatcgcatttttcactcccttattcaccccctccggtagaaattgcgccaaatgtccaatctccgcactatggttaatccctctttattctctccctgccccctatcctccatcttccgatcgaattgttccatattcttcactttcataatgttgttgttgtgttggggggggcgatatcgatgagagagggatttgggagatgaaggggattatcgggtgggcttcgactcggataatgacaaatggtcggtcaacggaggcgctaaagtaagtgatgggcgcccttttcgcatcccttctcagtcagtctcagtggccacttggggattgtcggctaataatgccccggggaaaggggagacggcggacgggcccaaccgctttaattcaatttcacacaatttcgggagaagcgaagatgaaatggagagaagagaattggtttaatgaaataacgaaaaagtggaatgtaaggggaaagtgaagcaatggaaaggggccgaagggagaaaagggataagcggatgcaataaaagtgacactatttaacctttttgccaactctaaacccctacatatttgacaaacgaaatttcaaattcgttcttaattgccttcattttcctccttttttggtttttactctgtctctctcctcccgaattc

SEQ ID NO: 3875 - DNA, 2189 bp, Heterodera glycines
ctgacgagtgtcgcgtttgccccgtgcacagtcattcaaatcggtcggcgagtggagaatgcgaatgcgacaggggctaccatcggccaagcaatgacggacctgacgcaccgtgcatcaaaagtgggttggaaggaatggggatatggatcaatggtccaaagtccgttttagttgctgaaggatctttcgatcatttgtccagaatccaattgtcggtgggcagtgacggggccgaaattggcgatgggcgcaatcagagagagactttgcccgaccaacaaaagggtccgcgcttatattttgttttgacttaatatttcagtttttctgcagatgattggctctcacttctttcctccgtgtcggcttggccttgggtgttcgtttttggcattattattgccgcactttgtctgcttctcatcctcaccactcggcaacagaacaatggaagtcgtaagcaaatgagtgatttggacgtgttggacaactacaaacagggtgagaagaagggagccaatcagacattcctactgaactcttaagacacaatttcacccgactacagtcgctctttggccggtcttccaaacggcgccggagggggcgttggcattgcgggatgtttgagcgggcaaaacggcggcagtggcacatttttgagacgcaaaagtatcgttgtataacacagagtaaaagtggacttcttcggttcagtgcacactccgttgattaggggcggccctttctgttacgggacgcaccagcggaacggcgcgggcgctgccgtaatggtaaattaatggacatatcagtgtcaatttcgctgactaattcactttctgataggtccccgcttcgcacggcaacggacaccttcccctccgtgtccccttgaggtcagaaaacagccgaatgtacgtggacccaacggcgtatgctgaccccaccgaagtcttggccgaattcaccaatgaaatttgtgcttcgaacatcgaggtaaatgcaaaaacagcggtcattttctttccttccttcctctcattgttttgttatttgaactcaaaggtcactcggacaattggcaccggtgaatttggcgaagtttgctgtggtcggctgacggtggaggaccattacgggcataagcaggtggctctaagggaatgcaggcttttcgtaataaatttcaatttaagcagcaaattgttgcagtcaaaacgcttttgccgggcagtgatccgaaagcaaaagccaattttctcatggaagcatcgataatggggcagtttgagcatgaaaatgtcattcatttaataggcgttgtgacaaagaccgaaccggtacttgtcgctgtcagtttgtcaaattccatcaccactttcaggtgatgatcttgacggagtacatgttgtacgggtccttggaccagttcctgcgttccaacagcaatgggaggctgagcatttgtcagatgaccaaactgctccagggcgttgcctcgggcatgaaatacctcaacgacaaaggctatgtccatcgtgacttggctgctcgcaatgtgctggtcgacgatcggctgacctgcaaaattgcggactttggtctgtcgcgcgggttgcggaaattcgtgtcgggcaacgattgcgatggctgtgcaccattcgagcagcagggcgagtacaccacgcagcagggagggaaaataccaattaggtgagggcgggagggaaacctgacaatgacacttgccaattcaggtggacggcacccgaggcgattatgcagcacaaatacaccaccgcctccgatgtttggtcattcggtgtcgtaatgtgggaagtaagtgacacacgaatagcaaacggtccttggcattcgctgatacgcgcctttcattcccaggtcatgtcctttggcgaacgcccttattgggattggaccaaccacaaagtcatccatgaagtcgttcagaatggattccgactcccgcctcctcaagacacaccaaaaaggctctacgagatgatgctcgcttgttggcaggctgaaaggtgtttttttgcgacggggtccgagggggggggaggtcggcagccaatttgtgaaggggataaaacatgtaaaaggacgatccttttttatttatttattcgtaaaaataaaaaagtcatcagaagggcgaa

SEQ ID NO: 3876 - DNA, 2832 bp, Heterodera glycines
tcatcagaagggcgaaaaaataaacataattttatctctctagacataagaggccaacgtttgcggaccttctcgagcagctcaattcttttatcaacaatatcgactttttctacaaatatatttgattttgacttggccatttttatgaaattcctcagcaatagaaaagtgctcttcctattgagtgtgatctgaccacaaaggcccgcaatatattattttccttttctccgtccttttccaatagaatatcattttaagagaaaactttttaaagcgagttttaatgttaaaggcgcgagttttaagggcggaattttaaggtgaaaattaaatatttaagacattccttttgagaaaattagccgagttttgacccacatccctttagcgtatctcagaattcattcaaagaagtttctatttcccacaccgattcatttttcgggcggttcccttgtcagtgatttttataaaatgaattgtaaaggggtgaagaaccgagtccgctccacaaaacattaatacttttaattatttgtctaaaaaataaaacgatttccaaattattttcgaaaattttttttccgctaagaaatagtttgacaaaaattagaggtgtgtcttctctggctctttttattgtcatctcttttttttggaatcggtgtgttccgttctttcacttttatacggttttatttgtatgtatgtattccatttatatgtccaaacaaaataaataaaatttatgaataaaaattcaaagtttaactaatttatgtcgttattaattgtttcccactaagagttcttttggggcactttgatggtcacagttttcaccttaagaatcgaaaaattaccataattaaattttccgtgcctccgagtaagcagatagtccgtattctccaagttcgcgtccgatgcccgacattttgtaaccgccgaatggagccgccgggtcaaaaacatcgtagcaattcaccctgaaaataaaaggcaaattaaaacagattttttggattcctttaataattagaggcgtatttccaacgcttacatttatcaaaattaaagcaaaaaagtcaccaaacggtgccggctctgatgttattggccacatagagcgccttgtccaaatcacgtgtcattactcctgctgctaaaccataaattgtgctgttggccttttctacgaggtccttgagcccgtcgaattttataatggacatcacagggccgaatatctaagcaaaatgttatttgaatcatggggagggggaggactgaaaatgaacctcttcctgtgcaattttcatctgatcctcaacacccgcaaaaattgttggctcaacgaaaaagcctttgcccccgaactgcttgccaccggtgatcagtttggcgccctctttccttccctgaattgtcctttagtctcgagatgtttgttccaatcccacctggtcgatgtacttgaggatcttatccatttggtccccgtcaatttgtgggccttgatcggtgtccaaatggaagggattgccaagcacgcgtttctccgcaatttgctaaaagtcaaacggaataaaatcccaccaaatgttaaacttttgtttttgctgaccttcgaccgttggatgaattcgtcgtaaatttttgcgtccacaaaagtgcgcgacccggcacaacagcactgtccttggttgaagaacagaccgaaagccgcttgttgaactgccaattccatgtccgcgtcgtcgaaaatgatgaccggagacttaccgcccaattcgagtgttattctaaactcattgccggccataaaaagaattgcctgactcacccactgcgcaccttttcagatttttaccggatgcctcgcgtgacacttcgagtccgacttcggaagagccggtgaatgccactttgtccacttgcggatgctgaacgatggctctgccagcagttgggccgaagccggggacgacatttaccacgcccggagggaatccagcctgaaaagaaagcacgaattgagagtaaaaagggaattggacaaaatgaggcgctatatggaaagttaccatttttgaaaattttttcaaacttttttttggtaaatttttttttgtttaaaaagtcatgacaccaagtagtacccgggggttttagaggtcgctgatcataaatatgacaattatttgggcatattaagaaatttggcgatagttataaagtgacagatttttaattttatcaaaaacaaaaggggggacccttttgttttgcaaaatttttttgagataaaaaattgtgaatatactttctattcaccataattgtgatggtaatgcttaatatacatcattatgtgtaaataaataaaaaaaaaaaattttaccaaaaaaagtgagaaaaattttcaaaaatggtaactttccatatagcgcaccaaatgatctggaaaaggaaaaaggagggaattagagaaaaaatggggggggggggggtagtcacgaaagagtgaccccgcgaagggcacaaacttcaaactgtttaataaaagtaagagcgaaaggccccatcaaaaacacttccccccagcgagacaccacccacacaaacaaaccccaacctctctgatgagttcggctacgtacagcgccgtcaacggggtctgctcagcaggtttaagaacacatgtgttgcccaaggcaagggcaggggccaatttccacgcttgcattagaagaggaaagttccaagggatctgaaggtcgaagacaagaaaatacacattaattgtcgaatttggggtaatta

SEQ ID NO: 3877 - DNA, 5935 bp, Heterodera glycines
ccgacgtccatcccaacaaaggatggtgccaacaattgctgggccgatggcttccgcccttttggatgcatttttggagcaaaatgttcacgaggcggacccactccaacagtttctgagtggtcgtctgaaaacaaaatgcaaaatgagttttaaggaatcaattgaaaacagtgtaaaaatgtgccaaatttccgtcggtgcgccactcacttctctgtccgcatttcccaaatggattaaattcgccaccaaatgcaaagtttcgaaggtgcccaatgcgagcagttccgactgacttttgaccgacgaaagaaacgaaatgcaatcggcgaacaaattcaactccttcaccaattgcaaagactgaaagaaaaaaaaagaatcatttttatattttggatttttaagagggataaaaggcaacaaaaaaatggggaacatgacaaaatcacgccggccgaaataacgccgggacaaaatcacgccgctagaaaaattttttttatacgaaaatttcataaaatttttaaaaaatcgctgaaaatttttcaaatttttttttcttaaaattttcttataaaaaaatttttctaagatttttacttgaaaaaattctaagtttaaaaaaaatttaaatttctagcggcatgatttcggcggtggaattttggggtgctcccaaaaatgagcaattgaactattaacaaatccaaaaagtgccaaacattttcactgaatgccattgttagggacggggctttgagcaattggacgaaagtcgcgcacgcttcgcccgcgtcaaagttcgctatgcgcataaatctgaaaagccatggaattccgggggcgacaaaaaggcggagcttcactaaacctgacgatgactcggaacagttcgtcaatgctttggtcgctcaacggctgtctgacgcccttcagaccggcaaaaagaactttctgaattcgacagaatttgaaaaaggcagagaaaaagcaaaggcagcacttgaagtgtcaaaatgtgtgctcgggttgcgcacggagtgctcattttgacgcaaagcgtctccagaatggaggccaccggtgcgttgtcgcgcaaaagcacccatttgtcggtggaacaaccgctgaacaggtccaaaacggcgatgaacgaagcaactgcacgcccatcgaccactttggacagctgaaatagcagcgagcaattgggacaaatcaagaaaatggttcccaagccgtacatcggtgtgaccgatgtggtcaaaaatgcgcgaaaggagtgcggaaattgtccgactcgccacatgcacaaattcagtggagaggaaaagcgaagcgaacgaaacggacatggcactgctgcgcatcgaccgcacgaccaattcgcacagcgcgacgagaagctgaactgtttttggaaagcttaaaagtgcgatgggagcgcaatcgatgccaaaatttggcgaatttcactgagaaacctttcgttcaggccgagaaacgagtgcaaaactgtcgtgcagcagaaagacgccgtattgcaaaagacgacggttgtctgggcatttcgttgctgccttacattcgtcgcataagttttggctaaaaacagactatttttggtccttggtatccatccatcttgccgggaattagttttaattatggcactgatttttaaaataatattcaattgccaacatttacaaccttaattggtccaaagtttgccatcgaacgactcgggcacgtgccaaccgttgaaattcctcgataaccaatggcactacgctactgctggcaatcaatgcatttgtgttcattgcggtttacctaatttcgctggggattctttaaaaaaaaatttttttttatatttttggatataaaattcgtttcagaaacgtcatcattgatcagcaaaaaaacaaaacatttttaagtcaaaaattgacaaattatttctgtacatatccgaaatggtcaacaattaatccgtttccattgcgtcttcttcttcttccctttcctcatcttttgatggctttttggctcgtccattttcaattggcgtcggagtgggtggccactaaaacaagccatttcttgtagaataggaaaataaaaacgaaaagttcactcctccgatccacttacgtcgtcgtcttcgttgtccgactgcacttgtggcgttccaactgtggcatccggtaaaatttcgtcgtccaatatttcctcaacacacgacggtggcagtcgcaacatttcttcgtcctcctcaccatcctttcgaaacgccgaagaagaaggaggaaaaggagcgaaaaaagcagcggaaggcggaggaacgaaagggacgagttctttgcctgttcgaattggccttaaacggggagagacatttaaaacaaagtttagtggaccaactatttaccattgggtggctggctaataacacgcgaaatgactaagaacgattgggaaataacaaatgaaaatccggataccattgttgattccagaacttttgtttctgttttttgaactctggtccccgcctttgctatgttacgccttttcctgccacaccttccaattgggggcaatgggccgtcgcctccgtcgccgttgtgcattgagctgatcaaagagcgcagctccgggctgagttcgatgcgctgcttctgttttcgctgctcttccgtctcacaatcagcagaagaacaatattcgctgtccaattgcaattggttgtcccccaccaaacgatggcaaagattctccgttgcatttttggcactctccaaattggtttaaaacaattaaaatattgtcccaacggcacttaccgacttttccttcccctttcggtccgtggaattgccttctcctggctcctcaataattggtgcattagccgcgctttggaaaatcgactcgtcctcaaatggaagctcatcttcgtcacttgaggaaaaaggtggaaaattgaacgatttttctactttaagtgccaaacttgagcaatgtttggtaatataaattttttcagtttgtttcaaaagtgccgacccgaattggccccagtctctgatctcttcgatgatcggtcccttcctctgctgtttccattggtctccccatgccatttgagcagaagcaagcgttgtaatattcctgtggttttttaagttacaaattactgccaaattcggtcattgtcacaccgttcattggtccttccccccaccgctttcccgtgctcatccttcagccgaattccgctcaattttgtgctcatccgttcctcatatcgtcgctgcttcgctctcggctcgacgtccaacaggaaaaattcgtcgtcatcactgctggctgaccttgatgttccgatggtttggttgttttgctggtgcattctttgctcactcccagtgttctgtaaatcgattgcgaaataatcaataccaattgttaggccggaagagcagttataaaattcagtcaaaatcaaacggaccgacaatttccgtttggcgccacctgtgcccgatatatacggttgctgctgctgttgtttaaacggcgaaattccacgccggtgcgggcgttttgccgcagttgcggccccttcggcgaccgaaaatggggctttctgctggttggacaaagcaaatccactagagttgttcgatgtcgcagagttttctgacgaagcacgcaaaacagtactaccacggaaattgttgttttgggtcgttttcgttgtcactgttcgacgaatacacagcggttgaagaagggaaaagtcccaaactcataaaggaactaatttcgagcaagaggcacttgacaacgagtagaataattatggaaaacaattactttaagcaaatcccttactctatcccttaactatatactaagtcagccgaagccccgcccctatttttgaattggcggttaaatgctgttttgttgtaataggaaaaagaaacagaaaattaaaaaatataattggagattaatagagaaaggatgggtagaaaagagagtgcagtgtatgtttctctgtcggcgcggatgggaggggtagagtgggtaacgcgtgcggttgtcacgcaggattgaatgcgtgcgagtttgtttatgtgtgtgatgagtgtgtaggagtgcttgggaataaggaggtagagaagaagaggaaaacaatagagagagagatgaaaaaggaagcgagagagggtacagaatgaagagattctaaaggaaggggagagagagaggactgagagagaaagagaagaagagatagggataaagagaagataaaggagaaaaagcaagaggacaattaaagagaaagcggaagataaatagcgattgagaatggggaaatggtaacgatagaaaaagagtgggaagactgagagatgacagagagagagagagaaagagagagagagatgagaggatgggagagagacagagagagagcagggagagagaaaaagagagaagggagagagaatgagaaagcaaagagagagagagaagagaaagagctaagagagaggtgagaggatgggagagaagagagagaaaaagagagaaggaaaagataaagaaaaaaagagaaagaaagaaagagaagagagaagcagtgagaggtagagcgaagagagagagagagaaaaagtgagagggtgggagagagagcagagaaagagagaagggagagaaagaaatagagagagagagaacgagagagcgacgggatagagagagagaaagaaagcgggctaagggagagagagaaagaaatagagagaaagagaaaggtggatagagagagagcgaagagaggagaggaagaggaagagatagagagagaaaatgaaatatagagagaagagagagagagagagagctaaggggagagagaaatagtgagagaaagagaaagaaaatcgagcagtgagagagagagcaaaaagagagagagagagagagagagggagaaagcaagaaagagagagagggagagagagaaaagtggagagagagagagagagcgcagagagagagcagagagagagccaaaggatagagaaagagagagaagaagaagaagaaaagagggagaggaagagatcgagagagagagagagagagagagaaaaaagcgagcagtgagagagagagtaaagagagagagagaaagagggggaaagaaagaaagaaataaagcgagaaagatggatagagagaaagagagagagagagcaaattgagagagaaagagggagaaagagagagggagagagataaagaaatagagagagaaaggtggagagagagaaagagagatagagcgaagtgagagagagagagagagagagcaaagagagagatagagaaagagggagaaagaaagaaagagagagggagagagagaaagaaatagagagaggagacagagcgaagagagagagaagaagagaagaagaagaggacgaggaagagagagagagagagaaaaaagcgagcagtgagagatagtaaagagagagaaagagggagaaagaaagaaagaaagaaagagaaaaagagggagagggagaaagagagagagcagagagcgaagatagagagagcgaatggagagagtgagaggagagggagaaagagagagagaaagaaagagggagagagaggaagaaagaaccgcagagcggttggcgccgcgaagcggcgcccaacagctcgtactaatttgtaagtgagaggaagctccgcccttttttgcgtttttgaatttgcttggcgttatatttttagaggaagagaaaaagaaaataaaaatattatttattttgaagagattcttccaaatgataaatagagaaagcatgcatatggagag

SEQ ID NO: 3878 - DNA, 1829 bp, Heterodera glycines
aaaaattcaaaataattcatcatctgtctagcggatccgaacccatgacaaatgttaaagaggaaaaaattaatcaaattaacaaatttttgctgggattttcatttgatcaattttttctgatcatttttgacgccggagccaaaaaagccgaaaatgctctacacgataaagtggtttaaaagtgatttgaacacatacagttcggaatgttcccttgtcagtatgcgcggatgggggggggtgtagaaagttgcgggagtgggtgggaataaagaagtgaagataattagagagagataacgagagagggagacatgatggatagagagagaaaggaatgacgggtagagtgtcatatgagagaaagtgagacagaatgaaatgaaggaaaaagaaaggcagagagagcgagaaagaagatgtgagagagattgaaggagagaatgggctgagagagagtaggaatagatagagagaataaggtgagtatagaagaggggaaaggaaagtaggagaaaagaggaggcgagagagagagtgaggagatgaatatgattttaaagtaaaagaaggagggagagaagagaagaagatatagaaggaaaggtagaaaggaagagagaaaacgagaaaaagagtgagattaagagagaaagggagagaaaacgaaaagagaagagtaagaaagaaaaagagatgaaaagagagagagagattgagtcccagcgattggaatgccggtaggttgagtcccagtgattggatgcatgagaatttagtcccggtgattgaaatgcaggagaattgagtcccagtgattgaaatgctaaagggtttagtcctggcgattggaatgctggtgggttgagtcccgttggagaaaaagccaagaaaaggatgcgagggagccattcgattttatcattcataatcctacaatacaatcatactacctagcgggggatgcgccgaaggcgctgaccctgctagttttataaatatatgaatttatttaactgatgttcagggcagatctcttccgttctggaaagaaatgaagcgaaaaagaagaggcatgaggacgatggaaaattcaaaattcttttcgccaaaaaacaaaatgccagatcaatcatttcataaaaaaataaatatgaaaatggcgttttttctagggttacagaaaaattgtcaattctttgtccaaaactattaaaaattccttctttttgctccaatgctgaaatttgtctttttgaaatttttttgttgaatttgacaaaaatctttgtccaaagtattgactttttactgcctttttccaatttttcgtgccttgacgtttttgtttttatgccttttttggtaatactggagaattggtgtcccgacaaaaaataatgaaaaattttatgttacatgatgaaaaatcataggcaaaacaattatttttaaaatctgagctcggattcatgatcaccgtatttttttaccctagaaaaaatgtaaagaaaattcttaactttatttttcgtcggaacatcaattctccagtattaccccttttttaaataattggaaattaaaactgtaaattttatgttcttagttcgttgtcaagtgcctcttgctcgaaattagttcctttatgagtttgggacttttcccttcttcaaccgctgtgtattcgtcgaacagtgacaacgaaaacgaccaaaacaacaaattccgtggtagtactgttttgcgtgcttcgtcagaaaactctgcgacatcgaacaactctagtggatttgctttgtccaaccagcagaaagccccatttt

SEQ ID NO: 3879 - DNA, 1786 bp, Heterodera glycines
tttttctaaattttgcaggctaatagaggacagatagggctatcgaatgataccaagattgttggatttggttggcaaagaaaaaaattatagccaaaaccccgctggggcccaaacgtgccggggcccaactgaggtaaaccggaatgctatcccgacaaaggaaagtacttttctggagtcattttaggcgctgttgaagaatctggtgtcaaaaatctgtgattttgtctatgattttcattatgtacctttgttaatgatttttcaaaaagaaacaaaatgaacaaattatatatcaatcattttctttcgtcgaagaggaatcgattggtactaatttcagattatagcccaacaaatttggtgcaggaatggggcggaacactttattaagccggtaattagctttttggcaaaacaccgcacattcgactaacaataaagcggcccttattctttttgttgaaaaatcatgatgaaaaacataaaatgaatgatatatttttgctcttttgacgacaaattcttaaacagcgcataaagctactctagaatagaaaagtgcttccttgcccttgtcgggatcataacatttttatggggggggggggggcgacataatggataagagaacaattttgcgatttttaatatggatttttattggcgacgcaaggggaaatttgaaaaattattctgatttgtaacagattttcatctatttgactccccttctttgcgcagatatggatggaattgcacagtccaaccaaaaagaccattttttgcttaatttctttgttggcaaagtcaccgaaggggccgtagttgcggcacaaagtccgcaacgaaactctcaccatttgaatgaatttgagaagcaactgatgcgggaaaatgtgagtgtaacaaaaataacaaattccttggtatcgtaaaagtgagtagttctttgggtgaaatttgttgattcgatcaagatttttggacaaagacaattccaacggtaaatcccctttcagggtttcaaccacagtgttgctgtctgcaacaccaactttgacacggtcaatcgttcaacaattggccgccttgaggctttttatcttgcttttggagttgagggcgaaaaactgacgaaacgactttttggaggttttttttcttcatttttgggcttatctaatttttcttttcaggtcaagacaattcgcatttcgatcaagagacgcgacttgcccctcaaatcgaaccaacaacaacaaaaattttgctgaactcttcgtcgtcgtcgtcgtcgtcgtgtttttcaaaggtctccggtgatgggatgcgacccgtgactaatgtttgagtcaacatttgtatttgttacaacaaaaattccctcctctataggacaaccaatgggtcgtggaaaaaatactgaaaaaacgggtgaccgtttgtgacggtatgcgaaatgtctcctattttttgaaatgggaaggatgggactacaacttttcgtcgtgggaggaccacagcgaggagaacagcctggacttgctggtaaattaagaacgaccaattgttgatggacggagtacgtgtttcaggtcaaaaagttcgagaggcggacgaaatggcgcaaagcgatttacgaacgcgagttgcgcggggtgctcaaacgcaacaaacgctttactgttggtttttgcaaatcttacttaaattcataatttattactaaaagtataaacaatgctttttggaatatttggcattgtgtccctgttccttt

SEQ ID NO: 3880 - DNA, 3281 bp, Heterodera glycines
ggctcccggtaaattggacaccagaaaattggacactattgtacataaaataaataagttaaaaataaataaacaaaaattttaattgaaatatataatgttattattatttgtagcatcagcagcagaaagccatcatacattcataacgaaaaaagttttaattttgatggggttcctataaaaaaattttgtcagcgaacgctaaaaagcgtaaaagtgtcaaataaactaattattagtaagcaccgctttgaaggcttcaagttccgatgccaaattcccatcatcattattgtcccaccaacacatgaacacttttggcacattgttttgaagcggagtgaaaagccatttggccaccgcttgtccatccgatgccgcggcactgtcatcggccggaaattcaatgaagagatcggcgtcacataaattgacaacacgaagcgatggacaatcgttgagaattgacggcacaaatttgcgcaaacgatgaaaaacattcgcaaacaaaaacaggccacaaatatttcgtccgagcattggccaaatgttgcgcaaaatgaactccgaaatcagatcactgtccgttttgatggccaaattaattggaaaagcggcgaaaattgggcaaaaacgtcggagaaaagcgatcacattgtgatcgatgtatctgtgaaaatggatttggaaatgttgaaaataaatatatggatgagccgaagtaacaaaagtatcaatgaccgtaatatttaaatttaattttattattttaattttattttcttagtaatgcataacttaacttaaacttaatctaattaatcaatcttggttattaaaagttatcagctcaataaattccaattttttaaaaaaatctagcaaaaaatttacaaaaaagttgtaacgaaaaacttccaaaaaatttagaatgaacaattttgaccctaatttttaaaaaactctacaaaattttttgaatttaacagaataacagagaaatctttgggctatcgaatcatataaagaatgttatgaatagggaacggatttttaagcgcgaaaaagtccaaaataagtgcttaaataagggcaaaaaaagcgcgaaataagtgcgaaaataagcatgaaaaaattccaaatgtagaggtgaaatttgttaaaattgctgttttctctatgtaaattagttaaaattaagtcaaacaattttatttactgattgcagttagaaatgaagtacatttagaaattttcaggatttaagggtcgattctcaggggcgtatttttccgaaattttttgggtcgattcttaggagtgtattttttgaaaatttttaggtcaattctcaggggtgtatttttccgaaatttttttggccgattcttaggggtgtatttatcatttttattgcatttttgttaataaatttcccaaaaatcgcgaaataagaacgaaaataagcataaaacgctaaaataagtacaaaaacttattttaagggcgaacctctaaaataagcattttaagcacgaaacgccaaaataagcatttctaagttcgaataagtgcgttaaaacacaaaattttcgaacaaaaaatgtgtttttcgtgcatttctcgtcgagttaaagccgcagaaaaaataagcaaaaacttagaaatccgttccctagttatgaattaattgaattttgaacaattttcatgcattttgtctccaaattgaacagttccgaatgtccatttgcgaattttgaagtgttcgtccacataaaagtcgaaacggtggctgatcattgcaattccaaggccaagttgacgcggagagagcaaatcgaacactttgagccaacaatcggcggagataaaactgaaaaaaagaaaacaaaaattaaaattgaaaattggtattttaattaaatttaaattaaaattgaaaattggcatttaaattaaattgaaaattaaaattgaaaattggtatttaaattaaatttaaattgaaaattggcatttaaattaaattgaaaattggtatttaaattaaatttaaattgaaaattggcatttaaattaaattgaaaattggcattttaattttatttttacattgcttttgccatcttttcctccgcttcttttcggttgtcagacattttgttgatggtaaattattaacagtttttggcactttttcacttaattattcttttttagagcgatttataacaacataaaaacacatattttggggttggcacatattttacacatattttggcacttttgagaaaaatttgtaagaaaaataaaagaaaattgaaaaataacaccgctaaaaatcgactttcttgtcatttcttacagaatttacaaaaattatttttttatccgaatgctgaaagtagccaaattgagttcttaattcgtcattttattttgaaatttttagacacataaaaatcccagccctaataaccagcaacgaaatgttattttttgatataactttgctcaaaagcaactaaatttttaattcttgatatcattagataggcctaagtgctttctattagcctacaaaatttcaaaaagtttctttaagttttaagaaagttatgactaaaaatgttcaaaaaaacttggttttttgagcttctcaggtcataatttttttttaaacttaaagaatttttagaaattttgcaggatactagaaaacacttagggctatcgaaaaatatcaatattataaaatttgatccattttagacgaaattatgaataattttctgtcaaaaattttccatttgatggtttttgactaacgcccagcaccgactgaacgagcgctttggcgccgcttcgcgcgccaaccgctcttttctcatttctcccctctctctctctcccttctctctcgctttctctcctccgctctctctctctctccccctttcgctctatcaaccttctctctctctgcccctcttccccctctctcttttctcccctctctctctcccttctctctctcttctttctccgggttctctctctctctcccccccccccttttccctccccttctctatcgactttcttttctcccttctgtttctcccccttcccgccgtctctcgctccccctctatcctgtccttgtctctctccttctctctctctctcttcactctcccctttctctccatgtctccccctcttactccccccttccccctctctcgctcccttttactcgctcccatctc

SEQ ID NO: 3881 - DNA, 1382 bp, Heterodera glycines
  unsure (1)..(1382): unsure at all n locations
catctctccccctcttactccccccttccccctctctcggtgtgtggggctctctcccttctcactcttcctcggctctcccatctctctctcccttctttatctcccctctctctcccctttctctctctaatctctctccccctttctttctatcaaccttctctctctccctccctctctcttctctcttccccctctctatctctccttctctctcctctttctctctctctctcccttctcttttcccctcacatttctatttctccttttctcttgctctcctcgctctctctctctctctcacttactttactctatgtctccctctctctctctcactctagctctctcattcactctctctctcattcactccctctctctcgctatatttctctctctttttctccttttttttatctgctctcctcatcccctctctctctcctccctctctttttctttctatctctccttctctctctctctctctctttcttctctctttctctctttctctctctctcctccctctctttttctttctatctctccttttttttcgttctttttctctttttctcttgctctgcccactccctctctcacttccttctttcttccgcatacattttttttgctctctctctctctcttctctctttgtcttccctcttttccctgcctcctcattctctccctcccacacgttttcatacccactctctccgcccattctcgtttaaaaatagttttttttaattaaaaaatattgatagagaattattagtcaaaaatttcgaacgcattgatcatccaattaaagataattaagtttttggcgctttccatttccgcacgcccaaaaatccgatttttaaaaatttaaaattttactatttacaattttattttttaaaaaaccaaataggataaattaaagcaaagaaatgcgttttcttccgcgggtttgnccgttcgcngcnccttttgttcgctgttcgcccgtggccgtgctgctgtgctcgtcgtgccgccgnnggtccgcggttcgtccnnnncggcgccntccncggnnncggtgggtgccgtgctcgccccctttgcttgtggcgttgccgtntcgtttgcgggcgngtcggngggcgccgtttgcttccntttngnttctgttgntggngnttgtgtttcntttngggttnctgtgnctgtnccgtttggcggcncgtcgtgttgctgccctnttgtncgcttcncngnnttggtggtnctcnttgncggcggtggggcttgaagagatcgctctcgccatcagtttgattggttctgagcttaaaggaagggcttcagggcaaaaaaaaaaacaactaaaattt

SEQ ID NO: 3882 - DNA, 3671 bp, Heterodera glycines
cgctttccatttccgcacgcccaaaaatccgatttttaaaaatttaaaattttactatttacaattttattttttaaaaaaccaaataggataaattaaagcaaagaaatgcattttcttccgcaaatttgaccattcacaacacattttgttcactgttcgcccatggccgtgctgctgtgctcgtcgtgccgccgaaggtccgcggttcgtccaaaacggcgccatccacggaaacggtgggtaccgtactcaccaccattgcatgtggcgttaccgtaacatttgcgagcaaatcggaaggcgccatttgcttccatttagattctgttgatgaagattgtgttacaattaaggttactgtaacagtaccatttgacggcacatcgtgttgctgccctattgtacgcatcacagaattagtggtactcaatgacagcggtgaggcaagagcctataaatatagaaaaaagtttgattaaaactgagctaaattcaagggcttcagggcaaaaaaaaaaacaactaaaatttgaattttaaatccgaaagcgaaataattattaaaaatttaaaaatcaggtgaaattacaatggaatggtttttcaattttttagtgaatttttatgaaattttgtaaatttttatggaaattctttttttctttgaaatttttcaccctcccacagattaaaattttgtacaatatttaatgcatttatatttttgtggattatgataaatggacaaaaatttcccatattttcattttggcataaaaacttttctgatattattgaccaaaatcatgcgccggtcagctgacatcggcaaaaaatcagcttccttccgactgttgcttgatgccttccaattcaatggcatttttgccatttttggcacggtttcaatggcggtcggcagtctcgagaacggagtctcgacaattctgtcaaattttggccatttataagggggatttttatgccatttttggaccgatttgtgccaaatcccgtcccaattgtggcccaatgttgatcagcacgaattggcggaaagtacggcggtcccgggtagcaatgaacaagaaaaaaggcgacgaacaggcacagagcgcgacgcgaagaacggcatttgacaaataatggaagtgccattacggggagggcacaaattaagagttaattaaatattcaaaaataatagttttcgatcctattaaaattgatatacagtattataatggtgttgggcgccgcagaaggaaatttttcttacagcttaatttttattaaaacaagaaaaaagaataataattttcaagtcgaaattttttgaaataaaaaatttggattccgtaaattaatttcgatttatttgatcatttaggtaaattatgtaaatattttaaaaaaattaaattaaaaataaaaatgtgtcccttccgatcatttggaaaggaaagaagccaaaacagttatgaatgtgaactgatcaatcttggagaattgatcttatatgcaacaaaagcatatgaaagtgaaattgtgtgcgcgagcggtgcacaaaataatggggggaggaaaagcgcagggagaaggcgcgctaattttgtacatccgccgggggcgggtgggatattagcatacagaaaattacatttattccttgaggcagtaattattgttgaattaacccagtgggtcgtcacaggcggtggacacttccgtttgaaattgttcataattttgatgcaaaaattttgacctaattttagtggtctaaaaaggaggacaacaaaaataataacgagaaatcttacacaaaaatccaaaattgatcagtccaacaaaaaacaaaacacattttttatgagcacgtcaatttgcaattccatttgcataatttggtcaatcacttatcagcaattcatcattcacttcttctgctgatcacttgggccgggagctgagttgagaagcctaaaaataaaaaacgaaaaataaatttgaatttttgaataagccattcgctgacccgtcaccaattgcacgctcatcatcaatatgaattagggttgcaaccccgaccgtcggggttggaaaagtcggggttcggggttgtcggggtcagcaaggtcggggtcggggttgaccaaatggttcggggtcggggtttttcgatttttgccttatgctatatagtcaaaaaactttattattttttcttaaaaatcttttattattcataataataattttatcaaatttttcctccggcgccgggcccccaaataaaaatagagggattttattcaaaaaaatgcccaaaaatttctgatcacctttcttttttttttgtttttcgaatcatcttttttttcgcggcgctctttttctaaagacttttaggagaattctattaatcacataaaaataaattaaaaaggaaacagtcaaccgggttatgtcggggttcggggtcggggcggggtcggggttgcaaccctaatatgaatgataattctgttccagggatcatctgttcgccagccaatcgcttccttctcccatttggtccatttgctttcgtctcgcgcaattggacaacggaccaacagaaaacagtagtgaaagtcagttcttttcagtgtcaattgttcccgagtcaattcgttggtaaaatcaaaggccaaaacggagtcagcaaaaggcaacggaatgcaaatgaaaacgatgaaattgacgggggaagaagcattggcaaatgcctaaaatatggggaaattgataaagaaaaatgaaagataaatgaatgcaccgttttgaattgttcaatattcgacgaccaattcttcacataatccatgtccaacccgcatttgaacacctttggcacattgctttgaagtggagtgaaaagccatttggccaccgcttgtccatctgatgccgcggcactgtcattgcatggaaattcggcgaagagatcgtcaacatcatcatcatgagcatggaatttgccaatgcataacaacggcaaatcgttgagaattgacggggcgaattgacgcaaacggtggaaaactgtgacggacaatcgcaagccatgattggtaaaaggattacgtacgacaaatgccgtctcttttatagaagaacatttatagtaaataatatttttggttattttacaaacaaaggtagcttttcttactaataaatatctagacaaaatatttaggaactaaacggaaatcaatgttaatggaattatgatggacccccggttgaacaaatttcaatggattcatttaaacaacgatggttattagaagaggggcattatgccagtgacagcctaatgcgaacacatgataattccttaaaaaagtttgatgagaacgatgagccactattggttacaaacgatatgttagagcaaattgatgttgaaggatatgtcgagacgactagaaaagatgcatattataaaaagccagaaaaaaaaaatccatttatcgtatttttctctgaaataaaatatgatcaggcattttttgcccctactaccccttacgacgcatccccccccaccttcgcgacgaccccccccccactaccactcgaccccgaccccccttacgacgaacgatgggggggggggg

SEQ ID NO: 3883 - DNA, 2923 bp, Heterodera glycines
aaatggggcggagtcgttatttaaaaaaccatcaatatgatttgatgcaaatttgtttataacttagctcaaaagcaaccaaatttttaattcatgatatcattcgatagccctaagtgttctctatcagactacaaaatttcaaaaaatttcgttaagtttcaaaaaagttatggctatggggaactcaaaaaactttgttttttaaacatctttggccctatcttttttgaaatttaacaaattttgaaattttgtagactgatagaaaacacggtacttatgtatgtattatctgtgtacagatttcaaaaaaaatttttttttgaaaatattaaaaattgaaaattgacatttttaattattttacattgcttttgccattttttcctccgcttcttttcggcggtctgacatttgttgaggtaaattattaagtgagatttcgacggatgtagaaattgttcaaaatgaatgtcagattatgatcagcgacccagaaaaccccaaaaatatgtttccacgactttttcgaacaaaacttttctcccaaaaaaggggagaccattggcagtacttgttcgaattcgggttcggggttcgaaattggtgcgaatgaatatcagaatcgtgatcagcgatctcgataacccccgagtacttctcagaatcgcaaaaaacgagcatttttgtccttttttatgagaccaatgtttccgacttttacccggatttaaattagattattagcaaaactgaaagaaattatgtggagttatgagatttctttttaaaccatggcttccaagagggcattaaaaaaaatcagttcttttaagtagggttgggcccccgacgtcggggttggaaaattcggggttcggagttgtcggggttggaagcgtcggggttcggggttggggttgccaaatcgttcggggttcggggtttttcaatttttgccttataccatatagtcaaaaaactttatattatatttttattcattttcagtgaaaatctgtaaaaaatagtcaaaatttcaaatttttcctccggcgccgggcccccaaataaaaataggtttttcgcggtgctctttttctaaagacctttaggagaaatgggttcggcggcgcgccgataggcgccgccggaaaaaatttttgaaaatttggatgggtctgttaacatcttttctccaaaaaatgataaattttttcgattttgagctgatttaaaaaaaaagaagttttttgaggggcacaggcgatgcgcgccaggcgaattttgaaatgtaaggtctattttgtaacagattttcaccaaaaaatttatgaatttcagataaattttgggtttttttcttttttttttttgtcaaaattaatctttattttctaatagtttttcaccaaaaatttatgaatttctgtgaaatttaattaaattttttatattttgtaaaaaatattttgaaaaatattaattttgtttaaaaaactatattaatcacaaaaaaattaattaaaaagaaaagtcaaccggtatcgaactcataagcaaagaattgttattgttaaagtaatcccttaactatatactaagtcagccgaagccccgcccctatttttgaattggcggttaaatgctgttttgttgtaataggaaaaagaaacagaaaattaaaaaatataattggagattaatagagaaaggatgggtagaagagagagtgcagtgtatgtttctctgtcggcgcggatgggaggggtagagtgggtaacgcgtgcggttgtcacgcaggattgaatgcgtgcgagtttgtttatgtgtgtgatgagtgtgtaggagtgcttgggaataaggaggtagagaagaagaggaaaacaatagagagagatgaaaaaggaagcgagagagtgtacagaatgaagagattctaaaggaaggggagagagagaggactgagagagaaagagaagaagagatagggataaagagaagataaaggagaaaaagcaagagaacaattaaagagaaaacggaagataaatagcgattgagaatggggaaatggtaacgatagaaaaagagtgggaagactgagagatgacagagagagaaagagagagagagagagagagagagagatgagaggatgggagagagacagagagagagagcagggagagagaaaaagagagaagggagagagaatgagaaagcaaagagagagatagagaagagaaagagctaagagagaggtgagaggatgggagagaatagagagaaaaagagagaaggaaaagataaagaaaaaaagagaaagaaagagaagagagaagcagtgagaagtagagcgaagagagagagagagaaaaagtgagagcgtggaagagagagcagagaaagagagaagggagagaaagaaatagagagagagaaagagagagcgacgggatagagagagagaaagaaagcgggctaagggagagagagaaaatgaaatatagagagaagagagagagagagagagctaaggggagagagaaatagtgagagaaagagaaagaaaatcgagcagtgagagagagagcaaagagagagagagagagaaagagggagaaagcaagaaagagagagggagagagagagaaaagtggagagagagatagagcgcagagagagagcagagagagagccaaaggatagagaaagagagagaagaagaagaagaaaagaggggagaggaagagatcgagagagagagagagagaaaaaagcgagcagtgagagagagagtaaagagagagagagaaagagggagaaagaaagaaagaaataaagagagaagatggatagagagaaagagagagagagagcaaatggagagaaaaagagggagaaagagagagggaga

SEQ ID NO: 3884 - DNA, 3030 bp, Heterodera glycines
tccgaactgaccattttccgccctgtggacgatagcgttggatcactgcaacacttcctcgagactttggagcgtgtgtgccgccaacttttgagcctcaacatgccggatgacagcccattcatgtaccaaatcatccgcagcaaactgccgtcgactgttctgtccgaactcatcaaaatggaacgtgcggcaggcattccatggggtactcctcagctcagagctggacttgccgaagttctcggagtcagagaagaggtcgaacggtgtctgcgcgaaacaaatgccgacagacaaacacgatttcggcacgaagcaaggccaaatcgacctcagcgaccagaacggcatgaaaatgcgcgagttttttccgttgctcagtccgtcagaaattctgatgacaagcgagttccgtcctgcctgttctgccctggccagcattgggcctcggagtgcaacaaagtgacagatgcagagactcgaaaacgttgccttttgcagcagaaccggtgcctcaattgcctacggaagggtcaccaattgagggagtgccggtcaaagcaagtatgccgagtgtgcaaagaacggcatcattctgcaatctgccctagtgccaaagggacatcttctgcccgttcaaagcaacagaagccctcgcccaggaacaaacagagtttcggaaacgagcgcaactcaaggccattggtgtcatccgcggttgccaatgaggctgactcaatccctgagccgaaaactgttaacacaatcatggcaattgtctccccatccgttcctcatctcgtcatgctcatggccctccgagctcctgtgttctcagaatccgcaccgaacaagcgccgtgacgcactcttcttctttgaccctggtgcgcaagtcactatggtcaagacgccattgataaggcaactgagccttccgaaactacaagacgatcagctagaggtgaatcctttccacacgcggcaacccatcaagatgaaagcgccgcaacacgttttgtgcgtccaacgagaggacggcggatacgaaactctggttgcccatcggacggactggatagtgccatcagtgcgccgtgccacattcctccagggaatgttagtgcctgtggatgaagaaccggacattctcgttggaatggcagacttttggaagtttttcaacggtgtccaacgagtctctccgcaacttttcaaagtccaaacttcgatcggttccactgtctgcggacgcgatgaaattccgtcccgcccaactgccgaccatccactgtccgttatgcccgtcactgtccatgttcctgccaatgaagacgagatgcccaatacggctgtcagcggaattcagagaaacgaatccatctctgatcttgactcgctacgacaattctgggaccttcaaaacattggcatcagagatgatccactcgaaaacgatgacgagacggcacaacaaatcttcgaccagacgactacgcgcctggcaaacggaagatacagcgtaggatggccatggaagaattttccgccggacctgccctcaaattttgccatcactcgctcaaaaaccaaagcactggcctccgttctgtccattctgatgtgcctatttctgattggcgcttcccaaaccaacgccagtagcacgaccaagccaaagcgtgggaaaggacttccaattcgttgccgtggatgcgaactgacctgcacaaaaaccggcgttgacatttcaataccgaatgggattgtcaaattcttgctatgttgtgccggtggaactcagtgcatcactcaatcaggcgttcggaaatcctttcatcgtttgcccaaggaacatcttcttttcgactacgattgcgaagcaatgtactggacgaaacggggcaacaaaagaatcgggagcgtccaatgtccaggcagagatgcgtgcgagctcatcgattgttgggtgtgcctcgaacgactggcaaatcctgattgtcgtccagatgtgaccttcggactcattggtggagcgagcttcttcactttcctcttccttttctggattctgccactgatgtgccacgtcaccatgttttggatcctacagcatcttttcaccctgctcgttcgcttattgtgttgtttttggccaagccaaaatgcaccgcagagagaagaatcccctctccttgccttccaaagtctgcctactccgcgcaggcgccaaatgggtcgcagtcgttttcgtccttttccaaaacttcaaacgacgctcctgttattgaccatctgtgcctttacttcatgtgccagggcacaagttgtctcaatcactgcctctgctgagaaatgccaaaggtccgacttcggctcggtgtgccatctcgagagctcgacaacagttactcttctcccatcgggtctgccggtacgtctactccttcgacatcccgacgagagagtccttggcacgcttgaaatcagcatgcgctcactgactttgcattgcctgccaaaatctgagcaatggcttcggtcctatcacattgagacagtttcggtaaaacggtgcccgagtcgtggaaattgtacacgcgagttctgcgatgacgtcaacaacggaaggaagacagaagttcaggagctgagcgaatggaccaagcatcccggattcaacagatgctcagcatcttgctctttttggtggtgtggatgtttaaatgccggtgccagctgcatcttctaccgtccacatgccattgctaactcgccaattgtctatgagcaaatctcctgtcccacatgggaataccgcttgcgcacttcactcaaactgtcggtcaacgcaaacttcacgaaagagccgtccgtgtcgctcacacccggcattacattccgttggaaggatttgagcatcacacctattgcctcttctgttcctccggccccaatcatggcaaacaagtttctctcggatggcaataacgtggcaatcagtgatgaaatccaaagtgaccttcaa

SEQ ID NO: 3885 - DNA, 4713 bp, Heterodera glycines
  unsure (1)..(4713): unsure at all n locations
aagcgggatatttttgccgaaatcacctacgcgccgattcagttgtctattcaattcgaggggcttcgaatcgctacggaagaggacctaacaaaatgccatgccatgtccaagggtcttttcggatgctattcgtgccacactggagctcatctccatttgcaatgccacaccgactttggctccgcacttggctacgttcgtggttcggatggcacagaattcacagccctttgccacaaaacaccaaaagttttgaatgtcagcctgtcattcaaccgtgccgaggtcgacatcaattgtaccattgaatgcagtggaggacggaacccattcgtgattaatggtcatctccgctatgtgccaaaacacttccaagcacctaatgaaggaagctcatttgcctcgaaggccaaacccagcaactcatgcctaatttggtgcccagattggaacttcgacttttccgatgtcttttggtatttctttggcctccaaaatgctctacgaactgttggcatcatcactctggcccttttcatcgtctatgtccttttgcgttgcaaccctgcccttcgatcttggagagccataagccgagtcgtccttttgttccttgctctttggcctacgactgattcttctgcagcgggagggctgagccatctactcagcattcaaaattcagcaccaaagctgcagtttgaaggccattcttcggtgtcaagacgtgtgactgagactctcgacatttttgatgcacaaatcgggaccattcatctcgccaaaaaccaaaaatcgccaatggacttcgctataaaagccgtctctgtgccagtccattcaccattcctacaaattcccgaatcggccttccacattcaaacccaagcccaattccctccatttccaatggccacactgctctctttcctcgccaacacgatgaacatcgatgtcgatcgcttcggtcttgccgtcactacatccatgagccgttggaacgaggcccaggcgatcgttgagggattgcacgctcgcggctacgaactcaagacacggcatctgtacccacgtgagcgaaatgtgcgacttcacgggtctgagctgagccgaagtggtgcgagtcgtctcggtgcctacaatggaagtgcccgtggcccaactgtctccgagctgtaccgctctcgacatggcatcactcttcggcacccctctgccccatgcttgatggagcccggcgggaatgaacaccatgattttttccccatcgaaatgattcgagtcgtggcccctgaccaagtttctacaccacggggcttgtccacacgccctcttccccgcccccgcccgtctcacttcgagctctgggacagaactgaccatccgccccggtcccgagaattggtgatcaacgttatgccccatggtgattcaacgagtcgaggtgccgcggaggaataccgcatcggtgttggccgcgaactcacgatctctggccccctcgttctacgaatctatgctggtgcccttcttcttgccctattctctgttgcccttgtcgatggccaatcatctattgctggtctctgccctgctcattcttttgccctttgctcttcacggctgcacaaattttcttgccactgtccgtcgctttttggtccttccgcattcgattttgtgcaaatcgtcaacaaatttgctccgctggcttattcaccgtcttccggcagcgaacacttcgttaaaagccatgtcaaatcagctgactcacccttctctccgctctttggccgagttcaccatttgccgctatttaagccgttggttgcaaaattggggcaccattcattgccctccgactcttcaatttccgtcgccctcgttgctatgccgtcaacgcactgctcgtcgactttggctcctgttgcttcccatgttcaatcgggtactgcgtcgctttttgatccttcgtctccgcgtgtctgtactgccgatttcgtcagggcgcccgaatcatgccctccaactattggcctctgcacgaccgaccgtatgccgactatcagtcctatcgctgataatcaaatggccactggtgtgacaagccggtggatgagcattcaacaacgcgaaaaatatgaacgacgattgcttcgactaaacggcttccgcccaacgcttgtcatttgtgagccaatgagttcagccattcggcgcgaacgactccgactgaagcgacttcacatggccactccccaggaaccgagaaaacctggagcagtgtcggaggaagaaggaacagcagttgccggaccatcttcggcggggagtgtcgccaaagcgactgagaaaatggaagaaaattgaggaagagaaatttaattgatttaaattggataattttaaatattgtgattaattttattatttaatttgtgatctttgaaattgtgattttgtccctccattgaacattttgtacatttttagcattagtcactctttttgttgttgatcgctctgtccaaattgctccacctacgctttttctttctatttaaacacgcacatttctcactcctcacatcttatacagacatcttattcattttatattatatttattaaataaacttctttcttatttgggaattattttcccccttattccaccccgccctctctccctcgcgccttcccattttttcccccctttgccgtccgagccaacacaaccgccgttatgtcgaacagtccgaaaagttcaacagaattgctgaacgttttgtcaatatggaaatggcttttgtcgcatggaacattaggtgcagggggcggggagggttagcgtttttcagtggtaaaatgttcatttgtacaaccattcggcttccaattaattggccatccctactgtcctctggcttttagcataaatgaacccttgattctcgatcggaaaaactctaaatttttgttgggtccggagaatcaatcccttctaaaacttcgttaattttgaatattcccaacagccggccgcactgagacagtcagttgaggagtatgtcaccgaagaggcgaacaacggcaccaaaatatttattgacggcatttgtgatctccaccgacagaaaaaacgggcacttttctttcccattcatgaccttttcttaattgtattgtttgttacctatccgggtataatttcttgttgtttttgttgttgccttttccggttagaaattgacttgtgttttttgggtaattgcaaaaaaagttcttttaaaacaaatattaatcggttactattaaattttaaaatgtcatggaatttgaatttgtgtttgtgttggaaaaagaggtaataccgtaattcatcgattagaaagaagcccaatgggtttctgagggaaccggccactttggcgcaggccattttggcgcaagactctatatcattttgatttcacagcaaaattaataatcttggtatgattttaagtggcttgatagtgcctattaacctgcaaagtttcaaaaaatttactgagaaacaaaaaagtatggccaaaaaacctcaaaaaattgcattttcctggtcattttggcgcagcgcgccatatcttttttaaatcctaatataattttttgaaattttgcaggctaataaagaacatttagacctattgattaatatcctcaacattattttatttggtcgaattaaaaaaagttatgaatctttaaacttgtctgcgcctaaacacatggaaccaaactgaaacccatcaacactgcaacaagagatcatctaagccgtttttgaaccataatagctaaattcgaaaaattggacttttgagttttgttcaaattcgggttccggggtgcggaatcggccgaaattgatgccggattcatgatcagcgaccccggaaactcaagggaacttaaatatttttaacaccgacggattgtacactgacggattgtccactgacggattgtccactgacggattgtccgggagtctcatcggtcagcattgtgccaaacagttttattctcttggggctttttctcacacaatttgcctcggggcttttcccgttttgccttggcttgcattttccctccaaatagtcgaccacccctttggcagtcattcgctgtgctctgtccttggacgtcatattcttaaaaaaatgaataaaaatttcaaaaattttaaatggtttaacttaatttccctgtttaaaatgggcaaaatagccatagggattggaatttttaagaaaacattattattgggactccatttttaggcacaaaaaatcgcgaattaggcacctaaaaaggcagaaaaacaaatcgcaaaatatgcaaataaaattttttctttacactttttaggtagcaaaatacataaaaacattaaataggcgaaaaaaaggcaaataaatttgtttttaatcaaaaaatttggtaaagaaaaaaaagaggtgccattttttgnggtcggggtcagttcgccgcaggctgtttcgcagccaattttgaaattntataactnttttctttagtcagtaaagttagcaaatctggcatcatttaaaagctctatatgtgcttaacattttcatgtcaaatanaaaatctaagtataaaaaaagtatggcaaacggcgccgaaaagccatgaaaa

SEQ ID NO: 3886 - DNA, 905 bp, Heterodera glycines
tgtaatcagattcgctttcggcaccgttaaagccctagaatccctgtgtatatactctatccctactggaggggaaccgcccacttcggcgccggtcttttcggcgccgttgctaacaacttttttcctgatcaaccaaattaaaaatttttgttatcattcgatagctcttcagattctctattagcctgtaaaatttcaaaaaatttcgtcagtttacaaaaaagttatggccaaaaaacctcaaaaattgactttttcttggctttttcggcgccacgtggcataacttttttatttttgaatcattcatttctatttttacatgtaaatatagagcacacatagagctttcaaatgatgctagattggctaaagctaactgacaaataaaaaagttatagcatttcaaaattttcggcgccgaaatggtccgcgccgaagtgaccccgaccctactggaggggggcggctcgaaatttggaaattcaacttttataccgactgacggcaaccaattctccacctcaaggtcctaattggtgcatttatgcaaagcaacaaacaaatatattttcatcggaaagaagcatcaaaattaacgagaaaaatgagcatcggtccattcaataatttcccggatttttcccggttcgaatgtatttttagatttagctgatcaagatctttcgattgataccaaatttgtccgaatttgaccgtttttaaagggtcaggggcccccccttttcactcaatttttcgagttttaaaccggttcaaaacccggttttttggcatttccgcaactggagacctactttttcgtgcatagctcgtcgagacgaatcgattggtatatcatttgtgccgtttttttacggggcgttgactatactacaccc

SEQ ID NO: 3887 - DNA, 6921 bp, Heterodera glycines
  unsure (1)..(6921): unsure at all n locations
ttcattcattaagtgtatttttcatttgttatcaattagtaaagtgtgttcgttgtacctgcgctcattcacgtcgnccactttcatccatttgcattggtccgtggacacttcgatgaaaaatgaataacaccgatcatcgcaatcccaaagcaaaagcctggacacaaaatgagcgttttttgtgttttaatggatgggaattaagtgcctcatcgtttccacaagaaacggctggggaagttggacgaccaaagcgccgctgcccaattggtggcaagtgtacctgaaaaatagacaaacaagtggtgaataatgggtagtgtttaatttttaaagccacaaaaccatgtgtcaagaatttaaggatttataattttttttttatttttgttctgtttttaattttatttttgttctgtttttaatttttttttttcttcttaatttttttttaatttttttctagctttttttattttttaattttaaaaaattagtttttttttcttttttttccttttgttttttttttagtttttttttgtaaaaaagcaatattatttttcccaagccgacctctaatcctcctaaaatatacaaattactaacccatcgtcccagtcgtaatttttggtgtccccgttgagaagggcatttctgctacgcgacactccctcaatgacaatggcattgttggcaatagtcgcaatgttcacacgtggtactgacaatggaaaggaaggaatatatttcgaattaccttttataaaacttactctgcagtgtggttaggtagtcaatttcaaacgaatccgtgacgtaaagcgcctcaaaacgactcagttggaaagtgttgttcactgaacaatgtgtgccaacaatactaaaatgaataatggaaaccagaaaggaagttatggtcgaaatcaaaaaatgccaaaccaaaaacccaagacaaaccggatgaactttacgaccctttcatcgaaaagtaaattttgtcgtgatcgacaaacgtaatgactgtggtcaatgacgcggacccaatccatttggtcgacactgacctaacacaccaaatattaaaaaagtaaaagggaaaatgaacaaaaaaaacccaaaaatgacattcacttcaacaaaataggaataggttcgctggtcgcggtccatcagatgaagtttgatgttattgagaatgaacggccggcctaattcgatctaaaaacataaaatatatttatttcgaaaaagaaaaattgaaaatatcaccgttatcccggaattcgcttgatttatcaaatgttttgcgtaagagcgatcaattgggtcgacggaggaagcatcttcctcaccgactttgttcgacagtaaagccgtacgaagatcaccggaagtcactttggcaccgaaagagggcgtggccacattagtgccggggactaaaatgtgtgacaagtttagtctaagtacttcgagcctatacagacggtttatcggacgcgaaatttaacgccatgaaattcgctcgccatttgcctttggtattttgagtttggcacttcgtacaatattgtccgatccttggagttcaacaattctgcccaacggccagcagttcctcggagttttttcttcttcgataattactacctctccgatttttggttggtccgccaggcaacttcttggtcctttatgctcccattgtaatctgttccggagcattaacaggtactcttttttccatctggtccagaattcatccaatgtggctagagtaccttcccagcgcatctgcaattgcttctggagatttttaggttcattttcgaactccgtgtccgacgattgttcgttcctccggacatccaaactcaatatggcctttggcattatgaaatcgaccggtctcaatggctggacagcatttggtccttcatcaacgtaggtgatcggtctttgatttattgtcgcttcaacttctgcgacaaacgttctcaattggtcgtagggcaaaattcgacgcccaaggactcttttgaaggccgcctttactccagcgacttggcgttcgagaaatccattactccaaggtcttagtgatggattaaatcgccatttgattccttcgttggcaaggtgctcttcgagcggacatgtgggtgtcttcccagcttctaatgctgccgctactttagctgccagtacaaattgtgtgccgttgtcagtgatgattctttttggagttcctctcctactagtgaatcgacggaacacttgaaggaatgcctcagcgcttaagtcaagcactggttccaaataaatagccctcgtacttaggcaagtgaacaaagcaatccatgccttctgaagctcaccattaattttggtattcgttggtccaagataatcgatcccaatgctttcaaatggtgccgtccgcctcacgcggtcctcaggaagaggagacatcgtcggcaatttatatgccgggcattggatcctgcgacaacgaccgcatgctcgaatgaccttctttatgggcagtctcgctctgggtgtccaatattttcccataaattctgtcaaagtggattcaactccagaatgggcaagggactcatgtaccgactgtgcaattagtcgggttattggacaattctcaggaaggataatgggattaaccatatcttcagatgcattgctcattgcgagccgtgttgacagtcggacaagaccatctttcctcgatgtctttacaagttcttgtgattgctttttccacattggccaacatttttgtgccatttttacaagtaagatctcggcgtactggtaatcttcactgctcataggaacaccctctgaaatctcgaatattcgagtcttcctcatcttgtttattgcacggagaaaccaaaccacagtgcggcgtagtttagtccaactgctaaatcgacaagggtcaatccatggattgtcttcactcgttgttgctggcactgcaactacattgtccaattctgaactttcttgtccatcattcatggctcctgttggggtgacctcgaagtcgatcggccaacttttcattggttctcggagccatgttggtccattccaccaaagatgatgggatctcagctcttctggagtgcatcctcttgatgttcagcatcctcgccccaattagcattgccaagagttccattcttggaattgttacttcagctttccggggcttgagtctactctttgcatagagtaactgtacattggtttcttctcctttctgagaccttatgaaaagtgccgctgcataagcgtccttgctcgcgtccacaaatgcatggagttggaccatttcatcttgcagcacggatcgtctcggaaatttgaatggttcggtcttccattctctaatgacagcaaaccattctgctgtttcatcagctggtaagatttcgtcccatccaagggttctgtcccacaatcgttgtaggaacaattttgcttggagaaggcaaggtgcgaccattcccaatgggtcaaatatgcttgctaatgttttcaaaacaatgcgttttgaaatcttcccggcttcattcgtcggtgggaatccaatgctcaattcgtccttttgaatgtcccaagggatgccaagtactttagtccctggtttattaagccggtcctcttcgggaatttgctccattgctttcattgagttgcaaataaattccctcaggttcatttgtgcttcagcaaacaatgctttcccttctcgatacttctttaagacttctccagcgtctttgcatgaagtcattagattgtctacaaaggcattcccagcgaattccaacgccaagggggaagctttctccttcagatgcttctggacaactgcagccaaaataaatggcgaagaaattactccgaagggaatccgagcccaacggaagatctgtaaattgtctgtcgacaatttcttcttagggtctttcacccaaaggaatttcacaaattccctgtcttcattgtccaaagatatggcattgaaggccttttctaagtccgcccataatgcaattattgggagacggaatcttagaaggattcccacgagatcgggaatcatcacgggtcctctgaacatacactcgttcaaagatttctctccccgtgggtgtgctgaagcatcaaaaacaattcgaagtttatgagttagtactccatgatgtggcaggaagtgttcaggaaaaccctcccttctttcgccaagttcaaagaatccgagattgaactctctcgagattgactcgtggtatttgtccaataactcgggagtcttgcgcagtttttcaaggaggttgaccaatctcctatatgccatattgtaattcgatggcaaatcgggcgggaactctttccatggccatcccgaactataacgtccatcagcgagtctcttggctttcttttcgaagatttccatcgctgtgtcgtcatcattttcttttgggtcgtcttttattcctatcagttgtaggtcccaaaagttttttgcagtgtcgatgcctgtttctgcaaattcacaatcagcttttgctgacatgactgcgcaaatttgtctcgtttctccgatctcctgtgggatatcttttccacatacgataggtcccactgaagtgtaaatgcggaataagttccgatttatctgttcgcgccgctggaagaatcgccagaattcggccataccaatgagtaaatcgggttcctcatcggttatttccacgtttccggtcttccattcggctcgacggatagatttgactatccaatctgcccgataactggccatctttcaatttatataagcttaaggctcgcactacagcacttttgatcatggttacttgcgaacctgggtcaaagaagaccaaaatcctaattctctttgtaggatttcttctggagaaaattgtgacgtatttcgccattagaagcactctttttggatcagaaaccatcgtggctactgttccattttctgctgaaccaattgtcgtcatattgacttctgcatgggttctcttgaattgtgctttcggctttgtctgactggtgttccattcacggccggatttctttgtattcggacaaataactttgttatgcgctcctttgcatctcgcacaactcctatttgcccgacaatccggagctctgtgccctctgcgtaggcacagagaacacctattttgttctgcaagcattttcgttcgttgctgaacactggccacttttctgcaatcgttgacccaatgcggtccgtcgcagaagaaacatggaagttttggcttcccacgaggcgctgactccattcctcgtttatcttgtgtggctacaaaggctctggctctctcagctgattgccttcgttgctcgcgctggaacacctgtctgttttgtgtcggacctcgattcacatctcttcgtagtgatcgagagcaacgctggacctcctctcgaagtgatacgacttctgctagtccacgtctcagatctgacatctgccaatggaacccctcttctcgctccattttaatcaattcggtgagaatttgcttgggcagttttgccttgactgccatgcacatgagcgaattctcgggatgtcccaaagcatttaattggcgacatattcgttccaagttctcggagaacatctggagggagtccgggctatcttctacatttggaagattgaaaagttcggcttgcaaggcttcgacgataacttgcggattgccaaacaatcggcggagtgtttccaccatattttcgtaattttggccacctctgtagcctatcactgcacgagaggctttccctttaaggcatcccatcaaataattcattttgtcgattggctgcaggtgagcctgattgtggaccgcattctcgaaggattgccaaaatgtcggccactctaacggatcgccggagaatatcggcatccgtaattctggaagtctgatccttggtctcggcacagcaaagcactaatagggtgtttgactcacttcaaaaaataattccatacccaaaagttttttacaaccacatattgccaatctaatttcttgcagatttaaagctatccattgcctgccggttctcggcacagcaaagcactaatacggtgtttgactcacttcaaaaaataattcattacccaaaagttttttacaaccacatattgccaatctaatttcttgcagattgaaaaccatccattgcctgccggttctcggcacagcaaagcactaatagggtgtttgactcacttcaaaaaataattcattacccaaaagttttttacaaccacttattgccaatctaatttcttgcagatttaaagctatccattgcctgcaggttctcggcacagcaaagcactaatacggtgtttgactcacttcaaaaaataattcattacccaaaagttttttacaaccacttattgccaatctaatttcttgcagatttaaagccatccattgcctgccggttctcggcacagcaaagcactaatagggtgtttgactcacttcaaaaaataattccttacattctcggcacagcaaagcactaatagggtgtttgaagcacttcaaaaaataattccttacccaaaagttttttacaacaatttatttccaatctaatttcttgcagattgaaagccatcaattgcctgccggttctcggcacagcaaagcactaatagggtgtttgactcacttcaaaaaataattccatacccaaaagtttattacaacaatttattgccaatctaatttcttgcagattgaaagccatcaattgcctgccggttctggcacagca

SEQ ID NO: 3888 - DNA, 2010 bp, Heterodera glycines
ctgaaatgttggcaagggaaagagtgagattctgaaagctgttagttacaggaggaagacaggcaagagaatcacaaccaataatgagggcatagtcgggtctgatgaagcgagaatcatcaacaaaatttattaaaactttttcttttatggtaggtaccaatagacaagaaggcctcggcttgtgcaattatggggatttggtgacccgaggcgcttatagctcgaagattggtttttctaggagagcacccaattgtctcagcaagggagataggggcagctgtgagcgttgctcccgtgtctacaagagagcggagctcaacggaattgagggaggcagagattattgcgtcaagtttcggtttatgtgggttatattgtgtgaaaatataatctcggttggacgagatcatgggataattatggtcaccgatttgtatgttaaaaagaaggggatcaaataagattgatgagaatttggaaagaaagtcagaacccaatacaacatcaaagttattttccgagacccatgagtcttcttctgtgatgagtaattttaaggagtgcgtttgagacgctatttcaatgttagttgaaatttcgccgatagtttgcaatggaaggaaagacacaccaacacataggggtttggggaaggagtaaaatttggacttttgataacatgccattcggacatgagtaaatgagatgtcagattttaggtcaattttgcagttaattaaaacagagttgactttaagttggatgactgggaaaggagggctttgagttacttgctttttgaagctacgaaatggtgttccaggaggaaaaaatatttgtaatggatagatgaacagaacaattataattgaaatgaccatgagagtgaatataaatgtaatgctaatgaaagagatgggaaaatactgttcaaaattgttaacattttcgttggataatgaagcatgtacagaggggaatagcgatataagaagaagaagggtaggcataatggactttttataagaatttctgaatatggttggttgtgagagtttgggaacaaagggacattccgctatatgatgtttgtcctttttgcagtaatggcataatgaagagggagggttaatatcagcccaaaaattactggagggaggtggaacgttgaaatgttgagagttttcacaagtttgtgaaagtatgcacggagaaattgaggaattgatttgagaaggaatatgtggatgaaaatgaactttgttttgatagatgggaaggttctttgagggggaagattgacagtcagaaatgttttgtgattttgattggaaaagagtaggaggaccatagccaaaggttaggaatttattatgaaaatcgaagagaattggtgggaatctttcaagagtttcagtccctataatgatatcacaaatatcccaaatatccaaataatcgggagcgaaatgaacatgtgcactgcacagcatatttgccatgtgtaaggagaacgggactgagcccgtgacaggtattgggatcccaacggcagtagtgatagaaacttccgaggagttaagattttgacagatgaatttgtccttaagtttaatcggagcaatggaagaagaggcagcagagtcaattaatgcaatgagaggaattgtatctgcatgggcgggaatggttgtgacaaaggatttggaatttaatggaaacatagcattgagaagcctaggggaattatttgactcaaatttgggaaggagagaaaagcgggtaattgagggaggccattgggttgggtttccttcagatgtttcacctaattcaagaacaacatgatgatttgaaaaattgggtgattgcacagagcacgtattggaaggggaaggaggaggagggggaggcggagggcgtgattgatttgtgttatttgttgtaagaccaaagaaggtttgtaataaggaaacattgttaaaatatttttccaaaacaagt

SEQ ID NO: 3889 - DNA, 3146 bp, Heterodera glycines
gggaagaaattgaacggcaaaattttgatatgagagagagagagtttgattacagtcctcgatcaaagttttggtttggggaaaggaaagagcaagatcattttcttctgcaacccaaatgtttgacagaaaagttcctaaaaattttccgaggttaatgaattgacagagtttcttgggagagggaagccacataaggatggaattgtcgtcgaggcggcaattccctgctgtatatttacaatttgggtgtcctagagatgttcggatatgatcttcggaatgatgcacaaaaatctcagtttgaaaagcgaaacaatttgtggaattgtgtgctttccaggaccagccaaggaagggataccgtttttcatagctgattggattattggagaaaaggagctccccactttggattagaattccttcggaacatgacttttcctgaaccatttgcttacattcatctaataatactgggagattttcggacgggagttgcttaatgattaaatcattccatggattggtgtactcaatcagggatttctttaccttcctgcacacccatgccttggatttttgttcgaatgggttcggttggaaaaggcgaataggttgtttgataggggtgtcagaaggagtatgctttaattttggacatggtagccaaatgggaagagaccaaattgtgccctcaacgtgtgtctgacaaaccatagggaggacttttaaggatgattgactatgagaggatgagaccaaagaagcacttagagaaagagtaatgatacaaaggataaaattaaaacgagttagaaagggagctattgaaaaatttgagctgcgcgggtgtgattcccaatttgtgacaataggagtgggggaaacaggctttggttcggattttaaagcatccgtgagatttggttgcttatcagcagagccagagcacacgagctgttctttgatttgagatggtgaggcagtaacgggttgttggacttggtcagagaatgtaagagtgttaaatgaagggtggggaccattatcagacattgaaagattttggaatgagtctgggggaagggaatcataggtgttaagggaattaatttgtcgtcctcggccataaggctggttgggatttgggtagcgattccaattccgattgtcatgatggaagggttgctgatttctccatgcacccctttgatcatgatgaaaagactgttggttccgccatgtgcctctttgatgaggttgatttcctctaccactgttatagggagggggtcgggagattggaatactgttggggttgctatgggtgaacataggaggctgagacgtccaattttgcgaatttctgttttgatttttataggcgaggatccgacattcactgattacatgaccaggctttttacaataataacatgtgggggtctggttgggagtttgctgccagtttctattttgaaatcgagggggactagggggccggaattgattagtataattgtttgggtttgggttagcggattgtgatggaccgaaggaaacccgtttttgttgtgggggtgggggttgccaggttgtgaaatttccttggagtaaatttggaggggatcgggccgaagaagaggaggacatgacattaatccaatcggggtcaactcggggtttgcgagtggccaataaattttcaacttctaaggccttaattcgggtctcttcaaaggtttgggaggcactactaccaagtcggacatggaaggaaatttcatcccgaagtttttcgagaaaagcggacttaagcatatctttgcggaatttggggtctaattcttgataagcggcattaactagggggatgaggcgctcaacaaaggtttcaaccatttctccctctttttgtctacatgaggccaatgactgcttagctaattgggacttaaagggagtatcgaggactgttttgagggcatggatggcggcttggagggttgccttacggtcagctgggaggtcctcaaaaatgtcgcgcggggtcccttctaacatcattttaaggcgaccaattttgtcaccttcctccatgcgcctacccgtggcttcgatgtagtccatgaattttctggaccaagactcaaaagtctgggaagattccccagtgaaggaattgagcccacccgatgattgattctcaaatgttaatccattaattctgtcagaagattcatcagcccagacatgggaatcatcctgctgttcttcttcaactatgacttgattgagagggggaggggttgaactgtcagtgagtccacgatttcggatgtcagaattttgggcaagattaggagtgatggaatttgaagactgagcattcaaatctacattgagagggaattgacgggatggagtttgagatttgcttctgttctgcttgttctgcttggggataggaaaagggaagtgaaatgggttcgggtcagtaagggaatcaatccgggttgccatggttgccagcccagtattaagttcctcagaaagtttaaagattgcctcatttgttgcattaatccgacgattaagatagcgaaggtttctgtttgaggcatcctcaaagccagaaacttgacttaatacattttcgaggtcactaacttttgcttggacggatgggtttctacctgagaagaggcgacggtcaatcgcgacgatatcttcgtaaggcaaattctctaagggattgaccatgataggggaagtgggatgtatcagagagggtactggacttgcgcaccgtaaagggaaagaaataaagtaaaagttaattgtgtataatcactggatatcgcacaataaccaggatttaatttgttttgctgtatttaattggggataaatctggggcggatatgaatggttcaatcagcaaaatatataaatgagacttgagtattagaaacggaaaaggcacaaatatttaattgtcttaaatcactggatactgtacttcgtaaccaggggtttacttggtttactgatttaattggggtgggacctgagctgggaggtaattggttcaatgcgcaaaaggtgttaggtgttaaaatgtgcgtaaatgtgatcaaaaa

SEQ ID NO: 3890 - DNA, 2124 bp, Heterodera glycines
atgtatgaaaatataatgtttgaatttgtacgaattaacgaattgtttttttttaaattagtacaaaaatataaaaaggatttacgaattgtttatgaattagtacgaaaaattgacgaattgtttcttaattattacaaaatataaaacgaattaacaaattgtgattgaatttgtttgaaaatgcgcagcgaatttacgaattgtgtttgaacttgtacaaaaatgagaatgaattgacgaatttatatttgaaaatttgtgcgaaaataggaacgaattggcgaattgttttgaattatatgcgaaaatatgaaacgaattggcgaaaggtgtttgaatatatacgaaaatataaaccgaattgacgaaatatatttgactctgaatttgtgctttgtgttaaaatgtaaaacaaaatgacgaattgttttgaatagatacgaaagtaaaaaccaaattaacggatgtacgaaagtgtaaaacgaattgacgaattgttttgaatttgaattatacgaaaaatagaaacaaattatttttgaatatgcacaaaactgtaaagcgaattaacaaattgttttgaatttatacaattaaatatgtacgaaatatgaagcgaattgacgaattgttttgaattgactgtatgaaaataataaccaaattgagaattatttttgaatatgtattaacatgtaaaccgaattggcgaatgtactacaatttgaaacaaattggcgaattgtcttgaatttgtacgaataacgattttttgaattagtacgagaatatgaaagaagagagagagaaagaaaaaaataattagttgttttggaattagtacaaaaatataaacgaattgactaattgtttctgaattattacaattataaacgaattaatgaattgttttgaatttgtgcgaacatgtaaaacaaattggcgaagtgacgaattgtttctgaattattataaatataaacgagttgacgaattgtttcggaatattacaaatataaatagattatgtatgattgtgcaaaaatgtgaaccgaatttacgaattgtgtttatatttataccaaaataagaatgaattgacgaatttatatctgaaaattgtgcgaaaataaagaaaaacaaccggattaatataattatttagcatttgtacgaaaaatgaacgaaacgacaaattattttgaatatatacaaaataggaacgaattggcgaattgtcttgaattcgtacaaaaaaataaaatgaaattgccgaaatatgtttgaaactgaatttgtgctaaagaacgaattgacgaagtgtgtttgaattagtgcgataaccgaattgaaaatagtgttcgcatttgtatgaagatgtgatcgacttaacgcattgtttttttttaatatgttcgaaaatgtgaatgaactgacgaattgtttttaaatatgacgaaaatttgaaatgaaattgacgaaatgtttttgaatttttttttttttaatttgtgtgaaaatatgaccgaattgttttgtaattaatgctaaaatattggacgaattggagaaaagacgagttgttttctgaattagtaagtaagtgtgaaccggattaatgattgttttgaatttgtgcacaaaatgtaaaacgaattgacaaattgtttgggtttgtgcgaaggtgttgaagtccgaaaatgtagtgcgaattggcgaatagatttgaattagtacaaaaatgtggagaaagaaaataacaaattgtttttgaattgtattgcggaaaaatgtgctaaagcatgattaaaatttgaatttgctgtaattgaacaaaacgacagtaatttgaaaaatgaagaaaaaaaaaaattaggcttaaaatttggaatttatgtgaattacaattgaattaagcattgtcttaaattgttactgatttgggtttaatgacaagctagacaaagtatattacaatcaaaattgtggtcaaactttgaatttaatgtgattgaaaacaaatggcagtgatttgagagaaagagaaaaaaaaaaattggttgaaaatatgttaaaagaattatgatcaaaatttgtttttgttttcaaaaacatgatttg

SEQ ID NO: 3891 - DNA, 876 bp, Heterodera glycines
tccggtcgagaaaaacattgtccaattttccaattgcgatcttcggttttgttggacaaaaaataaataaatgaatgaattggccttttctgcggctaatgagacggaatttgagctaattaagagaatggtggatgaatcaataggcaatggcttatttgttaacaaaaaaattttatttaaaaaggaaaaaaagattttgatggaaatgggaaaaaacgggaaaaataattttgtgccaaggacgcatattcctgttacaaatttaggcttcaaaatgaaattaaccgattctcgctattaaaaacagaattgtggaaatttaaaaaataaaaataaaataaacaaaataatacagatatttttttcggattcaattactattcattctcgagcaaccccatgattttcaggccaaatttacgggcttcaaaaaaagtaggaatggaattcagtaaattttttttattctctctactatatttacgcgacaaattttcacaaaaataatttaaaaaattctttcgccatttaacgacgcgccgcaaaaaaaaagacataaaaatgtgttaagtggtgtataatctgccggccagagcagtttaatttagtttagttgtgttttatgttcttcgtcccttttttttttgtttatgcgttcgtttctctcccctctttttttgtcatcttttcattctttccccccgcccccatttttaaacagaaaaacggactaaaaacaatttttttagtgcaatttgtgcccgcgggggacgggggacagaaatatgtgggacagacaaaaaggcgaggcgcagcatttattacattcattcatgcatcttctctggtttgttggggggggggggggggggg

SEQ ID NO: 3892 - DNA, 3183 bp, Heterodera glycines
tttgccgcgacgacggcatgtcggcacattcaaaagccgaagaagcagcagcagcaacaacaacggcatgaactccagaagcagtattagacggaggcggacgaggagcaaacaacaacaatttcgacacagcggcgctcggctgatcacatcggctgctactgctgatcagaattacaatgctttttcgcgaaatatttatgatagatgaaaacttttaaatttattattgtttgtgcatttaatttagtttttcttgccgttattttttgtttgtttgtttttcatataaaattagttttaagtatttgaattttattttcatcaggaccgattctccaggctatgaagaataacgaaaaaaaacaagaaattcccaagaatgttgattgcataaaacggataacaaaattccgacctttactttatttaagtgcatgcatagacacagcggcccaattttgggctctcagtgcaaataggtttattatttatttagtaatcagaacgccaaaactttgcaaaacttaaaattttttggggattttcccttgtaaaaataaaagagccgatctcgagttaaaaactagacagctaaaaaataaatgagttggagaggcgcgtcgacgaatttaaatcttttttgtctgcccaggagcggatgcgcgggtttctctcaaagaagcccaaagcacatcttttgttgagccattttgttcccttcgctcgcgagcacaaatttcttggccttttagatgaacagggttgtggtgaaaaatgttttctatcccattaatctggattttaaggtgatgaggcgctccattccgtttggcgccgacttgagcaactgtggaagtgtatgccggacgcagaccaaattttgcagcaattggagcaccattttgtcaacaattggctcctcgacacgggcaaaattgatgaaatgaagcaggtctgtatgtttggagggggtgattgcgttaaacttgttttattttaaaatttatatataataattcagagacaaagtgatcagagggaagagcatgatgagttcgatcaaacggaagaagaaactgacgaaatttcgcttatcaatgtcattgattgatggtgatttagcaagaagaaattggtggtcgacgggagacggacgaagaaaacaatggagaaaacaattcgattttgaatagacacagttcgataaaggtttttattcgtttttacaggaaataaaatttttttaaatttttgagcttcattaaaaactgtgttatcatttcacttgtatttatttgctttaaaaacctcaaaatacagttacagcatgcatgggattcgaacctgagaccccccttttggtgactaactcacagaccactaagacgaaaaatccagcatacttgtacttggagcccaaaattgggccgctatatatattgtttttgttcaacacatttcgggcccggaattttgaaaagtcgggaccggaattcgggattggcatcaggccgataaaggcaggcttgccagcaggatttaatctctaatattatattttcaaagcctgaaagtagtgataatgtccactgggaaaatttctaaaattggttttagcttaaattggatttgtccaaacaaaaaaaattggaagttaatagattgtgtccaaaaaataataatcaaaaatttgcgattatgagccaattcagtgtccattgcggagaatgtaattttacacgatttaaaaaaaattttgaaaatttgttgcaacgccaaaccgggattcttttgtcgtgagctgttcttatctcgcaccgcacatatcactgccacaattacccactactctccagtgatggattatccctttttcttgtagaaaaattttggcttggcggtcacataatgggaaagtacccaactattatagttaggagatttgtcatccaaagaaaatgttgggaagactggaaattgtaaaatgttgaaatttttgcttctaaaattcacataaaatttaaaaaaaaagaaagctcataagctgtaaacttcgttgttttccatgaaaatattacgaaaataacaaaattccgggtcaatatgtcgaaatcggggtcctggtctcaattgtccgggtgccggacttttttcaaaaaatgggatcgagaccctgggaaaaccccggcggtatattccgatcactcacggactctacacacatttcacatcataatcaaacaaaatagcaacgggaatcaacacaaagcattgtgggattgggatgggactaaattaaaaggccagaaattttgaaaaccatgggatttgaaataggaacgtgcccgaggcgaaagaaaaatgaagaaaactgtaaagagaggagaaaatgtgtgttagaaagaaagaggaataacagtgaagggaagagtgtaagagaacgagagaatatggacaaatgagagaatgacaaaattgtaaaaggagaagagaagcagacagaaaagaaagtcacataggatttcaaagtgatcggacagacgtacagacaaacgtccgtctggcactaatgctgatcagcgatcagtgagcactcgttcactgcgccaatcaatgcctggcctcaccgcttgctgcagctgatcagcagcggcacattagtaataggcaaatgcgcagttggtcgcaaaattgacaaatcggaatttcagtaacaaaaaaaatgttcctagattggatgaccataaaatttttctaatcttttttcaaaattttatggtgaattaataggttttcaggcggaaatgacgggggtgggagaacgaagggggggggacaactttctctgtaaaatttttgtataaattttcaaaaatcgcaaaacaaaagtgatcacaagacacggaaaaatcagcgacgtaccccaatcctcataattatgtgatatcatgatcaatcagtgctggtttaattttcctgctgctgaataataaataatttatttttatttttcattttatttatttattttttaatctcgcaaaaatccaaaaaagtgagcaaaatgcttaaacagtaatttcatgagacatgcatatactgtatgtcaaaaaagaatttaacatcacttttttatcacttaaaatacaaacagtaaaagttgggtgctactgtaagaaa

SEQ ID NO: 3893 - DNA, 4459 bp, Heterodera glycines
cttaaaatacaaacagtaaaagttggggtgctactgtaagaaattaacgaatttggctaatagggcttcgaagggaaggaccaacctgagtcccaccgtgccggttccgcatttttcaggaaaaaaatgggggagtcacattccggtaaaaagttttattcccggaaacccactctcgaagcccatgtttcgatcccgttcatttggactaccattgtacgtatcatttttgcaatcaaaaatattggatttatcattgaagtttatttttggcaaaacaaaaaaatctgttggactctgatttgtacataaatacataaataagcctaaaaagaatgcttttcgaatttgagtatgattcatttttagtgaaaatgccaaaatcctgaaattttatttgattttttgaaaaattgtgcgcataaaatacctaacccaaaattcgactccggtaggtccaagattcggaatgaacaacgacgccaaaattattaatggaaattcagaaaaaggaataaaatttttcgttgggaaatattttcatacatataactcattaagtcttttcgctcaatatggttgtagcctagtggctaagcctgcgctcattttttcctggacctggattttcctggacagtgaacaggattctgacgggtattttcttttccttggggcgggggctcttcggaaatgattcaccataatttactgggttaacatacgtttttttatacaaaaaacataaaaaaaatttggtaaagtcatcatgccgttttccccttagactcgggaatgactgaaactcatgaaaaacacactggctcttaaaaaatgaaaatctccccaaaaattattttgattaaatagaaaaagataaaatttgtttatttaaaatacaaattttgattttgtattttttcttcaaaaatttcattgcttatcctatttagctatttccaggttttttcaatggaaatttcatgaatttcaagaaaaccgtttggatttcgcacagttcatgaatttattaacccattttcgaaatttaaatccatttaattgtccctctgtcatttaatttattaatgtttgttccatccaaaattgaaaagatattttggttagaagtggttcatagagttcggcctggacctggatccaggcctggatttttcctggatcaggtccaggtcattttttgacaacctggatttttcctggacctggattttcctcgatttttgtccaggaaatccaggtccaggtcaaatgtgaaaaaaatccaggtccaggcaaaacaggaaaaaacctggattttcctggacaaaattttagaatttattttttcaagtgaccgatgttttttcaagttttcaaaaacagattaaataaatttaaaacacattcttattattaattagatatttttagatgttcccaagcaattaattgaatttttcaaacatttttttgagttttaaaatgaattttaaaaaatccaggtccagtcctggatccaggtcttgaggagcctggatttttcctggacctggatttttgtccaggaaatccaggtccaggtcgaacatggaatccaggtccaggtccatacatttttcaaaatgtcgatctctagtggttcaaactgccaatttggcacacattgttaggggaaacagatcacaatggtcatggaaatccggggcccggctttttctccccaaaattatgagctaaaattctcactggattaataattcttttaaaaaaaggcactcaaaaaattgataattagttattaattgatctgggatgcaacaaaaaaagcgcccataaaactgcacgaattatgggaattgggagggcgcaaatgtgggaccgaaaaacaccattctatcgataaatggattttaattttattttcaaaatttgctttttttcaagaaaacagctcccaaccgacgaacggggcaaactgcgatgtccaattgattgtgagtgtgaggtgggcaggggaggaggccagaacgggcaggcacatgtggtaaatgcagtttttggcatggcaaccctggccgccgtgttgcaaaattagtttttttcacttcatcccacatcccttctcttccactctttccccatccccacgtgccgcaccctttgcttgattccctctgatcgcgtttctggcactgaacacgcccattgtaaacggaataaggggagaaaattagtcagtttttctatatcaaaatttttttacattttcacttttgtatatccaccggttaagaaattgttttttttttgtttgcgcgaattgaacaaaatattacaaccgaattgggtaaaaatcgaaatggacaaaaaagaatgagcaaaaattgaaatgggccaaatggaaatgagccaaaaggaaatggtccaaaaagaaattgaaatgggcaaaaggaaatggccaaaaggaaatgggcaaaaaagaattggcaaaaataaaaaccctttttcaacgaataagccccggggtgatcatttcatacgttgcttcttcttcgtcctcctccatcccgcttgcgtttgagttgctcatttggtcccactccatcgcgttcgcagcattcgccctcgcttccgccgcaaactgcttgctcgcttcagggtgtcccatcaatctaaaagctccattttttacacttttaatttttttatttttaaaattttatttatttatttgtgaacagttccccgtataccagggacggtccgaggattttggcttggggggggggggagtaccaccgctctgggcgacaaactttttttttttttgatttttacaccacttttttgcggcgcttttttggggaacaaggaggccggcggtgtggcgccacttgggaaattttttgactttctattgtagccaaatttttcaaaaatttccccttcgtcgacaaaatctctcactttttaccgcatgcgatttaataaaaatttgtgatggattattaagtttttttctccgtaaaatttccttgtttctagattttttgaaatttctaggtttgaatttcatcttcttttttatgagaaacgacccaggggtgggggaaatggtgcacccgggtgcgtcgcgcaccccttgttgcatgtctgtttggcacacaaaaaaagtagttacccttttaagcttcttcttgcggcccctcgtgcgtcttacgagtggcagcgctctccactggtcactcgtttcggcaatctggtaaaattctattagttttgtgaaccagaatgagtccgccttaggcgacgcctgcagaaaccacccccctccccctaagctttgcataattgagcctgctaatccctgcttgtcggagatacgatgcacctaccccttcttaaaatttaagttttttccgacagacggggtctgactggcatgataagttaaaattaggggcttgactcatttttttccggtggtctaggcccgactcgttgcttttttttcactaaacgagtcgggattgtgtctttttttccggtggtctaggcccgactctttgctttttttttcactaaacgagttgggattgtgtcttttttcgctgggctggcccgactctttgctttttttcactaaacgagtcgggattgtgtctttttttcgctgggcgggcccgattcgttcatttccaaaaaaccttggtgccagctccggccattccaagctgtcaaagccatctccgacgcaacgcgtgaagtagacctcttccgccgcacggccacctagcgacaattgaagcttcgccttcaattgcgcccgggtgtatttgtgctgggccggcggttggaaatggaccgcgcctgcactgccatctctcgggtcagcggctgccgtgatctgaacccaacaaattttgggattttttacccttttttcacgcttaacattttttttttgatctccatttatacaaaataagacacttagagctatcgaatgatttgatagggtaactctggagggtgaatgtgtttttttgtgttgttgaaaaaattagtgaaatgggccaagtccaatgggccctgttacaatttttctttcccggttgtttgctttttatttaaaaaaaataaccttgcgaaactcgtcaacacaatccacgtcgtcccagaggaacttcagatggcccacctcgtgtaggcaaattcggcccggcgtcaattcatccaactgttcgccctcgtcaatgctatgtaaaaattccgcctcttcggcgcgtctttttctttgtgccagttcccgattcgttggcatttccattattaacaaaagaaaatatgaaaataacggagctaaactgaagtgtttaattggctacaacaacctaggggaacggatgcaatacgtagaaacgggtgaattgacaattaaaagaataggcatgaa

SEQ ID NO: 3894 - DNA, 1209 bp, Heterodera glycines
ggatttttaccccttttttcacgcttaacattttttttttgatctccatttatacaaaataagacacttagagctatcgaatgatttgatagggtacttctggagggtgaatgtgtttttttgtgttgttgaaaaaattagtgaaatgggccaagaccaatgagccctgttacaattttctttcccggttgtttgctttttatttaaaaaaaaataataaccttgcgaaactcgtcaacacaatccacttcgtcccagaggaacttcagatggcccacctcgtggatacaggtgcggcccggcgtcaattcatccaactgttcgccctcgtcaatggtatggaaaaattccgcctcttcggcgcgtcttttcctttgtcccagttcccgattcgttggcatttccattattcacaaaagaaaatatgatgaaaataacggagctaaactgaagtgtttaattggctacaacaacctaggggaacggatgcagatacgtagaaacgggtacaagaattgacaattaaaagaataggcatgaattcacttaagaaaatgcttaagacgcaagagttgaaaaagagttagctgtcatcagattcattttcgaatgttgtatttagctcactaagagctttcgattgattgataccattaacgtttcaaaaacaaaaaatccacttctctcgcgctcaaatgtcagcgctcaatcggcccccttcccattaaaaaaaagaattgataacgccaatgtgccaaatttaattgtcaatttcagaaaacgcagccaagaattcgtccgctgctgttccttggtgcgcgttcggttgaactgagcatttttggaggtatcgcattaattgtataaaaaataaaatttttggactgcttttcgttcacttacaaaaaaataaaacaccgtattccccacaagtatttactgaaaatttgattcaattttgttgccccattttgttcaaaagcgatcgcattatagggtcaaattttatttatccctcctcaatgacaagttggacttcatcacagcattagaattgtgacccccatttgatatagacaaatgtggtgaccaatttcattgctggcggcatccacggctcatgcaccgtcatcaccgaccatccgttcgccacggtcaaagtgcgacagcagacaataccaaagccggcgaccggacagacgctactgt

SEQ ID NO: 3895 - DNA, 9542 bp, Heterodera glycines
  unsure (1)..(9542): unsure at all n locations
ctgctttccatgcattaattttatcaatattcaaattgtcatcccattttctttcttcttcccatagactttgaaaaataatttttgcaggtaaaaggcatggggctagccatccacatggatcaaaaatagaatttaattccttcagtactaatcttctgcttaatttttcattttcatgtattttaggaaaatttataatatacgtatctcttttaatgcaccaatttatacccagtacttttgggttttcttttaataaacgatctttttcaggtatttgattattcacttcttctgaattggaaataaattctcttatattcatttgtgcctttttgaaaagtatttttaaatttttataatttctgattgcttcagctgaattattacatccaacaaaaatattgtctacaaaagtattttgtttaacttcattagctaattcggatttttcattttctaaatggtgtcttactgttgcacctaataaaaatggagatgatattacaccgaaaggcactcttttgaaccgaaatgcgcaaagattagcttttgttattggtttattaacatctttcaaccacaaatattttacggtatctctgtcattttcttgtaattctaatgtccaaaaagctctttggatatctccccaaagtgcaattttagaaagtcttgatctcattaacagtcctggtaactcaggcatataaatagggcctctaaataataaatcattgaggcattttttgccccgtatttttgacgaagcatcatagactactcttggcttctttccggctaccaatacacaatggtgcggcaaaaaatgttcatcatatcctttaatttcgctttcttcaacaatcccttcttttaattgttctttaaaaatttcgtcgtattgtttgaggtgttcttcggatttctttaatttttcaattatgcttatcatcctacgataagctaaggtaaaatttgtaggtaattcctcttttggacctttccatggccaacttactacgtatcgcccgtcttttctgtaaattgtgtctttaaacatttttaatgctacttcatcatctttttccattgggttatcttttataccaattgtttctaaatcccaaattttttcggattcattttcaatgcattctaatcccattgaagtgagagcacataatttgtcatttccattaatttcaccacatattattgggccgaaaactgtatgtactttaaataaatcttctttaaatggttcaacttttttaaagaatctccaaaattctctcattccaattaaaatgtctggcttttcttcaattaattcaattttgccagaaattatattcgctcttttaatctttgttgttatcagatcgactcggttgacaattatttcttccatacctccttctgttgtttcgagttttattaaatattttggagaattcaaatgtgttggtttactttttcgaactgacaataattctaattctccttcgcttatctttggtggtttcaatttatcgattaattcgtctgtagccatagctatttgacttccattgtcaaaaaagactagaactgattttttcttacggtctaatccatcataactatttattcttttagacatcagtaaaacttctttttcttccaatgtattttttattgcagtagctgctaaatttgaccttggattttgcttctgattagttctattaaagggcaatcggatttctgttcggtttgcacctgttccttgaaattctctcatgcatattaatttattgtggtctccattgcagttaaaacacatttttcctgtgcaatttattttttcatgtccttttttgagacatcgatgacacctgctttgttcgtttattattttcaatcggttttcttgaccaattatttgtctacattttgatggccaatgcgctccgccacataaaaaacattttggattaattataggtggacgtgagttttgtttattatttgaatcttgcgtaaaaaagactctttgtgggtttctttcatcgtttcggttatttctcggctggttattttgccatttattattttgattaccaaactgtctaaattgcttttgattattattccaattttctctttgtgttcctgctgttttattcatccttgtgcatcttgcagcttcttctctcatgcttattatttcctctagaccttttatcaagtcttcaacattccattctcttccgctgtctttttcagcttttagtgcttctaaaattatatttctcggaaatttgttttttattgtcatcatcacataatctttatctccagcgaatcccaaattatttaattgacgcacaactctttcaacatcttctaaacaaattcttagtgaaatagcagcttcattggcctgcggtaaattcaataattcattctgtagtgcttcttttatgactttttcattaccgtaaagtcgctttagcgcatttattactaaattataattttctgctgttggttgataccctctcattgctcgggctgctttgccttttaggcttaacaataaataagtacatttttgtgcttcgggaatcggtttatcgcccatattggcttgaaatgcttgccaaaaaactggccaagacattgtgtctccataaaaatttggccatggaagtttcggataatatactggaggagtctcaactctttctctatttccaattctttgctcattttcattttgatttattttttgttggttgccttgcgcacctaattcaactgataatgtgtccgaaccatcatctgcttcatttactaaaattatttctatttcatcaattgcttctcaaatgttctattataattcctgttttcatttattggtcaaatttttaatgcgagttaatatttataaaatttttgccccacaaataaataaggttcagccccgacccctttgatgagaaaattctcggggaacgtggaataccgggagcagcaggtgcagagcgcaaaattttgtaatcgttccgaacagctcattcagtccacctttaatacaaaaacatgttctatgcctcggataaaatgttagcaattttatgttttgaagaaaaaatattttttattttaattttgattatttttattgactctcttttcagatagtcaataagaattatggtgattttacaatggtttaaatacggcaattttacataggcgggctgacagaaaattttaaattttcgtcgctaaggatgaaattagcgacactccggcggccgacaattcactttctgttccctttgaagttgcccttgtagtgattgttcatctcggcaagtccggcggcaattgtgaccaggagaatggacacggcaacattgtagtcgcgaagatgttcggccaaagcctcgacggcatctgctgcgacggttgtcagctcatgggttcgctgccattgtgatgcgccagtttttccaactttcctccaactttcgcctgattctgccgttgattgggaaaaaggaaatgccctttttttcccattttttgtccgccatttccttttttatttgttgcttaattcattggcccttgctgaaaagccgatcgcagccaattttcggccattgcgcttatttgggtttgtatgagtgtgccgatttcggcttgaatttgaggcgcattgctggttgaaggcgggcaattgaggatgctcatgtgtatctgtgatttttcgtccttttcttcaatggcaccatcatcgcttaattcgtcgatgatgctctcatccaattttttggtgttgtccatgcctttgacatggccaaaaaggatgaaaattgccaaaattgtccatttaataattcccttaagggacatttttctaacttggggttgtgacccttttaccttcaaattcaaaagcccgtcgcctcttttgacgatgtccttaccatggacatttcgctcttccttaaaaatttggcacatagtttcaaattcaatttcatttgtttctccaataatttcaaattggattgtttatgaattttctacagatttttttactgaattttcagaaatatttattttttcctcttcggaattttggtccaaattttctggattttttggtggtttgttggccctttcgatgcctttccaaaattcattaaatatgtcaaattggtcgatgatgcccccaatttctaagctcattaacgggtaaaatttcccatcaactactattcctggtccagcttgggaccacggtaatttttcaatttttaaaatttggctattcaatactttaattgattttgttcctccaaaaataacatcgtctggtttgtccattgacaaaacccaatttttattatttatatgcggtttccgctttccattcttggtgctgtatattcgcgcacctcgttcctccaggatttttacctcattttcgagttgctggaattttttccaatcgtctttaattgtcttggccacttgttcggattttattccgaatatttcggacgctaattttagcaaggaaattttgttcattattgtgaatattttatttgggttaaaatggattggagaaaaataattaaggtaaaaaataggctttttcttattccttttatatccatttaatttatcttcaatttttggttttttgtctttgtttaaatttgacaatgctttaaaaatgttgacaaatgaatcactatatttaatataaattttatggcaatctttgcctttaaattttaatgtactagcatttctattaccaattgctttttgttctttttgtaaatttgttaaatcactcttattcttaatgttcacctttttatttaatttaatcatttctgattcattttcagtccataaaatttttctctttatgaaaaatgctgattcattttcactccacaaaattttgttctttatttcattcataatgtttaattttgaattgtcacattcatgtgaccctccgaacgcaaatgtttttgaatttgcatgattaaataataaaataaaaataatattgttaattaaatttctgctaataatacggtatgcattgtaaaatggtgaaaactttataaatataaaaattattattaataaaataaacagtgctaatgttgaaaaaattaaaattattaataaattgttccaattaagtgcgaatttgagcaaatatttccaatcaattattttaatgttttcaaaattccaatcggattcgtcttcattaattttttctgtgtttatttttcgaaatttcttttcatttactggtacgtaacgaagtgtgcctttaagtttaaagtttgtttggccccctgggcattcgacaatgcaattcatgtttatgtcggccatttcaaagggtaaaatatccttttgttcatgtccattttctgaacattttgctaaaaatattggcccattttggcattttatttctgcttctgcttgaccaaattctgtttggcacacataatttagggttccacccgtgccgcaattgtaacagccgctaaaattagttggttttatgttgcattttgttccatctgtgactattacaatttttataccattaaatcttattgctaacttaactggagaatattcagtctcgcttaatatttttttaccttcttttcgaatatttaattttgcggttgtgaatggtaattttgaaaattggtgaaattggaggtgttaatccttccggtgtaaatgaaaatttactccatttaactgtaagaccaggaaacatggtcaaatctttagattttgtttcgtttccgattgttaatgttaaactcatttttaattcataatcccatccggtacatctaattaattcccaaattgtgtttgatgttggttctgcgtaagttctataaaagaaacattccgatgatgggagtgcgcatttatgaccccaaattgcgtctccttttttacagaaattgtttcctggaaaattttcataatcttccatttctggaattttttcatccattttaatgtttttacatttactttttgtacatgagcccattgttggacagcgtctttttgaaataacatttattttatatgatcgtaaccattttaaagtttgttggttacagtgtaatcgtaaaaattgtaaaattaattctaatgaacccattatttttcctttatcatcttttaatgctaatgaaactttttgtccagcgagtaatattgttaattcggttgttccactgactctacatacagaaccatttaattgtctttcacagtcttcggaagttgactgaattgatattacttcggcaccactgtgcactaaatcaggcattgtcaaacataaaaatagtaatattacaatgcttccaagtctatatagtcttctgttttttctgttttttcttttttgaattttttttctcttttttcaaattcatttaataaacttttctgtatctcatcgttaaattttttgtctaattttgggttcaagacccattttaacgccaaatatggcccataaaaacaaattttaataatccaccatatttttatgataaactttatgataaaacttgctatgcaaataataaaagaaataatacaagttaggccgattcctattagtatgagcgtttcggtcaacatacattcaggatttgccaatttttctaggcaaaataaacatttaattaatttgcatatttctattggtgggcaaataattttatttctataagattttcctttctttgtccagtaatttacggtacaatagtgttctgtaatcaatatttctttgcttaattcaaatagataattatttctaaaagtcggtgatcggcaatgacccatacaacaaatttcaaatttatttatttttgtgggtgtatttaattctattccttttgatccgcatttaatttcacaatctttgcattttaatttgactatgcttttcgttttgttattttcttttgcgtttgtaaatccaaataaatttgaactcattaataatattgtcataagtaatcctatgcctcctcttaataaataatttcttgtttttgatcttgttgtcatttgttgtgtatttttcttttgaacttcgcaaatttccttttcttttatattttcttcttttttattttcatcataactttttggttctaaggaattattcacttcaagggagtatattttgtttattggtctttctattattcttccagtcatttctttgccttttgttgtcattttaatttgtacacttcgaatagcacctttttctccatttaatttaattatttttcccattttccaggtatttctgggatgaaattcgtcctcaattaatacaatttcatctatttttggttctcgtttttcctgtgagtttggtcctttatggaaccattgtgttctgtctcttagaactaataaatattccttatgccatctttcccaaaaccactgcaaaactttgtttgttttttgccattgtctttttaaatgatctgctaatttttcgggttctggattataatcatcatcatcatcatcattgttttcctcctctttttctgtatttggcattgttaatcccaaattcaatccgggatttataaaatcaattggacgaagggctctttctccttctggttcaattgaaacatgagtaattggtctattattcattgtccattcaacctcagttgtgaatgtacgtaattcatccaactgtaagaccattttaccaagggatgctttaaaagcatctttgcaaatttttaccaatctttcggctaaagaatttgcccacggtgctaaagctggtataaatcgccatattattttatttttaaccaaataattttctaattcgtctcttgtttttccacctcttgcttcatatgctccggctacctttgcggccagtcgaaatgtctgtgcgttatcagaaataattcgttttggtgttcctcttctgcttgcaaatcgtcttaagacttgtaaaaatgaataagttgataaatcaagtactggttcgagataaacggctctcgtaattagacacgtaattaatacaatccaaaattttactgttttcccatcattttttactaaagatgggcctaaataatcaagtgctattgattcgaatggatttgaaatttttactctttcttctgggtgttgtggcattattggtaatgcaaatgatggaccattcaattttttgcatgaactgcacatttttataatctttttaacagttgctctaacatttggtgcccaaaattctgataaaaattcatttaaagtactgtcaacttttccatgttttgcttttttatgagctctccaaattaataattctataattggtgctctttttgggaatacaataggaaatttaaaagagaattccatttcacatttcttaattcttgtgtccattctaattaatccatttctatcaatgaatgtttttatagtctgttgtttttcattattttcattccacccattttgtccttgttttaaaatttctttttctgccaattcaaaatcatttgggttaataaattcgttattcgaaatttttcttanacaaaatgtttcggctgttttcccagccttttttagccaaattgcagcgaattttaagacttgcgcaaatattctaacaattttgtcccaatttttatatctttagaaaggtattatttcttctttgttttcaattatattagccatcgcaatttcactggtgatttcgtcatttttggggccttcctcaattttaaaggaaatttcatttggccataaacttatttcttcttttaaccattttgggccagtccaccacaaagaatgtaatttcaattcaattggtgtgcatcctctgcttccgacgtctgtcggatttttttctgttggtacatatctgaattctatttcttggtggctccgtatctcgtgtaatctgttttctacgaatcttggttgatcttcctttgattttacccaatataatacagcttttgaatcacaccataaatattttttatcgatttttatacttaattccttttctacgtattttatagctctaacaccaattagaacgcctaacaattccattcttggtattgttatgttgagttttcgtggccttaatctgcttcttgcatataataaattaatttttaagttgtctgcgtttgcttttaaataaacacatgcggatgcatcctttgaggcatcctttttcttttacatttgcaattaccgtccgaagataagggtaataattattatttgcggctgtcacgaacacaaatttgggatggccagggtatttgacataaaaaatgattaaaattaatgtaaaataaatttaaaaacagacttcattttctctttaattgcgtatttgtcggaaagtttgt

SEQ ID NO: 3896 - DNA, 4914 bp, Heterodera glycines
attcaaatgcacgaaatggtcgttcgttggcagtcgtgcgattctccattcaaaatctattggccgttgtccatcgctctttcattttgatcgtcttttgtgaccacgagtcgctgcagtgtgaattttggtgaaaaataaattttcgatttttgttcgaatttgggtccggggttcgaaacggatgccggattcgtgatcagtggccccaaaaacccaaggagagatgttttaagcgattttaaaatttatttattttttttgaaaaatagggggtacaaaccaaagtattcctacattttttcaaaaaatgcacccccaagaattggaaaattttcttaaaaattcttcccacaatttttttttagttaactatttcgagattttccgtcactaaaagtagcgactctactctgatgatgatgcagtgctggatggagtcggagatgggaacgaattgttcatttattagccccttttactgttgaattgagtttaattttttttttggaaaatgtgccaaaaaaattatttaaaaaattctatttatcccccctggcacataaatggagactggtatattatttttcaacctcctcagaagggggtatataattggaggccggcagattaatggagactggcatataaaaagagtatatacggtattttgcttaataaaatttatttgctttgcttgattgctgtggctttgtgtgtatacggtttagggccgaaacacacataataattaatttaaattatttaacccaaagagacaccgtactgatgaggcccggtctctttcggttaaatttgcacgtttcgcgaagtgcccacttttattgatttttatttttgcactgtcgcgaaatgcgctgcccgtcaaaatgtccctgcgtcataatgtcccagcgtcataatgtccctgcgtcataatgtcccagcgtcgaaatgtcccagcgtcataatgtccctgcgtcataatgtcccccaagccaaaatgagtcaaaatgtccccctctaaaaattagtgaaaaaactgaaaattatataattatatgccttcatacgatctgcttttaaaatttatgctttagcatcaatatagaccgtaacaaaattgaaattctccaaaaaagtcgtaagcgtaagtttttggacaacaacgacaatgagaacgaaacgacttctgagcatcatgaaccaaacgacgaaaacaatgaccgcgacgacgattttgaagaacacgccatcgtgaacttcgaactcgggaaaactcattccatattggaacgtgcactcacatgcggcttctgccctcgcgagaaccaataatggcctcgaagcaacgcacctccatttcgctgtattttttcacttatgaaacctcccccaaaaacttcaattttagaagggtctttgtcaccacccggccctttccgactttatttatgaagtcagcagaagtatcgacaaacaagtggacgcagcgagatcagctcggaacttcatacacaaacgacacaaacgctacgtgctgcaaaacgcagtcatcattcgaattttagcggacgccacatacgacaatgatgccgaaattcacgatgttatgacggctcttggtctgcaggtcaaaggatatgcaggaaaattgaaggactatgaaaattttgatgattcgaccacgcatgtcccttaaaattgttcatttcgtttttattattccttcaattaattagaaaatcccattgttgattgatttttttgttgtttacttgattttgatcaatttttaatgaacatagtatttgcgaaatcaaaaattatataattttcagttttttcactaatttttagagggggacattttgactcattttggcttgggggacatttcgacgctgggacattatgacgctgggacatttcgacgcagggacattttgacagcgcgcccgcgaaatgacatagcaccatgaaaataactgaataagaatttaaaaaaatattcattttttagaatattctctaatttcttaaatattttaaaaagaaaattcttatgtaagttctttgttgagtgttgccttaatgtgtaatatttattaatattgttgatgaaatatttaattaaattatatcagaaaataatatatatgaaagatttatatgtttaaactttcattctttaagcattctaagccaaaattactattttcaataactcgatataatttaagtgcgagtacattaaatttgatataattctcaatataattcacctctaatatattttcattttttagggtagaaaattaaaattatttttggatataattaatcaatattgtgtatttgttaaactttaatttatttatttgaaatgaaatacaattttttattgtgggttttatttattttaactattaaaaattgattatagatagttaaaagaattgaaatattaaattacatttttaatctaaattgagcaaataaataattttatcaatgttggtttaaattactgtctgtggggagcatatcaccagcataattatttttattcttagatattttaaattatatatataatttatttaaaatattttttacataatacttggtttattaatttttttaaaccttttgtatatattaacatattttaaaaaattaatttattcagctttttttaaatttattaatagataattgctgaaagaaaaatataaaatttaatttgttcttttatgtaaattttaaattactctaaaagaattaaataaagttgtttttctttgcttttttgtttttaaattaaaaaaacgcagaaaaaaaagaaaatttattattaatttttttgtcgaattgtaaatcattgaaataaaagtaatgaatttctactagagcctattggtttaatcgcataatatttaagcctccaaaaccaactttaaggaatttgttgaattattaaaaaaataacttacaaatgaattcattgaggatggagtttttcctttcaaaacacagaatatgttaccaattaataattatttattaatttgaattggcctggaccaggacaggaccgcacttttcaaaatcccgacccaaatggccgggaccggtaccgaaacttttgaaatgggaaagggacaaaatcccgggtccgaaactcccttttgccgggaaaagtgaaagattaactgattggttaaaatgccaaaaaggtgaaagatgtgaaaggtgaaaacgaaaccacgccttattagggtcatatttttacatttttttagtatttattttaaaattttcaaaatcttaattagggttcctccgcgacatgtttcggggaattacgaaagtcgtaaattgcaagtgaaataagatggaaaaatctttaaatgagtttttaagacttttttgttatggactttttctttttgtgttttttagactttttatgaaaatttcctccccgacgaaggtgttgctccccgacattttttaaatttctccagccatccccgacaaattctttcggggaatttcctccccgttccccgacattttgctccccgaggctcggggaggaaccctaatcttaatccataaatttttgagacaaaaaaaagcgacaaattattttgaattcacaaaatttttttaataaacttcatacattatgtttaaatgttaattgtgagataataaaaaattatttctcattaaataacaaatgcttagattttttctttttattaataatatctggccaattttaagaatgacttttttggtaaaaaaaatgcaacatctcactagaagtattgtggtcaagtgttgcaaactgtagtttgctgttgtgatgttcattaaggttctaacacataagcccgaattttattttatagaatttttacttaatttgctgctttaattattgttttttaaatatcccgcaggaaaacctgggaatcccggtcccgttttccgtctttttccctggcgggatttttactggaacggtaaaaaaatacggtagtcccattcgggaatatcgtcccgcacaaattcgttttccattctcgaattttttttaattgaaatttaattaattgtaaaatttaaaaattattttttctttatttttaaaatagccaaaaaatccaattaatcaatgattggtcatttttgtagaaaaaatctatttatcatctgttcgggggcggatcattattcatttttaacaataatttaacctttgtttatttctaataaattgttaattcataattttggtaaatatataaaaagcacataaacatttgttttgctatcttttatgcttttctttatttaaatcaaattcattttttcttcttaattattaataaaaacaaagttatgaatatgattcttttcaagttaatactcccttttttaattcttaaaatccaatttctttcatatccaaaaataatgactaaattttgtttgtaaagaaataaattcggtacatattttaattcacatgtaaaattacaaagtattatcttaattttcttttttgagaattttttaatttataaactttaattaatttctttatagtatttacaattgtttatattttaaaatgtttcagtttttctgtaattcactcaccgataacaggtccttttgagtactttatttactaattcatttttgttgtttatttatattttccttataaacatttgacaagtttaatatgaaaatagaaccgaataaataaaataaatttaattatttaatgcattattaaattaattatattatcaaatgaaattatttttgttttgtttattatattcggatgtaacttttaatgagcatttcaaaatatgttatttcttttaa

SEQ ID NO: 3897 - DNA, 3261 bp, Heterodera glycines
tattgttgatggatgttccttatatccccggcatgtgtatgtattatgcaatgtatccccccccccagtattgtatgtgtatgtattattcaatatgtgctttgtatgtgtatatccggtatataaaatatggcatagtaagccatcgataaaatctgacggatagactttgattttgtgtgaatttaaattttgaaacttctatagaataagagaaaaaaatcagagaagggtagaaaaccaactcaactgcgtctgagagacaactctaagaagaaaattttttagcttggcggttgtctcagacgttggcggttccgaaaaccaaaggatggacacttgctttggaaaaatataggacgttcgtgataattcggttgggggcaaatttacgattagcccgatttgtaaagcacatttggactaataattattttttgatcatgaaacacggttgtcctgacaaagacctaccccacaagtaaaatttctcgaaccgattgcacagctttttagaacaaaaactttaatgactcacaaatcaatgacaaataaatacatacatatgagaacgaatagacaatgaatgtgaatcgtattattgaaaaagcgcatgcgaatcgaatggtcttacgagcgcctcgaggcacagacgaattgagtgtccggcgaattgacagtcgcagacgaattctccggcgaattgacaggcacaggtgaaatgacagtctccgccgaatcgagaggcacagatgaaataacagtctccgacgaatgtccgcgcgctcccccgtctcagtgccactgttgggccccgtcacattgccattgtcggcgcgctcccccgtctcagtgccactgttgggccccgtttgcgcttaaattaaaaagtgttagtttaaataaataattttaagggcattgcaccattactttatcaacagaaggttgacggtggtttggtgtctgggacatgataaaaacgaatgatgaaaaagtaagatttcccttctttatatacacattttggctatggtgtggaattgcgggaccaggtcgttttggcgccgacgttttggcgccaagccaaaaatgaaaaaaaggcaggaagaaattgtaaaaattataaaaaaatgaaatttttcgttaaatataataaacttaacaaaatgaagaaatggaaacaatttatgggttcatatgataattgcgcgaaattccacggagaaattctaaaataatatgaaaatttggatttatgtggtaattgtgatcattttcattgttcgggttcaccgggatgtaattctgcaccaaattgaagaggcgctcatcagccgcttggtatttcttagctttccgcggtggctcaagtccagcaagaaatgacgcatacttcccatcggtgcccttctgctcagctctttgatagacttcgtcagaaaaattataacgatttcatcatttctaccccccccccctacatggcgtcaaaacgtcggcgccaaaacgttttggttgttttaatctattttagaaacaaaaagagaaaattaccgtgtttagtaaacaaaaatgcacattgtacacttgaaaataatatttatgagttaggaacacatatgtatatacatggtactgtagaacagcaaatatacaacaaaaaacagagacaataacatcataagacatatataatatatatatatctataacatcggtcaatcatccaattctcatcatatacgcacttcggcaactatttcttcacaaagatgttatggtccaagccggcaagcgtctgatactttgaatcctttactgaaaaggggaggatagaaatgtcatttggagattgaaacacaaaaaaccattgctcttacccggggcttgtggtgccgctttcgctggtgttgctggtgcattcttcacaaagatgttcgcatccaaaccggcaagcgtctggtactttgaatcttttactgaaaaagaggggaccacagacatgagaatttggttaaaatttgaacggtttctcttgccctgaccgagttgttgcggtgcctttgattgctgcggttttggcgctgctgctggtggtgcattcttcacaaagatgttcgcatccaaaccggcaagcgtctgatactttgaatcttttactgaaaatggggacagaaatgcatttggatggaacacaaaaacattgctctttgccctgaccgagttgttgcggtgcctttgactgctgcggttttggcgctgctggtggtgcattcttggcaaagatgttcggatccacacgggccagcgtctcatacttcggatcatgttctgaagggggacagaggacacgaattatttggttggaccatctgcagctgaacattgctcttactcggagcaaattgcgatcccccagcctttgcctgctgcggatttggatctgaaaaatgaatttggttagaacatttgctgacaatgaacattttgattgctcttactcggtgcgaatttggagccggccacctttgactggaaatcatttggcgctggttgtggtgatccggacttcacaaagatgttcgcatccaaactggccaacgtctcatactttgaatcgttctctgaaaatgggaaatgacgggtgtattcaatgttaatgatgttcaaaatccacgcaacactcactcggaacaaattgaaccccagcagcagtttgtgcaggtgacagtgccacgggtacccctccgaccattgtaaattgcgttggcggcggcggcagtgcttccccattctgctgaaaaaaagtgataatcattttgtgaaaatggtaattaattaaaaggctaattctgctgattgtgtgggtgtggcatcaaaaactggcctttttcttacagcaaccgcagcattggctgaagatgatgaacacaacagcgctgacgagcatcaacagaagatgaacgggcagcagcaaaaagacagcggagggggaggaggggaaagtcattgttgggacgacacaaataataataatgaagtgaggggggggggaaagtttgcttatatatccatttttgggcaaataacacgcaaagcaacaaaaaactgataaaaaataattatacatattgcacaaaaacatgtttgtataaggttttcggggcgccgagaacaaatacgggattcatttttgactaattcctgaacccccggactcaaattcgaacaaaaaaatcgtaaaaatttttttttttt

SEQ ID NO: 3898 - DNA, 3441 bp, Heterodera glycines
tctgctggttgtgtgggtgtggcatcaaaaactggcctttttcttacagcaaccgcagcattggctgaagatgatgaacacaacagcgctgacgagcatcaacagaagatgaacgggcagcaacaaaaaggggaaagtcattgtcgggacgacacaaataataaaaattgaataaaaataaaatttaaagaaaaataccgaaaaatgtacgctcactatgggtcaagcccagtgttagacaaaattgctcataacgccaaatagcgtaattggcgtaaatttttgcgcgctaattcaaaaattacactggtaaatgccttttttgtatttttttatttcgatcttccataactcgcttcatctccaactaaactgaacaaaattggtatctaaaaaaagattttgaaaaggggaatctttttctaagcaaatgctaagcaatttaactcatatgaaaaaagttgtgggaatttcaaattttcattacgttataacgcaggtccgaggccgctattttcaaccaaaatgcggaaacgaatcacttttttattgattctaaaagtccaaagtggttttgtactcttctaatcaaaactagtagaatttgcgaatttcgatttttacatgtgctagagacatgaaaatagtacgccaaaaagagagaaaaagaaatatgtttttatgttttgttctataactattgaactaagcgattgttttgtttaaaaaagcgattgaaaaatgcagaatttgtttctctatcggtatgcaaaatttggtgtaggtttaacgtatagaaaaaaagttagacggagaaaagtaaaagttgtttttttacataattaaaatgaagagatagtacgccaaagagaaagaaattacaaagaaaaagagaaacgacgagatagtactaggcttttctctgcacagtggagttgacccatagtgcttatatatccatttttgggcaaataacacacaaagcaacaaaaaactgataaaaaataattacacatattgcacaaaaacatgtttgtataggttttcggggtcgccgagcacaaatacgacattcattttgactaattctgaaccccggactcaaattcgaacaaaaaatcgtaaattttttttttttacaaaacacatttatgcaaaaaagcacttcaaaaagcacgaataacagcttgttcagctgtaggttttataggacgttcgtgattttaaattaaattttttgaaaaattcggttgggggcaaatttacgattagcccgatttgtaaagcacaaaaaaattgtaaattctcagagcccttggggattgggactcccgcgggattcacggttcagattgcattttttgcccactagccagtcgcgctcccgtcaatttttcaaatcccaaatgacccaatcgccggaaaacggacgttcggattaaaactcagattaggacacccagttttttttcaaaagtccacaaagacccctaaaagcacggattaaaatttcaaacacattttcgcttttatttttattcgttttaatacatacagtaagtacagaggcatacaaaaatgacaacattggaatacagtaaatggaggcatacaatatgagacaatggcatttgtaagcagtcacagcgttgaaaatggaaatcacatatacaatacgaataatatacacacaattacaaagtggcaaaatgcatatttttatcggtgaatcaatttctgccgaagtgatcattccctcggagcggctcgtcttagcttgcgggcgggcgcatcaatgagcatggcgtcggacacggcgctccgcaaatcgctccatcatcggctgcacatagttgacgaagcagttgtgcgcaccgtacgtctgcgggaggagcatgtagacgagcacggccgtcttcagcagcagatacagcccgaacggcgcgatgaagtggtcgaccagcgagaagagggcgaacgcgcaccagtaggcgagccattgggtgtcgtccgctgaaaatgggattgggatattaattaaaatcaaaaattggaaaaattttaaactcacttttgctttgcgatcggatggtcatcacgctctggtagaccgggtaacatttgactgaaaatgacaaaaattagtggaggcagtgaagacaaaaaaaaaaagccaaaaacccaccgagcacattgctcacgaagatgttgtaagagccaaacagcaggtagaacgtcaacagggcgaccacggcgaagaacagctgaatggcattgtaaaattagagcggggaatgccttccctttctttacctgctcgcggtccatcccggtctgtcgctccacagtgtcgatgatcggatggtgcaactggtcgagcatctcccgcagcaccgggcgcacatccttgaagctgctgatgggcgctgagcgtggctgaagacgtgtcggcgctggcgggtggcacttccgacgcttgcgttggcggttccatggtcgtctccggcgctgctggcggtggcacttccgacgcttgcgttggcggttccatggtcgtctccggcgctgctggtgacggcacttctgacgcttgcgttggcggttccatggtcgtctccggcgctgctggtgacggcacttctgacgcttgcgttggcggttccatggtcgtctccggcgctgctggtggcggcacttctgacgctggcgttggcggttccttggtcgtctccggcgctgctggtgacggcacttctgacgctggcgttggcggttccttggtcgtctccggcgctgctggtgacggcacttctgacgcttgcgttggcggctccttgggcgtctccggcgttgctggtggcggtggctcgtccgacatttggttgctgctcacttgtgcttgaagaattgtgcggcaagtagattaattgttgttgaagaaataatgggggaatgaaaatttagcgaatatttcgcttatttatatgcaatttttgtctcattatcgccagcaaaaactaatgtgtatataaagaggaaaggaatttctacgaattctcattccctgcttcattattcacattcatttttccatcgccaccaattgtgtgcacgcgtaatttctgaggcatgtttttttgttttgttttttgcaatttttctgattttattttatttttcattttacagaaaaccgacagttgctcacgttcaacaacagcgccattctcaacaacatcgcaccaaaatggcacgccgacgaagaaagaaggagccgcgaaaggtgtcgtacaaggtgcggttgacaacgaaagcaaaatgccaaggaaattgtgtcaatgatttccccgtttttccccctcatttcagttgtacgttcgacgggtgctgaaggaagttcatcccgggcaggaaatctcaatgcgtgcgttgaacatcatg

SEQ ID NO: 3899 - DNA, 1219 bp, Heterodera glycines
ccgggcaaggaaatctcaatgcgtgcgttgaacatcatgaactcgtgagttgcggctgttgctgaaagctcaacaacaagtaacatccgttttccccatttttttcagcttcgtcatcgatgccttggatcgcattgcaacggaggcgacgcgcatggcccactacgaccggcgcaagaccgtcacgcttcgcgacatggagttttcgtgccgactgtgcctgcccgacaccatggccaaacatgcgaaccaaaaggctcagaagacggtgaccaagttctacgctgcaaaagtgcgggaccggatgagaaggacggagatgcgacgtggcgaatttgcgatgatgcagatgggagcgctgtgagcacactcaacttttggacgaccgccggatgataccgcctatatattgttgatgattgttcctatatcccccgcatgtgtatgtattatgcaatgtatcccccccccagtattgtatgtgtatgtattattcaatatgtgctttgtatgtgtatatccggtatataaaatatggcatagtaagccatcgataaaatctgacggatagactttgattttgtgtgaatttaaattttgaaacttctatagaataagagaaaaaaatcagagaagggtagaaaaccaactcaactgcgtctgagagacaactctaagaagaaaattggggacgaaacgatcattttggagtgtatgggtgtataaattgcaatacaatagtgaataagtatattaaaatttatatattcaagcatctttcgactttttcacgaatttttagcttggcggttgtctcagacgttggcggttccgaaaaccaaaggatggacacttgctttggaaaaaatgtaggacgttcctgattttaaattttttgaaaaattcggttgggggcaaatttacgattagcccgatttgtaaagcacatttggactaataattattttttgatcatgaaacacggttgtcctgacaaagacctaccccacaagtaaaatctctcgaataaattctaaactgctacaaatgaataaaacatttattgtatcctttctttgtacatacatagataagtagggatctcggattctctcttaaacatatcttgaaaaatgaaaatatctcaaaaattgttaccgtttgggaaacatacataaatagttcacccaccacccaacagtgatgtaatggtaccgcg

SEQ ID NO: 3900 - DNA, 5183 bp, Heterodera glycines
tttttagttcatatttcaggcatttttagtccataatttatgtccatatttgggggtttttagtccatataatttcgagccctattaatgagtagagggctccaattttttgtttttatttttatttttagcacctaaaaactaaaaaaattgaaacaactattttggcattttgccaaaaatttattaacaaaaatgcaaaataaaaacgaaaaatacgccagaatggggggcggaagtttgggcaccgggaagtttgggcaccaggaagtttgggcaccagaaatttgggcaccgggaagtttgggcactaaatttaggatttaaaaaataaaattatttttaattgtctataaattgcaaccatctaatttaaaagcatagtaaatttaatcaagttacgaatagaaagtttttttaacgaatattcactcgattaagcatgcttattttgctaaactgattaccattcattctataaaatgccttacatatatatgtattatttgtatcattacaaggctcagtatgttcaagatttaaaatttataaatttaaatagtattagacgggtctcttgtcatttcgggcccaactaagacggtattcagggtctaagtccataaccagtacatgtttaattctacgtttaaacaaccgtaagaattgactaaataataagaatgccaggtttccatataaaaactttttaattttcaagaacatagaaatttttgagcacaagggttgttaaatttactaaattttaatgatttatataacattttatatatttatattgttttatttttttgaaatccctccctctggtgcccaaacttcccggtgcccaaatttctggtgcccaaacttcctggtgcccaaacttcccggtgcccaaacttcatgtcgccgggaagacaaccagtaaaaatatttacattttgccaaatttttacaaaaaaataaaaaacggttgaagatgatacgaagtccttaattaaatcatcaaaacttgacaaataactagagttgacgggaccgggaattttgacaaaaaccggggccgggacttaccgggaccagaaaagtcgggaccgggaccgcgaaaaaacccgggaccgggaccaaccgggacttttcccaagtgaaaattttttttgaaaaaaattgaaaatttaagtgcactttgttacgaaaattgccaatattcaaaaatgtacccataaaattttgtatttacgttttgggggacgagttctttttaaaaatttgttttcaggggtgttcttggaattttcggagtcccaaaattctggattttaaattttttaaatacctctttttgtggcactgttttttcaaaagattttggctacattgtgggcgagggtccggcggtgccgataggcgccggaaaattttagaagtttgagtgaaatatgttaacagaatttgccaaaaaatgaccgatattttggtaaatttgcggttttaggctgtttaagaaagacaaaataataatttttaagttgaaatattttttattaattaaatttaaataaagtaaaaagattccttttccaaaactttttctgatcacagacagcgacggttctgggcccgctggaaaaatgtctttaagccattcattcggatttttttgtctttctgtaagaaatttaccccccccccaccgatattttggtaaatttgcggttttaggctgtttaagaaagacaaaataataatttttaagttgaaatattttttattaattaatttaaataaagtaaaaaaatataaaaaatgttctatcacggtggggaattaaacccaagagacaagtaatgaaggacagaaggtatagccactacaccacataatgatataaaatcttttttccctccatttccttctcttttctcatcagacccccattcttgccagtgcttatttagtcccgccgggaccgggactggcaaaaccgggaccgggatttctgtttttccaaaaacctggaccgggacctgaaaaaaccgggaaatcccggctcggtcccggtcccgctcaactctacaaataacctttggttttttattcaaaatattttcatatttcgcaaaaattgtcaaaaatagcctttttaatgtttgaaattttttaaatttaagaaaattttttgtaaaatcccaaaaccccctagcgtacacatggaactatcgaaaatttaaaatagatatatattttttttttgttaagaaattttaccaaattcattcttcagttggtaaatttcgtcacgcttaactcccaaacttcccgcaatttctctttcaatttgaaactttttcttcgcttcatatttaaacccataaattttttcttttctcatttgatcaaatgttctgatcagttccatttttgtttctgcagtttcccgctttttcttcttaatttggcccattttttgctttaagttacaaattttgttgtggtttttgcccaattttttggcatttttttccaatccatttcttctttttacattcttaagtatataattaatttctttttttttgtaatatatttttaagaatttatattgtaattaagtcatcgtttgtatggattaaaaatttaaattctgaactctaactcggtaaacatagataaatttggtatcatttgatagagcagggtcgacttttatttattttttacgcccccataaaaataaataaaaaatttatgaggcctcaaaaaaccgaaatattgactcggttttcgcttcagcgatggtggtcaagtgagaaaatgttcaaaattttgttcagttggttgaattcgcatttttggatgtccctgttttatttcgaacattaaaataaataaatcttaataatgtataagaaaactaaacaatttaaaaaccatttttattttacaaaaaaatctttgataattttctttaatgaaaatttagtaaactgcaaaggttcgggaattaatataaagtgaacaagatagtgaatggatctcagacacgaaaacttcggtttttgaggccctctctttttgatttttttttcctatgggcgtgtaaaattaaaaatctcaagagaaatcgaccttgctctattcaataataccaaactaatataccttttccgagtgatagttcggttggttcccgtaattttcaagttgttttcaggctgagaaattacggattttataaataaaagaaaaatttgtgaggaatttttaattgcaatttgagcaaatttttgatccattccaattttggaaattaattttatttaaaaattcgctctaattcaaattcagaaaaaaaagttcactacaaaacaacacgtaaaagatcaatcccttatatcgtattacagtatgccctgctgttgttaccgtttcggtgtaatctaattcctcttgttcctttgaacaattactgtgattaacagaagaattactctgatcagcagaagaattactctgatcagcagaacaattgcaaagaccagcttgttgttgctcatcattttcattttctaatgcttctccgttccattggtcggattcaatttttggcaattttatttttattttcaatttattattgtatccatccaatgattccgttttgattttttgcgatacttttggctttatgttttccgtttcatgttcatcgcaattttcagatttaataataattttgttggcattttgttgttgataaatttcatttttaacagcaatttcttcgtttattgaaaaatttttggtgattttttgtttttttaagtttctcgaagtcgaagatttcaagtccttccataaatcttcatcaattccttcggtaatgataataaataaaatagttaataaaattattattaaaaaaatcttcataaaattatttttttgcatttttttgattcaataaaacaaattattatataataatgaatattttttgtatgttttcgcatttataacacaaaaattgattttcaacgtgaataattgcgcatgaatacaatatatttatgataaaaaaatatatttaaatcggaaataataacataaccaattatctcgaattacacctaattaattatgtgttatttttttatgcgaacttcttaaataaattaaaatcaaaattttgtaaaaaaaatttcaataataattattaggtaacatttgttaattacaagagtgtaatgagatggtggtaatataatgaaaaaacaaaatttagaaaataattccgtttcatttaataaataatcatttttctccagaaaatttaattcaacagaatgcaaatttttttgaagaaaaattaaatacccttataaaatttcaaattttttttacaacattcaaaagtgacctttatcatggacattaaatttgtccaaatattgaggcttaaacagaagagatctttccaaaactgagtctcatttcggagcggaaaattcttgaaaaatcgatagttttatgaaggaaagtcgagtaaaaaataaagaaaggaattttctgaaaattttttcggcgccgttgctaacaacttttctcattatcgaccaaattaaatattttggtatcattcgatagctcttaagttctctataagcatgcaaaatttaaaaaaatttcgtcagtttataaaaaagttatgtccaaaaaaaaaaactcaaaaattgactttttcttggctttttcggcgccgcgtgccataacttttttaattttgaatcattcatttctattttgacatgtaaatatagagcacacatagagctttcaaatgatgccagatttgctaactttaactgactaaaaaaaaagttataacatttcaaaattggcggcgccgaaacagtccgcgccgaactgaccccgacccatttaaacatgcaaaaaattttagggttatcaattttggttcaaaagcacactgaaagcagtctttcgcttttgcgaatgtaaatataaaactcgagagataaagttattgtgttgatttgtaagagaaaatgtaggctcttcccccataaaattttttttttaatttctaagtaaaaaagtcaaaatataggttttctgggtcgctgatcacgaatccgacatccatttcgaaccccgaa

SEQ ID NO: 3901 - DNA, 2110 bp, Heterodera glycines
  unsure (1)..(2110): unsure at all n locations
ggatatcattaccnaatagtttgtttttttttttttcaaatgataaatgtcgacgagtagagaaaaacttcgaatagcaatttttatatcttccgagggattaatggcaactcgtacaaaaattatttttacaaaataaagcctaagcctatgtacgagtagactttgtatggtttccattatgtacaaattgtcatgactctcatttccagagcgataattcaatctttcggagtaattttctatacatagattttcgagagtttctaaaatagaataaagcattcattgaactcgatattttttatcgtacaatttattttcccttttcatacaatttatttttcgttttatttttgttattttgtaataattgaatcattcatcttccaaacacagaaaaatttattgccaggaaaataattatgcataaatttactgatttgggtgtcaatcagcgttttttttgctcacatcagtgatgaaaccgcattacattctcattaaacacaagagatatgcatcgaaaacagaattgtacatcccttcccaaccattcatttcatttcattttggacaaccaatttatttggttaataataaataaaaataaataaaaacgatttaaaaataaaataaattttcatatgtttttagataatccaagaaccaaccttaaaatgaagctcatccttcagctcaatgtcttgtttgcgtgcttttggagcggtaattatacaataataatgattgatgatcaattttaatgacttttaaatgttcgtaatttaatttttacaaaactgttttagcaaaattgctcatttgccgtgtgggactgtttggctccgttgataaaccctttgttcgtaaagagctcaattattctacgattgattgccctgcaaaagctaaattttgtgtgaaagaagtctgcttccaagatggcaaaggtagaaaatataataaacaacacacgagaaatacaatacaaattcattgaaaaagagaagtcaaattaaaagttttgaattttagtggaaaaagtatcaaaaataattacctatataataattgggaaaatttcaaaaataattataataacatggaaaatttgaaaaataattaattaataactgggaaaatttgaaaaaaattatttaaaaactgatttcaaaaatgattatttttaaagggaagatttcaaaataataaatcaataactggaaaaatttcaaaagaaaattccatttatttatcgaacaaagtacagagtttttttttaaaaaaactctccgctcttaataaattctcatttgaatggcaaaaaacccgcatttaacaaaaaataaaaataactttcatttttaattattaaatattacaaataaaacaatttttgtttgtttttttaagccgaaaactatgtgaacatttacgcatgcaccgatgttataaaagattgcaacactgatggtactagcttaatggcatacagggagtgcagactaaaaaataaaggaatcaaaaacgcgtgtaaaaatgagaaagaaaagaatgaggccgcttttgtcaaaaaatatggcagcaattaccggtgcgaacagtgccaatatggcaacgaaaatgaagacaaaggcaacgagaatttcgcgccgtacaggccagacggtatgtagaataaaaattggatgtttttttttaactaatcttttggggaataatgagaaaaattgttttcttatagcattaaaatttaatttgttgtctttaaacattttttcaacggacaaaattggtgaaaattttgtgaaatcaattttaaatataatttacaaatgtaaaaatttgaaattttgttagtgtctcttttttaattttagccgatttaattataatttagattaatgaacttttcaaaaacattaataaatttattcatttttttctttttaccgcgcctcttccgccaaagccccgagatcgcttccactggtaatatttttcttttcaattcaattttcttaattttaatttttctttttgagaattttttgattattttcattaatcttttgagaaaaaaaaacaaaaaaattaaaatttttgc

SEQ ID NO: 3902 - DNA, 862 bp, Heterodera glycines
aaccgaatccccacgccacgccaaccacttcgaaaaacaccacaaacagaagtgcaatgcccgatgctccataggaatccacctgagttgggtattttgttggttcgagagcgaaatccgtccccaggcatatttttgaaaaaaatgtaaaaatttggaaaattacaaaactaaaatttgctcaagatgttcaaatgaggaatcaaaatgtgattttaaaaagtgttaaataagtattttttagactttatttaattataattcaccagcgtaagccaatgtgccccggcataagtgaccatcggaatgccaataatgaagaagattatgcaagcaacaagaagagaaagcttaatgaaaacataaaaaaatactttaaatacttttacttttttgtgttttagtaaaagtgttggaaaagtgtcctcaagagcagtgaaaagtccttccaccatgcaaacctgtaaatttctgaaaaataaattgcaaaaatgatttttaaatgcctggctgtccagcccgagaattgtgatcatcagaaaaaacagaaatgcccaaatctgcttgaacggcaagttactggcaacctcaggatatgccaaaaaggcaagtccaacaccttaaaattaaaaacaataataataataaatgccaagtaaagccaaccgggcttcacaatttcagcgattggtttttttgcagactcggacaaatggccaagaacggaaaagatggcaaaaccggccaaaattgaagtcattccattgataacacacacgaccatcgcatcgctatgtaaataggtttttatataatttctctcatttaatattaaaagtaaaaaaacaacaaaataaaaaaa

SEQ ID NO: 3903 - DNA, 5802 bp, Heterodera glycines
  unsure (1)..(5802): unsure at all n locations
attaattattaatatggacctgtcgtgtcggtcacttttgtgatatttggtttcagataaaatataatgcctttccctgcaccctccaaagttaagccacggatgagcaaaacaaggatcagaaaatatgggaacagagcacagaagtatacaaactttaaagtgaaaaaacaagagattttattttaataaaaagaaatttgcattttattttgtgcccaattcagtccccgtgactatcaaaaaatttactaaaataattcaaacaaaaactttttggcatttttggcaaaggtgcagaattgtggtcccgatggggaaaatgctaaaattttaaaaagccttttttctggggtagaaaaatacgctgatcacgaatctgaactcagattttgaaaatcattgattttgtctatgactttttatcaagtacttgatttttttttaatttttaatcttctgtaaaaattttcttttcaatgaatttgggataaaaaaatatgctaatcacgaatatgggctttgattttgcaagaatcttcgttttctccgtgatttttcaacagcaatcataaaaataataaatcgcagccaagcggactcgaaccgcagtcctcgtctcataagacccatagggattaataattaaatttcaaaaaatcatagaaaattaaatacttgacttttcaatagattcaatagctcattggaaagcgctttttaagctctacaacatctgtgtatgagttttttacgcccattaattttcttaaaatttttggaaaaaatctagcacttgataaaaagtcatagacaaaatcaatgattttcaaaatctgagttcagattcgtgatcagcgtatttttctaccccagaaaaaaggctttttaaaattttagtaatttttcccatcgggaccacaattctgcacctttgccgcattttttgtattcggtcacaaatcaatggcatgtgaaatgaaacggcacctttctcgcctgggtgatgcccttccacaaagcgaaatatacgacaacccatgccaaaaacatcagtccgagcaattcccattggatgccgccaatgtcgtcaattgacgcagtttgctttagcacacgacgcctgaaaaaaacaattattgggatttattggagaaaattgacactttttagagaaattccaaagaaagtctaaatgtttctccaaataatttttaaaatgaaacttttttgtgctttcctccagaatgctctaattaatttttggtgatttaaaatccaaaagccttttttgaatgccaataaaaaataagtctgttatttaaaaactacttttatttatttatttatatttttgctttttcctttaaccgcttactcccaaaattgttcaacggatgactcaatggtcagtccgtacacggacaaatttgacgaaagttgctgtatgtccgtctcattttctttccccgacacacattggccattgttccaccaattgttgcacgtttcccctttaaaacacgcaaaaataattatttatttattatttaaaaaaaattaaaacgaacatggaaatggtgaattgaaggagctgatcatgtaaaaaacggcccaagaaacaatcacacaaaaataggcaatgcacatgaacgaaatgaccacattaccaatgccaacacctggaaaggcaaaaaagtattatttaaaaaaaattataaattttattttaaaattcaatgcaaaaatttatttacctttgaaaattggacacattttccacatttccattgctcctgaaaataatttaacaaaaaatgctttaaaggcatactgtaacctacctttctgtaggtactgaccgatcgtaacttccatgatgaaaattggtacagcgccaaaagtgaagaaaagcgcataaacaacgagaaaggaacctatgagcaatttaaaagttgattaaaatatttttcgaattaaatccattaattaacctccgccatttttgtaacaaaggtacggaaagcgccaaacatttccttaacataatattttttaccgaaaaaaaatcaaaatcaattaattaattaaccgaggccaacagcgtacgcaatcatactcatcagaaaatcaaaccgtcctataaaaaatgatgaaaattaaacagattaaatttatcttctaataaaaatttaggttttcattgaaaatttttctaaaatgtagtgtattttccttgttcattttgatttttaaatattaacttttcaacagctgggttgtctgtccaaagaaatgtcaagttgtctgtacacaccgtccgaaaaaacgagatgtgtaccaataaatagagagtgccagagaaaaacattatctttttttctctaattttttgtctccttttggcgtactatctaatatttttattattaggaaaaacaacatttacttcgctatgttagcttcttttctatatgttagatcaacaggaaattttgcatatcgttagagaaaaaaattctgcatcgattaatgctgaatttatttttgttaatgctctatttcaaaagttataagaaaaacaaaattttaaagcctcataacttttctctggtacaccaaatcgcttagcatttgcttagaaaaagcttctcattatcaagagctttcgaaagataccaagattatccaatttggttggcaaaaaccttcaaaaataattcccaaatatcgtgattttttaatattttggacaaaaataaatgaaaatattcatgttgcacaacggactcgaaccaccacccgttgtccctttactatcttataaaaaccactgagccacgcatgcaaatcttttctggcacaggagctcatttcccggacgctgtgtgtaactaatggtccagcagaagccacaaatattttaaatgaataaaacttcggctctactgcagtttacgcgtcaaatcaatgaccacataggccataacttatttcttacttggtatcaattgaaagcttaaagcctatgttttttataactaattattgtgctcaagactataaacaaaaaattttccaaaatattgttgaaaaaaactgaatttcggatattctcattgtaattctttcttaatgtctttattttctcttttcttgttatagattcccgaaatttcaagcttttgtttgataccaagaatgtaagatttgactaattgtaagttagaaaaaagttgtggactaagaaaataaggatggtcactgattagacgcgtaaactcagtagagccaaaacttctgtgtaggttaataaaatcggtgtgtaagaaaattaatacatttaaattgcattttttaaatttattttttatgctttcttttccagtcaaaattccaaatagtctaaaacaaggcacgcaacctttntaaaatttaaggtaaaagaacaaattacccatccaaaaatattttcaccttaatttgtaatgcttattgttgctttaattttccagtttttagtgacaattatccattcagttaataggggtcaatgatttagtatttacataattttaatttaaaatgtaaagttcaaattatcagagtttacccgtccattggcctcggtcaactgattcggcgccatgcatgttgtgtccaaaggaataatgaacacaaatatctatcgacaaataaataaataataaatctgaggagaaatgaatgaaagagagagaagcaaatcacgaatgaacaaattgtaggaatgaatgaagggagagcaaaatgtgaagggcacggtcactatttatacactccgccggtggttagagagaaaagaaatgtaattgagaaaagtgagtctgttcgttttggcgccgacgttttgtcgccaagtcaaaaacaaaaaataacaaaacatcgagcagaaaattcaaattttaaaaaggagaaggatccatgtaaattacaccaactcgatcagatcactccttcatagtgatctggagacctaaaattcacctaactagggttcgacctatcctatttggcttttcgggtgcccacaactttaatatttgggaaggatttagaattggttgaaattgatgtcagaatcctgatcataatcctgaaaacctctattagcaaattttaactgtttttaagataaacaaattttgcaaaccaaaagagtattacataaacaaaagaagaacaagctttaaatttataagcattcgattagaaaacattctcaaatttaagctttcaaaaaatggtaatactggagaatctgggctccacccaaaaaaattatttttctgctaggaaaagtccaaccctggggtttacggggcttccgatcacgaatatgatatcagagctgcaaaaatcattgattttatcatgattttgaaaatcttagatttttcgaaattttgatgaacttgatcaaatgctgcacttttttgagtgaggcaaccatatatgatcagtagggcagcaacttttagtgaaaaaacttttttttttgctcaattgttttgaagaaaggagctcaaaaaacgcatttctgcgttaaacttttttcatttggacgtcacttttcgtcactagaaatcactattttggcgttttgtcactaaaatagttaaaaatcactattttggcgttttgtcactatttcgacattttttggaaaattactaacaaaaatgcaataaaaccaaaaaatacacccctaagaatcgacctaaaatttttcaaaatatactcctatgaaatgaaaaaaaatgttctcaaaaatttactttcttggcaaaaatttttaattttaaaaatttttttaggtaactattttggcttttttggtcttaaaaatcccagtcctactcattgaataaaaattattttggcttattttttggctgaaaattatgtcactatttttgactttttgccactatttcttcactattttgggatttttactcactattttagttaactatttcgggatttttcgtcactaaaagttgctgccctaatgatcagcactatttattaaccaatgagatggtcatagaacaattgcataaaaacataaacaatcaatatttaaatttcaaagatctattatttttaaaatcaatgttaaagtcaattatttttgcaaattatgatatcatattcgtgatcagaagcactaaaaacgccgggttcatttcttcacaaaaaaaaaattttggtggagccagattcctcccagtatttacccccaaaatataaaaattatatttcgataagtattacaacggacactcttcacattaacattatcactcattggcagtttaaattttctttattttataacaaattggtgaggaaattgaagagggttttatggaattgatttggatgtgataaatggcacaaatgttttccttcgggaatttcaaccaatcgactgttgggcaaattcttgagtttgttcgcagaatttatgcctaaacggaagaactactaatagtttatcatcaaaaacttggataaccaattgatgtgtcgaaagcgcctcggatgatcagacagggactaaatttggtttctgttcaaaattttttttggtacttttacagttctgtggctatgtatacaataaagaatttttggtcaaaccccacggtcgctttccaagtttctccatattaaattccctaattgctcccccacatctattttacaattccgaactgggaatcaacattcaaattttcggatagaaaatttaga

SEQ ID NO: 3904 - DNA, 1139 bp, Heterodera glycines
  unsure (1)..(1139): unsure at all n locations
atttagaactttgtacctnttttttattaattcatgcccttctgtcctgaattggtcgaaatgggtaccgttttttaagagcaaatcattcacaaagcatttcaatttgtagtcacaataccaaaaaagtgaatgttccaacaatagtaattcttacattgggttattgaccaattcttccacttttagtcggtgagtgtccgacacgccaattgcaatgaatgctttaacgtggaaatgaatgtcctttttcttaattccacgagaaaggaacggaatgaggtaaatgccggacatcgaactggccacaagcacaacttcacgtgctccgatatgtgaagttaagttcagcaaaaaatttacattttcctcctcgtcaaaaacaaaatttgagaggtgaggcgcaacacagcaaaagccggaggccgacagaatcttaggaaaagcgacttaaacaaagggaggggaaagtgcgcacctgaagagttttccgccaaacattggcatcatttgtttggctaaatgacttctttaaaatcgtgaaaacaaacggtgcaatggcaattcgtacagttgaagtaacattaatttgtaagaccatttgttttttggtacgaactgccattgacccaccaaaacgcactcgtgcaacagcaaaatgtaaggaggcaagatggggacggagactggcggggaagaacgcaggaaacgaattgtgccgccgccattctgctgatccaataaacaaatcaatgccaataccaccagaaaagtttttggccggcccacaccattcccaattcccacccatattttctaccacctctgtaatggcctcttccgtgacattcaatccgtcagccaggcaatccaaacatttaggcaattcaatctgaaggtcgattgatttaatcgtcgtgctcaaagttgactctaatttggtgtcattgagcataacaaaaacggcacaaagctgtattttaatcatacacataaatcgggagttgagaagacagaacaagctttggtaaaaacacggcaactcataaaaacgaacattcgaatttttgaaaattgccaaatgaggaacggacaaacaatttttaggctaatttgccggtgattgttcttcacttttg

SEQ ID NO: 3905 - DNA, 1389 bp, Heterodera glycines
  unsure (1)..(1389): unsure at all n locations
cgttcgcccacctgttccggtctcggcttcgtctgtttctgtctcgncttcgactctttcccctcttttctctgctgcgcgaccgtcgctgctccctttccttctctttgctcctcgaccgccttctttcgcgactccgcgaccttcgtctcgtccctccaccgtatcgttcgtcctcatagccatacaattttgcacgttcgccaaatttgctttcaatgtccttttggattggcacaggaattcgaggaaaaagcgtgccatagaaatccagctaaaaacatacgttttgataaaaaaaagtaagttatattttaggaataattagtcgccattcattgattttttcgccaaacaattcgaagacattattatttttaaaacatactaaaaaacaacaatgttaacgcaatatcctttaaaatttaaaagtggagctcaattttccctatttttgctgataaaaaatataataaacaaatctgttttaatttcgaaaactaaattttctgtccatggtaaaaatgtgagaggacgagttgctccccggcaccaattggtctaaaacttagtaggaattttgaagaataaaacgctctaaattttatttattttgagaatttctgtgcatttgccttcgaaacttttcctgttgaccttggtgagcatcatcctgacaagctgtcccatttgcattgtgtcacctcctcccgaacgtgggtcaatctctgcgtcgtcgtcctgcaaaaagtgcacatttaaacaaacaaatgctaatagcagaccaaataaggttccatccaagcccaaagatcggcaggtttttgcgtgtatcggatgtacataaagccaattcctcgcaagtaaatcgactgacgactgtttatcatggccaccaattgtttccgagtgactcgtaaagtgaagagtttgtacagcagacaaaacgctgtagagattacgcctcccgctccgacaccacggaccctaaattttgggggagggcataatggagttggcattagtgaattattatctaaatgtcacacgaaccgtccataatgattcagttcggaataaatggttaaaattactcatgaaatttagaaactatcccttctaaataatggattaatgaatacagttaataaatcttttcaaaaatgtattttgctatagaaactaaataataattttgttgcctggttttgcttgaattctgatgtaaaatcagacaatgaacatctctttaaaggatagggccaaaaggggcccattgaatgtaacctattgcttccgctcacccgccacacattcccgtcatccccgtcgttcggcgtgtgccacgctcccatggctcgagatgtttgacctgaaaaaaggaaaaat

SEQ ID NO: 3906 - DNA, 938 bp, Heterodera glycines
cactgtacgaaacggccgaggagcagcactacggtagcaacaagagtggtacagtaggaccacagaaagaggcgaaaggagtgcaaatcgcatcaataccagaggtaaaagcaaaacacaaagccaaatgctttagtggaattttgaaaaggtactaaaagcaactggactgaaccagcaggacagagaagcacttttgcaggcattgatggaagtgacggggacaattggacacgttcagcaggccatggaactgctgaaggcactcaatttctttggtaattaaaagcttggaatgtttaataattgtttgtttatttgttttgttttttgaaattgaaccggagataacggaagcgaatgatcgcattttggcagcgtacacaaaaatggaaaaatcgtttgaaagtgcgcagaaaagggaattggacgaggagggatggacattcatcagaagggcacagttcgaccagctgtgccgggaccaatgcaagcagaaaaaaaaattaataaaatgccattatttgaagatgccgaattccccgacaaagtgaaggcgaaaatggccgaatttgatggactgcacaaaagccaacgtgatgaagcggtgtggaaacgaatagaacgcatcgccagagacattccagaagtgaattcaaaatttaaattcaaaagtaattaaggagagcaattaaggaaatcgcggacaaagtggacaaaagaaagcgccaaaagattgtccgtttgcattttagcgccaaaaatcggcggcgaatgaaaaggcagcagccaaatgtcgaaatcagtgggctttctgtgctaaagcccgtcgttttggagccgtacatgttcacgccgatttacgggtcagtttttttcaaaaaattgaaaataattcactttttgcttaatctttctgtgctgggcccgctgatttt

SEQ ID NO: 3907 - DNA, 2588 bp, Heterodera glycines
cgtaattttggccccgtccgtcctcagcccgtgggttctgtccccggccgcgcccgtgccgtacattctgtccccctatgttttcggccctttcattctttcgccgatggcaatggcaccatttatcgtaaaagttaatccaatgttgttttaaatagcaatgttttcagcttactccttatgtgttgtcgccaaatgtgctcaatcctttcgctttgtcccctttaattttgagcccaacggttaccaatattaattaattaattgcgtttgctttctatcgccaattaacccaattaattaactgtctgtcattgttttaaggtgctcagtcccgacattctgtccccacagattttgggcggtggcattttgtcgcccaccgtcggctcaccggcggtgctcacagaatcggctctgatggcctccgttctttcgccaagcgttctgtcgaaaaaataaaaataacatttctattttatatattttttaaattatttttatttttttcattatttttttaatatttctctttgaattggcaaaatatttctttggttttgttattattttcgtttaccaaaatataaaattccgtcgtaaagtttaaaatgagagaaatgcgatgaaaaggagcggggaaatttttcttctgagcaaatcattttctgttttatgtttacgatgtttttgagtaataataataatgaataagaaataacataaatgaatcaaaggaataatatttaaaattataatattgtaacaataattttattttatatttaaatttaaatttgttttaataattgatcaattgagattcagaaaactttttaaatgatcttttacactttaatttatttaatacctaatcattttttgtctctttgagtgaaacaaagagataaatgaaattcgcgagaaaagaaacgcgacagattcggtaagagagaaaaactcacaaataaaaaaggaaaaaaataataaatctaattagcctattttttattaatatgaaagtaaaacgcacagaatattttgattttgcatccgaaaatgtaaattttgctcaagaaaaatgttgtgcaaattccaacgaattgtaaaacggaatgcgaaactcaatccgatggacgcactcaaaaatgcacaacgaaatgccaaatttcaatgccatttcgaatgcttagccaacagcaaattcaaattgtaaagatttccattaaattatggcaatttgcttaccaaatttatacctttttcagccaaacacgcaaataatcagcagaatgagtgaaactcgcgaatttttgcagatggacgaatgtgtcagattttgtcagggaaaaggcatcgcaaaaacggcggaggaatgccgcaaaaagtgtcagcccgtgccaatgccgacggggacggaagcacaagccaaaacggaggccattccgcagctaacattggttagccttaagaagaaatggccaaatgatcattgaattattggcagaatatgccatttgtgagcaaagtaacggaaacgcatcaatttgtgggcacattggaggattgcattgctttctgccagaagaaaggcatcggaaagtcggcggaggaatgccgtggcaaatgccaaccaattgggacaacggttgtgacgcaaattgtgcagccaaaatgagaagcggacaatgccacagaaggacagaaacgggaaagcaacaacactttgtcatctaatcaatttgcttcttttttgtccattaatcattttgatgaaatttaatcgctttttaaacgcatttaaaagaacggcgttttccaaatggcgatttgggcatttcattcattttaatcgcaccctttgaagcctttttgatgagaagcgataaagcgagtccattgcttatttattaatgcagtcattttacaaattacaaattaattttagtttttggactgctctttccccccttcccccattattttagtctcgaaatagcatcctattttatgacttcaactcacaacaaaaaaattattataattaattaattgcatttatataataataaattttctattcaaattctattcaattataacaaatgaatgcccaataaatttattggcataaattcaaatcaattgttagtattattatggaattaatgtgaaaaaaggaaaaagtcacgcaataaaaggcgaaaggattctataaataagacattaatacgaaagattaaatctaaaataagccaaagccaagcaacaaattaaatgaaaaagggaaaatgccaaagaaaaggcgaagaaacccttcaggggaatcaaatgactctttttgatacatttctatgcaccaattttggctttttaaacacttaaaacgctctctgctgatgtcattaaaataaatttacattaaaattgaatataaaattaaaattgaccgaattatttcaattaattatttggtttattttaatttttttaatattttctcttggaatgtttttgctggatgaattcttctgcttcttgcgtcgaaataagcagcttctgcggctttcattgtaccaaatcaccag

SEQ ID NO: 3908 - DNA, 2711 bp, Heterodera glycines
  unsure (1)..(2711): unsure at all n locations
tccaactcaaatccgccaaatcccggggtaattgccaaagagaaaccattgaatgatatttatattttaaaaagcgatatttacttaatcatattattagtgaatttatattagctgaacatggccaattttgccgtcccaattttcatcggacacggaacgaatgaccaaaatgtgccactttcattggcgtaagtttttattgtttattttttgcatgcgaaatttgacagattttcaatggcaaatgcccttcggaggtttgaccccaatgtgaatttgcgcatttaccaaatgggccacgaaaattgtgcagccgaacttaacgaagcaattcaatttataagggaaattgtgccattggcatgagataatgataaatcaaatgccttccattcgcaattttccattgccatggcaaccaatgaatgaattggcccactttttttttaatttttggccctttaaattgaattttttttttgttctcaacaaaggccaattagtcctctcaacgtgtttcgtctgactcaattaattgatcatttatccttgttcccccaaaatgcggcttcgtcttcggctttccccgtggtcctttcgcggtgccgtccccggagtcgtttgggtcggtgccgacgaggttttctccgtgtccgatgaccacagtctctgccgctggaccgtctccaaaacggaggccaattttctgtctaatgcgttgaaagagtgcgttttgccgcctttcctcccaaaatcactcttttttcatttccggtgccattttcagctccattttccccacttctctcagtgccgcgtttcccttcgccgccgggcgttctccattttccggaggactgtcaattcgctcgggcaaaaagcaacagcgtacttccgccattcactcgtctcagtcagcagggaatgagctcattctgatgactgcctctgatggtccatcctctcattgatcagataattaattttgacttcgattatctcaggcaaaatccatctgatcactccggcggggaaaattgaacgaacaatcgaagcccaccaaggggcggccattttggcccggtggagcacttccgagcccggaggggcgggcggatttgtgagctgtgagtgaacgatgggtgggaagcgcaaacggaaaagcaaaatgttggcacaggcggagaggacggactgttgaagatgtggtcgcgaaacggaatgttacggtcgatgttggcacaacttgggaagccaatttatgcgatggattggaatgggaacggcacaaaattggtgtacagtgcgggcgaagagtgtttcatcaaacagatgaaggcacaggtaaacgcagaaagtcattaattgatcgaagagatctttttagaaaaactgccctttatcaaatagattcaattaaaatgcaatcagaatgcacccaccaaatggcgtgcccacaccggactcgtcctctgcttgagttggagtgcggtcaccgatctgatcgccagtggaggcgaggactgtcgttaccgactttgggatgggcaaggtctgattggcaaattgccaatattgagggtataacactcccgcctcttttgctgcagggcgccctctgtggtcctccgcttcccatggccatccgttgtgcagcgtcagttggagtccaagcggagagactttcgcgatcggctcctacaatttgctcagactttgcgacaaatcgggggtaaagagcgattaaccattattaataatacgaaaattttggctttatttttttttctgtcaaaattgttcaaaggcatctccgatttttctatgccaattaaatttgatcattctgtttcttgactacagtatcactgccttttccgctcattgtgccaatgcctttcagtggtcccattcccttgagcggcctgccagtggcacaatttactctttgaattggtccgccgacggtgttcaactgattggcggatgcgccaatggacaaatccttcacgcgcacgtcgttgagaggtcgtcgttgggggggcgctgtggtttttgccgtccttgtctgcctgcgttcgggcgggttgtgtgggcgcccttggcggccgtccaggcccgccncntggtcgttnnccttcggggtttgagctcggtggtcgcgcgtgntcgtctggttccgcgggtcggcgtggtgcgtttcgtcttcggcttttcctntttggtggttgcggccctctcgctttgctncgtcttcgggtctttgccggcgtttcntggctcgtttttgttttcgtttgtgcctttgtttgggntgcgccgccgcttgtcgtcctgncggtggtctcggggcccgtgtcgctggtccgtctctgcgctctgtgtgccgttttggcgtggttttctgctgcctttcttttcggggtggctttntntcccnccgttcccnnttctcggnggtgttttctgctggtgggtggctctgccgtccgtgtgttctgcttcgtgggccggtttctcggctctcttcnttttcctccctccgccgcgggcgggcccttcgctgtctnttcggtggccntttcctccgctttgctcgttcttcgggncccttcccnncnttccctaaaggatcttttcgccccncngnncggtcgnncggccccttaaggaaagaaacacacaatgttagcgggggggcgggggcg

SEQ ID NO: 3909 - DNA, 3410 bp, Heterodera glycines
agtaaagcatagaagcggcaaaatggcacaaatgattcatcagcaaattgcaaattgtaaagaaaatcagttcagttctgcatcttactgataattttgagttctattgtaaattgaacaaaagaagaccattcggtgtccatgcgccagagccctcaacgttttgggaaggaaagttgaaattgaccggtcaatggcaattgcaactgagacggcttaactcaccattaaaacttctaatcactagcgcggaaagcgtaaaggcgaaatgggcagtcatagggattttgtcatgagaggcacttaacgaaagaggacaatgccaacaaatgcccaaaattgtactttctccattgatttggtcatcacctccatttaggttgaagtcactgagttgtgtgtgaatatgtgtggcacttttgccgagcgtcgagtggcttttgtggaccaaaagggcgactgtttcttggcattagtcagctgttatgggtcagcccaaaggactgcgaagatcggatcgctgatctcctgcctgagtgccaacaatttgaccaatatgttggccgcactgcaggaaaatcagcgcctgctcgtttggacccttccgacggtggcatttttagacagggatttgcttccctccacccaaatggaactcggcaatagtgccgaattgggcaaatcggcgacgattatcgggtgggttggacaatataacatgtgtgaaaacaacaaattaacaaatggtttggtggaatattcagattcatcgggaacaccgtaactgtgcgaagatcggacagatgtttaatcgcccattatgtgccccctttcgtcgcgggactgtacgagattaaaattcaaaatatattttaaataattaacttattttatttgaaaggattcgttgtgttcagcttgcccaatgggaacaagctgttcgaatttgccgaacaacaaatgtgagaattttagggcataaaaaattgaaaaccatcgctaatcaaggaggaattcttgtgggcaactttggccggattggcatgcattgaaaagaattaccaaattgccgaaatgtgttatggacaattggaggaggtgactttcagggagcgggggggagggggaggggggtaaagaaaataaagagcatggattgattgttatcattaaatgaatctctctcaagagtccaatttcagatggagaaggttctgtttttgagtgagcttcggtcgcaaaatgtgccgcaattgcgcgacgcaaaagtggcacaattcagcggacaaaggcgcgaagcggacatgcttttggtaaacgcgggaaggaccttcgaggcactgatgctcaatctcggcacttttcgatttgataggtttggagaaagaggaattaagtgattaaaatgattaagggcgttggaattggcgacaaaaatgggcaggcatttggacacggtgctcggctatcgccagcgatatttggagctaacaggacggaaggagacagatcagcgatatttgaagcatctttcggaggtggaaattgactggacacacatttttgagaagatccaagaggacgaggcaaaggccaaccaacagaacaaatcgccgtgaaaatgacgagaaatggcatttaaaattgaacatgcgcaaaaagattcggaaataataaacaatttaaaaacgaaataaatgggaaaatgaaggggaaagggaagaggaagaccggcggaggaggacaaacacacatcagggttgttccgggttacccgaaacccgatacccgaaacccggcctttttctcgacccgaaacccgacccgatgattttgggtccggtttcgggtcgaaatacgcactgataagaatggggtctgggtgaaaattctgaggataagggaattgagaattttttttgaaacgattgtgttcaatggaatcgaaaattttgtattcgtttttgttcattattatcctttttctaaagatattttgtatgaatttcttgaatttaagcaaagcagatggctgaaaaacctgattccatttggttttatttccatcgtcctataaatggcgcaattcgctgcaaatattgcagtgccatttgatttttaaacaaattaaaaatttgtcaattgacccgaaacccggcctttttctcgacccgaaacccgatatttttctcgacccggaacaaccctgccccgcactcaaactcaccactggaagaaaacgaatagctggagtccgaggccgactcgcttccactttcgcttgtccccacttcctccactgacggcggttgtgttgcgcaacgtttctgcgccattgaacgttgctgttgaactgttgacaaaaactgacgcaatcgcttcccatccgtagccggcaaacagaagaaagagccggggaccaaagtcacgtgccggattgatcggagagccgacattctgtcaagcagaaattaccaatagacgagggagggagtgatcatgccaaagacaaacgtaccatgccaaaagaggaagtgatcagaaagatggccagcccaaagccgatcggatgcacccattttggcacttggtttcgcggatcgatcagcgcattgacgaaaaagaggagcagcgcagtgccgacaatttcatccacaaacgctgcaaaattaattaaaataattgttaaaataaaagaaaataaagagagacgataaagagaaggaggagtagagagagaaagaaaaagagggtggagagtaagtggaaagagagagggaaatgtgagacaaaggagagagaggcgagagcgagaggaaaggagaaagggagaaaaaaatagaaaatcctgaaggaaaagcatgaatgagatgagtgtggccattacattagcatttgcttcgcttacctgtgtaatgtccgatgtgttcgtccggaaaggaacagaaaattgcgcccgttccgctgggccctcccaccgttcgaatgcccgcgtcgaatttctcgaatgattctggcaaaaaaataataattttcaaaattttcgaaaaatagcaagtcaacccacacctctgtagacgtggaagcaaagggcggagccgaaaaaggcgccgacagtttggacgagggaatacagcaaaaagtgcgcaaatggcaatttgccaaggctaacgaaggcgagagacacggccgggttcaaatggccacctttggacgggggaaattggcacagaattggaaaacggtgagggcaacacatccatttagtaccgaccggatgtgtgtgatcggaaaatgcgtcagtggcaaagtattactttgaaacgagatattgtacatatatagtggaatgattataatttttacgcgtaagttgatataggaaaaacctacagtaatccattcacggt

SEQ ID NO: 3910 - DNA, 6055 bp, Heterodera glycines
tatttaagtaatttcgtttacaattgaaatatttaagtttttacttgttttgttacctaaaaagcgttaataaaattttttattgcctattagaggattttgtgcctttttaattgcctatttcgcgattttttgtgcctaaaaaaggaagccctaatgattgtgcagcgaatattttgaataataaattattaaatttaaataaaataattattttggcttttaatttgtcacttgcacttttttgtccattctcctttttccttttgctttcggcttcctttttatcttgtgttaggctttttgcttcttttccaggtaatttttcaactttgtgtttcctttttactgtcattttacagaaatttcatttggcatgactttccccaattcttataaaatcggaccatccgctagtaagggacaacgactgttttaagagatattgacatatttagaaactttttctaagctacatattgcttggtgattaaaccattaccaaaaaggttagaaacgaaaattgaaaaaactcgaaattttttatactttttcttaataactttttacattttggaaaagcttgacaaagtgcttacaatgaattacacttaattttatagaactgagaagtatttcaaattggcgttttgttgtttgtattttccagcattaacaaattaccgaaaatttccgtatcttttttcggcaagcgtcaaattcggaaagagcttgaagcgggactggatcccgcacgaaatccatccgaaatcccgcatttttaatttcgggattgcccgctggataccgaccgtcccgccaggcgcgtaaccagaaaaaaaaatttcgggaggggcaaccgtttttatgctcttcgggccagctaatttttctcaagagaaaattttcagcgccggagaaaaaaaacagggtaatagtgtactttgtaccagagatgtgccgagccagacaaaatccgattccgattaaatcgccgattccgattatggccaaaaatccgatacggttttaaaaccgattacgattatggcccaaaacccgattaattgcgattccgatttttttaaaataattttttcccaaaaattttattcataatcaaaatcataaatttaaagattgtgatgcaaaaataaaagtttgtccacattctcaggcaataaacgttttcagatctgtcacaatcaacccagcggtggagaatattcccagatatttgccatttttgctaaataacaaaaaacttgattatatcggggagaattaatccggcactgctttgtgagaaaaatttaatttcagtcattatgttaaaataagattaaaacattcgtttcagaaaacatttttttcaaaattcactggtattctcgctaaaaaaattccttcaaaaggtcaattcttaggggtgtaataattagggcgtgtaattatatggaaatccatatttttttcctggactgtgggaggcctgaaacgcacgaaaaacatgtttttagcttggtttgaagcttctaggaaggatttctatatccatattttccatatttttccatatttcgcgatttatgtccatatttccatatttttccatattttggcattttggtccatattttatgtccatattttggcatttttcaaaaaaacctctattagaacggcccccagcagctaaattagcctttttgagcccaaaacccgaaaaatttttcaaaaaatcattttttcgccaaaatttctcgagaatattgaataaatttaaattttcttaaaaattaataaattatgtcaaaaataagcaaaaaagcgaaaatttcgcttttgttgttgattttgcgctaaaaaaattaataaattttagcttttatgttttttttcttttaaaatgattgcacgtaattgccgaaaaaattcgagaccaatttccgaatgttgaccgactaattgcaaaacgaaagccgtctttgtcaaagcgccttaccgagtcaaaaaatttggaaatatatctcatatgcaatttaaaccaataaatttgaagaaattttacactcaattttgaaaaatttatgtccatattttgacgtttttgccatttatgtccatattttgagattttcgcaattttatgtccatattttgcgatttttggtccatattttatggccatatttcgcgattttatatccatatttttaccagccctaatgattagacagggtattgaatacgtatttcttcgagaatttgctgaaaaattttttcgttattgttagatctccgaaacatatactgatacaaataagattgtaaaggctcggggttagtgccgtggagatgacgaagaccatttttcactgcacgccaagttgcctcaatgccctgtgtgtgaacttgtgggtcttgaggatcgacaaaaaacaagcgatggttaacccaacgatgctcaaattgctgctgcaaattacgtatacccccataagcagcccatccgtcgcttataatcagagttcctggcgctacatttgcagaaatgattgggagcaaagtgttagcatcccgttttgccacaggaaacaaacggactttgttagtatttctctcgagaatgccgaaaatccagtcgtggttacggtttagcattcgtcccctgttgtacttagcacgaaaatatttagtttcatctatttctacaacacgcccaacccccccaagcagttcattagtttgaattcgatctgcccaaccctgacataaatctctcataaaattgtaaaagtccactacggtatgatcggtgttgatattcatctctctttttattgccccaaaagtggaagtcggatgttccgcccaaaaatacgcaagccgtagcacttgattcatcgacaagtgtgatttgtcgaagaatgagccaaaacgaacagaaatacgatttgatgtttcaaccccgtcacgactgcgacaacgattgcattagtctctctattattaaattttataacaattgattgaatgcgtatatacctatcgatactttggtaataagtgatcaatgacggatttaaattttattaaaaattaattagtaattttctatttctcttggtgttacgtttttaatatttaaattattatttctttttgcaatggttggtaccttatgtcaaaaggatgttcgaattaggaaaattttgattggacgcgtaaacttttgattggacgcgtaaacttttgattggacgcgtaaaagtcgattggacgcgtaaaatgcagtagagccgcgatttttaggtaagaaaaatcccagaataggtacttaaataggtaaaaaaaaatctcaaaataggtattaaataaataggtacaaaaattccaaaataggtaccaaaataggtaaataaaaatttttattaacgattttttagtggaaaaaagcaaacaaagagggaaaattttggttctacatatctctttgtaaacgaaaatttaaatatattaatattttcttagataatattgacattttaaattaaaaattttgtcaatagaaaaaataaatttttgagaaatttttccaattcttagggtgcatttttgaaaatttttttggtcgattcttatgggtatattttttgattttattgcatttttgttaagaattttttgaaaatccttaaaataggtaaccaaaatgccgaaataggtataaaaataggtacctaggtaataggtagaaaaatcccgaaataggtaaaaataggtattataaaagtgggtgtagaagctccaaaccaagctaaaaactcgttttttatgcttatctcaacgttacaagtgcgcaaaaattttaggtatttaactaaaaatcgcatccctagcaataaaaaataaaatataccccaaagaatcgacccaaaaattttctcaaaaaatacacccctaagaatcgatccgaaacttttcaaaaatgcactcctaagaaatgaaaaatttgtctccaaaattttttgtgtttaattactagggatgggatttctaagtttttacttattttttctgcggctttaactcaacgagaaatacacgaaaaacacattttttgtctgaaaattttgcgttttcacgcccttattcgaccttagaaatccttatttttgatgttcgcccttaaaataagtttttgcccttagtactactgtacttgttgtcttactgacagtatgaccggcttacaaaaagtgccacattgttgcactttccttttgatcaactggcagagttagggcccatagaatgagtaaattgggtgactgacgttacaaaagtgcatttcaagcccaattccttggccctaatatggcacggcatacctctttccatttgatgacacgtggcagcaaaagtttgtgcagcagccaacaggacgagagcgcattcggtgtggcattttcggcagggatgagaggcacaatttcgaacaaaagttcgagcggaaggcatttgggggccattgttgggagaagcatagttttgttatttggggtaattagtgagcaattagctgattagcattgaacaaaaaccgccgtcgtcacattggcactttgaacttggtttggcccgtttcgtctcgccagtaacagtagcagcagcagaaggaatggccgttttttttctctcctttccgtttgctttatctcttctgcgttgtctgccttttcctcttcactctctatctctatctctcaccttctctctctctctctcctttttattttctctatgccttgcgttgcgttcgtcctttcgcaatgattcggtcgcttttcgtcctcgcccgaggggttttgcgtagaactgtctcgcttttctgcttccacttctaacgtgcacacttttgtctttgcttctctgttctcgctttttctctcctgtggcaacactctctgcgttctctctctttcacttctctgtttagaatagggcagagaaatgaatccaacttttgtttttatatgtatttgtattagagatcgacattttgaaaaaagcctggacctggacctggattccatgttggacttggacctggatttcctggacaaaaatccaggaaaatccaggtccaggaaaaatccaggctcctcgagacctggatccaggcctggacctggatttttttaaactcattttaaaaatcaaaaaagtgtttgaaaaattcaattaattgcttgggaacatctaaaaatatctaatttacaataataatttgtttttaaatatatttaatcattttttgaaaacttgaaaaaatatcggtcacttgaaataataaattctaaaattttgtccaggaaaatccaggttttttcctgttttgcctggacctggacctggattttttttcacatttgacctggacctggatttcctggacaaaaatccaggaaaaatccaggttgccgaaaaatgacctggacctggatccaggaaaaatccaggcctggatccaggtccaggccgatctctagtatttatattaaaaaatcaaaaaaaaattcttggctttttaatgcgatttttccataaagaaggtttactctatagcataaaaatttttgaaaagatttttacttgtttgtagatgtaacagatgcaaaagctcacggacaaattccactgaaaataatttaaaatattaataaaataaaaaattaaattaaataattacaaaaaatgctgcgaccagtcgtagacaaatgtaccacaaattttcatcatttttctccaatgtttcattgaatttggatttttgttttcgtgacaaaacaacagcttggacgagcgcattcaaggaaagactacacaggatgagggcttaattaaatttttaaattattattattttatgaaaaattgtttttaaaagcgccaaaagcctcaaaatttggttaatatgtactgaagaagatttacccgatgaaaaataaaattaaaatttcctttatctcgatttttgggttaaaatgtg

SEQ ID NO: 3911 - DNA, 3069 bp, Heterodera glycines
tctctctctctctcttctctctctctctctctttttattttctctatgccttgcgttgcgttcgtccttcacaacgattcggtcgcttttcgtcgtaccccgaggggttttgcgtagaactgtctcgcttttctgcttccacttctaacgtgcacacttttgtctttgcttctctgttctcgctttttctctcctgtggcaacactctctgcgttctctcgcctttccttccgttgtctatctctgcgttctctatctctctcgctctctttcacttctctgtttagaatagggcagagaaatgaatccaacttttgtttttatatgtatttgtattagagatcgacattttgaaaagcctggacctggacctggacctggattccatgttggacctggacctggatttcctggacaaaaatccaggaaaatccaggtccaggaaaaatccaggctcctcgagacctggatccaggcctggacctggatttttttaaactcattttaaaaatcaaaaaagtgtttgaaaaattcaattaattgcttgggaacatctaaaaatatctaatttacaataataatttgtttttaaatatatttaatcattttttgaaaacttgaaaaaatatcggtcacttgaaataataaattctaaaattttgtccaggaaaatccaggttttttcctgttttgcctggacctggacctggattttttttcacatttgacctggacctggatttcctggacaaaaatccaaaatccaggttgtcaaaaaatgacctggacctggatccaggaaaaatccaggcctggatccaggtccaggtcgaactctaatttgtatagtttacactccgccgatggacaattaaatcctccccatttttgctcactgatcaattgctgctgcagatcaattagcgaaaagcaataaatattaaattatatttattaatttaattcaacttcttccgctgattaatgtccaagcactttcacattcattaattatgtgcaaaaaagaaacattgcaaattaagcacatttcaagcgtttccgtggtaaagcagaaaaataaataaatttttcgagaggatcgcaaaaggataaataaaactacgaacaaaaaaaataaaattgtcattttagccaaaaagggtgtgaataagttacaaacgaaaataatcatcaattacttaattaatcagatcttttttcataatagcctaaacgttgagattttatatattttagcttcgttagactcgctgacccacaaaatgtccaggccacgaaatgtccaagtctcgaatttgagttttttattattcggatgggcctaaggttaggcaacgggtaatataaaggttatattcgtattcagcgaccccgaaaaccctaaaaatcctaaattagactcattttgtttttataaattttgaaaaattttggacatttcgtgggtttttactcttttggacatttcgtggcttggacactttgtgggggcgccgttagactttgtgctttcgaatgctaccaaaaagataggggttgttcaaacatgaacaaagttattgtataaagtcaattgattggactcataagtgcactagagccgaaattttaatcatatgaactcgtggtttttgataattttcttcactttttaaaattttgtttatatatatattcagcgaaaaacatgttttctttttcttttaaagatttttcgaaaatttttaaatttaaatttgctgctcgtgtgtttttcgggtccactgcgtttcggcgctggcgtttcggcgccagcatgtttttggctataacttttttctatctaatccaaatccaacattgttgatataattcgaaagcttaacatgtttagaagctttttctaagcgattgcttcgcgattagacaattaccaaaaaagttatacatgaaaatttcgaaaagtcgaaatttttgaagttttttcttaataaaattttttacaggcttgaaaatctatccgctttttgtaaggctaatagagcatgataagagctttcgaatgataccaagattgttggatttggatcagatagaaaaaagttatagccaaaaacgagctggcgccgaaacgccagcgccgaaacgcgtgggtccccctatccattctctctctctctcatttctctccctctctcacttcatgtctcagtcaaattagtgatatataccttatgctaattatggttatatttaattacacttaattgaacctcacattttggtgttcatttatttgcgctccatttgtgccaaaataatataaaattgatgaaaacaaaaggaataaatataatattatcattagggcgtgtaattatatggaaatccatatttttttcctggattattggaggcctgaaacgcacgaaaaacatgtttttagcttggtttgaagcttctaggaaggatttctatatccatattttccatatttttccatatttcgcgatttatgtccatatttccatatttttccatattttggcattttgtccatattttatgtccatattttggcatttttcaaaaaaacctctattagaacggcccccagcagctaaattagcctttttgagcccaaaacccgaaaaatttttcaaaaaatcattttttcgccaaaatttctcgagaatattgaataaatttaaattttcttaaaaattaataaattatgtcaaaaataagcaaaaaagcgaaaatttcgcttttgttgttgattttgcgctaaaaaaattaataaattttagcttttatgttttttttcttttaaaatgattgcacgtaattgccgaaaaaattcgagaccaatttccgaatgttgaccgactaattgcaaaacgaaagccgtctttgtcaaagcgccttaccgagtcaaaaaattttggaaatgtatctcatatgcaatttcaaccaataaatttgaaagaattttacattcaattttgaaaaaattatgtccatattttgacatttttgccatttatgtccatattttcgcgatttttg

SEQ ID NO: 3912 - DNA, 951 bp, Heterodera glycines
tgaatttgttatgtgttagccttctcttttcatccctttacactgtcgctttcctcgggtgccggcgcttccaaacattttttcaaaaattcgcccaaatgcaatggcctgggaaaaaagaaataaaaaaaattttttttttaataagctaatacgtttttgtacggaatgtcctggacattgagtgatggagcaaattaaatgttcaggtcgtcaatttttagcactgtttcggggtcccggcccaacaaattacaaacttaaagaataattttgaaaaaaaagaccttctacgaattttggactcgccatcacttccttggcaatactctcgggaattggctcgccaagtagtccacgcaacacatcgtggacattcgccttctttgtgaagtcaatggccatttctaggcaatcacacgactcgctctgcacccaactctcttggcccctcgcacctaattaataataaacagtgtttacgactctgataaattaaaagcaacaaacattcaaaccccgggctgtttgattatggaggagctattcggtgccaactcgtccataaccaaacacatagaggcaaatatatgagaaaaaatgaaaaaaaatttttttttttaattttcatcccaaccacttacgaagccagtctacgtaatatccgatcctattgttgctatgggtgtaggtcgccaaaacagccttcacgcggtagctgcgctccccttcaagagagcgaatgatcggcggcacattcggggcgctgctggatacagtgatctcaaaatttcgaaaaaaaaatgaaaattttttcctttttttcttactttgggtcgatttagtttattgtagtgtttggtttggcgttttttccgctcgggtgacgcgcatgcatttggcacaatttttggtccacggggtgcgccacccgtccatttgcccatctga

SEQ ID NO: 3913 - DNA, 2675 bp, Heterodera glycines
agtcacccccccctattttccgaaaaatgacgctaataatgtccactatgcgttcacttgttggtcatcgttttatttgtctctatcactctaccctctctttcactctctccctcttccacttttcatttcactctcgctgtctcactctcccacttttaccttcactctctaatgatttctctaaccctagacacaccacacagacacacatgtgcacgcgccgttcctcgctgctgcgctgctgaccaccagcctccccccttccatacaacaaatcattaatcacccaccccctcccccacagaattccattggcaaaaacttttttttggcaaaaaagtttgtgccccccccttccatcaaaagtttcaaaaaaatttccacatatgcaaaagcttcaaaagcgacgccgcctccctcactctcagttctccaaatggaaggcagctttattatgcaccaaagcatcccgaattcccaataatgggtgtgacccatttttaaacatattgctcatttgatgtaccgactaattttctccactatatcacacattaatcattcagaaagatcatatcatatgagcttcaaattcaaaaatttttaatctcgcctaatgatctaagtagccattcacatgcaacggcaaaaaaatttcaaatttctccaatttagtggtcttctataatttaccaattaatcattttgaattacatttatttgccaaatattgtttaatgtgaaggcattgtgaaaattcccattttataaaaattttctagaattaaagctcattattttgtcggctcatcgttcaaaaactgtcgtcgtcatcgtcgtcttccgcctgttcatgtccaccaccatccgctggtacatcgtaaatcacctcacgctgcgcttgcggctccttttaaaaaaaatggtataagaaagggaagcgaagggacttgttgtgtttgtacctggtacggcggcatactgcccaaattcaccggcacgacagatggtggcatcgacgattggcggccccgacttgtccaaactgcgcgcccccagtctgaaattattttaaaatataaaaaaaaaatagtttttacccacccggccaaaattcaccacattggcatcgtttggcgacccacttggttgcgaagagttttgatttcttaatatttgtttgcttaaaattaaaaaaaaaactcactcttctgacgctgctgcaatttccgctggatgacacgatttttgagaatgcgccgcaaaagtgctccaacctgaacagcctaaagaggggagagggttgtgttcaaattgttgggggatgggtggagggggtacctgcgcgatgaacaccaagaagatgaaaagtgtgaggatgaacagcaaaatggaatgtgatgattgaatgggagagggaggagggcaaattgttgcgtttgttgtcgttgtcgtcgatgggaatggtggcgaagtcccctccctcaggtacgctgtcaaattattgacactcgcatgcaaacacaaaataggcttccagtaaacggtggggcctgaaacaattcaggccctcatcgcactgggttgcagtcaaatttaacccagtccatttgggggaaaaataaaaatgtgaaatggcctaggaccgtgggatgatcccccctccccaacatgatcaacaacatttattcatcgcttattttgttcacttctacataatagaccccccccccccccagccagcccctctccattacccatatgtttacggatttgttttggggggggggggcaaaatgtttcagttgaacaaattattcgttaatttattcaccctccccccattgccgataataacccatcgcccttctttttcctttgcaacatatcagcaaaaagaccccccgccccccttcttcattagcaaaaaaaatgatgctgttttggttctctacccttcccttcgggcacaaaatttctctctgactgtctgtctccctactctctcacccctctgtttctttcctctctcgctcactcttctcgctgtctcactctctcacttttcccttcactctcttctctttctcacgcgccgccgttcctcgctgctgcgctgctgaccaccagcctccccccttccatacaacaaatcattaatcacccaccccctcccccacagaattccattggaaaaaacttttttttggaaaaaaagtttgggcccccccttccatcataaattgaaaaaaaatttccacatatgccaaagcctcaaaagcgacgccgcctcccttactctcagacccgtgtgccacacgcgcggaaaaaccgcgagccgcctcccccctcagtctcgtacgaacccctccctcccgaacgaacccgtgccacagtcacgcggtcgagcgataaacccgcgcgcggggggacgcctcaaaggccagctgtcactttgaaagcaatcaatcatgacgacgatatctgtaaactaactactgaaagacataagctaattaacataaattgccgaagcatttaagcacatttgacattcattgtattctctttacattttcattgtaattgatttatttttcccggaagcatcgagccgacactcctccccttttcattaatgattatttaagatgcgatctctccattgatat

SEQ ID NO: 3914 - DNA, 6604 bp, Heterodera glycines
  unsure (1)..(6604): unsure at all n locations
atttatttgttgcgatttctatttgtaatagttttgcatactcttcctgaaataaagccattacagattggaatttgaattggtatgagatggggagggaagtgggattgatcaccccaggaccccctcataaaaatggttggatttgtaagggttgggagtcccaaggcctaattcagcgcgttccactggcatgtgtgttactggtagcaccggatggtttggcatttggcctgggcggctgagggacaacccataggaaaagttagtaagggaaaagcatggaaaaatgatggccattagtgagtgcttcggcaataaaaagaaagtcctccggaggcggtaaaaaggagaaaataaaaagagtaaaaaaaaaaagagaatgccccgacagtctatgaataccctccgggatgcccttcgggatgataaatagaaaaaaatgactttcggaatgcccttcgggatgcccttttggatgagtaaatgcccattaggatgaaaatgtgaaattttgaatgcccttcgggatgaaaaaataatagaagaatgccccgggatgcccttttggatgattaaatgcccattaggatgaaaataagtgaaaattttggatacccttcgggaagacaaatacatgaaaaagaaaattcaggatgcccattaggttgaaaatctgaaaatttgaaaatgcccagtaggaagataaataagtagaaaaataaattatgaattaggaatgcccttttggatgaaaaacgagagatacccttcgggaagaaaaagagaaaaatcgaaaaaaatcaaaattagtcagtcaaaaaaaaagagattaaatgtgaaataaaagcaaaaaaaaaatgaaatacaaatataaaaaaaaatacagtaggtccttcgggaagacaaagagatgattgataaaagatatattaaagaaaaaaaaatacatagaaaattaattttaaaccatatacagtatacaaaaaaaagggggactacagtactcaaaaaaagggggaattttgccggatatgttgatgaacaaagtacgctcgcagtcagcactatcgctttggcccatctgctgagaacattgctcgcttaacgttagcaatgcattttctctcctcctctcttccccccggcgctgttttcctttgttaatcggaagatctgttgcaattcacacatcttctcacagtcatctcttcccttcttcttcttagtcttcttcccccccggcgatgatgggcggaggatggcgtcgcttggccattcatttatgagacgccaataaatatgcggatttacagcacacaattcattcctccaaaacatcattttatttgtgcatttcataaatgtctcttttattaggaattttattaatgtttccaatttaaattaatttgtttttttttcatttttagcaattcaattttcaacttctaaagccaactcttaactgcaaatccttggatattggactcggcatcggcaaccacacttccgacacaacttgacaaggaattggcaaccacattgcgcttcggcatttctctgtgagtttacagtaatgggtactgtaccaattaagtagggaggatttctcatgcctctgggacccatcttggactaaaaaaaaaaaaaaggtgaaactttttacaattcgtaaatcttggtaatcctggtagccctaaaaatttggccaaacaaaaatgccgtttacttaatgatttttggtgataattcggctttcaaattattattaatgggtcacaaatgtgcataataaataatttattttatgctttatgagttatagggatttttaactacggtaaatcgtacgtcaagtaaatgacatttattaaccttttgagcattatttcaggctctacgttttccggattctgttggactgtggattgtggactgaattagcgtttgcttggacagtttggacggacaattgcgcactgcttcggcatttttctgtttctgttcgcctgtgattgaacaaattgaacggattggacggatttctttctgcgcatcggcatttgcaaattgttattggaagcatatttaagtgagtccaattaatccatgacattcaattaattcacccagtgggggggggggggggtgattaattaattaaatggtgtgtacccatgcattttggcttcaatttgatgcatttattaaatttcaaaaatggtaaatacagtaccttttcttcgattaaatcaaatctgtgacaatcaaactaaaaattttttttctctctcttttctgtctgattaattaactgatcaaaaagtcattttgtatcaatgacatgataattttttttcatatcggtttatattgttgtttttatatttttggcgtatttctaataataatttaaagtttgttggcatgaccttaaatactgttttcttccaattttttttaatgggatcattgatcattggcatttattacttaaaaattaattgcttaaacacttaaaattgtaattcattcagacaaccggatcggttatactgtattacaattaacattgtaactcattcaggttttggcattgtgttttgctttggaatttgtcgtcgtcaaggacttgagcagcgtttggattttggatttggagtttgacgcaacagcctttgaacactttgatcttctgtggccaagggttggtcaaatcactgattattgacttaattattcaaattattcaaaataataatacaagacaagactaaacaaaataaataaataaacaaacaaataaataaacaaaagggaaagaaataaaattaaattattgcttcggcaagaaaatggattataatgatttaaatgtttgcgacaagaaactcatggatgggaagatcctcacgaaccaagcaaaattaagtgatgtagggaaagtccatgatgaagtaatacttttagaagatggggtgaaccgaaatttgagaacgattaaccgaaaagtaacaaatgtttcaaatcgagtagttgagattgctagtgatgtaaatgtaggttttaatacagtagcgaaacgggtcgacactttaggggaaatagtcacagaattagacgggaaatttagtacatggaaaaatgagatagatacgagagaacaattagagtttgatgagatgaacaaaacccaagaagcccatgggactgtacctttcccttttagaagacctccagggtctcctagactgaacattccagcaactcctcctgctaatttggcactgattcttcaaatccaagcaccaaataggggtaatgtgaatgcactcactgaagtaggcacttcgggaccacaaccagggctatttaatggtgaaattgcctcggcatttgatgaatgggaaattaaatttagggattatattgatgtttttggtacaaattggaatgaatcagagaaattgaatcgtcttaagctacatttgggaacccaaacacgaaacatttttgaaaatttgcttcaaaatgaaaggaataccctcgccaatgcattgaaaaatatcagagcaaaattggacagtcctcattttcgggaattagcctacagaaaattagcggcatgttatcaaaaggagggagagtcagtaagtgacttcattaagcgcttagttcctcttgtcaacacaacttcagctcaaattccacctgaagcgagagaagagatgatgtgtagatgtctcatagaaaaagtaagacccgaatttcagcgttctttacagcttgtaggaccacttattgggagaaaggactttcagaaactgactgcatacattcaagagttagaagtctcaattgaaagagatgtgagaaatgagagcttcggcattcacgcacttaatacaaatcctagtcaagttccacaaggcaaatttaacacatggggaccttcgaaccctaacaatattcaacttgggcacaaaacatttagaaatgaaaatcgtgatcagtcagataggagacccaatcagttttcacagaataatagatacaatcagcaaagaagggattggggcccacaaaatgatagaagatggaataacagacccgtctgtcattactgtaagaggaccggacacgtacaatacaattgcaggattagacagaatgactttaatgggcaatcggacaatcgtaatcagacacgttggcaacatcggccacaaaattcaaatagggacaattggtccacaaatgagtcaaaacaattaaaagatatggtagaagacttagcagttcaggtgcatgaaatgaaaatgaacaacaattacgcttcggcgagacaacagaacattaaagcattacaaatgattcatacaaatgaagaaatacagaaaattgaaccaagaaaaattttgaacccaaaagtatttcaagttgggagaataagcaagggaaatccaaaacattttcaagcattttaatggctattacgctcttaaacattttaacaactgcaataggcaaacaacaaattttaactgtgaataagcctatgattgccaaacacaaaagcaagcaatgctttgggagctaccaattattcaggggtgtccagcaataaggctaagggtagacaattcacccattactcaaaatcgtcagctgtttatccctaacagcattgaattttcaacaaaagcttgggcttgtaggaaaattaagaaaattgttagaaaatatacaacactaacaggagtaccaatggaagagaagtcagaaccagagaattttgatgtgtctttggatgaatgcagacaaatgatcaagcacaaaagttgcagcttcggcaatttaaaagggatcacaaatttttggcaaactgaaaataaaatagatttaactcccaggttttggctgttagggtcatttggatggaagaatgtctcaagtgaaaactgttttcttttagaaacacgaattgactcgcactttggggctaattcaattgtgactccattgagattgagcgaaactcatgactgtccatacagtaaaggttactgtattttgtctgacaaaacagttttaatttggcaaatagacactgaaaggaagtgtaattttattccaattggaaataaaaatggaaaaatgatggacaaaatttggttatctgatgatggtgagctgggtctatctttcgggaatcaaacgaatttaattgatgtgggcaattcttctcagttagcttctcaattgacttatttggctcaatcattaactcaaccatgagttttgcattttctcaatcacttagacattttgtgagttcattgaggagaatagaagatgggttgaagcctcattcttttcaaatccaacggatttggctagatttactttctctaatccattcatttatgctaaaagagcagcccaaacacttttaaaaatttggccatgcgttcctttggaccaaaaagattatgaatttagaccaaccaaacttcaaaatcaatgtttcgaattcataccaattaatttgaagacgcagggtagggaacattttgctttcattgacccaaagtcaatgataatctctccatcatcaagaaaaggttcctgtgaggaatttagaaaaattataattcaaattgaaggccaaattttagaaattgaccaaatagaaggaaaaattacttcggtaagcccaaataaactgattcatcatgaaataaaatttgggctaaacaatttgcttcctcaaatagaagcacatgcttttcacaaattggttctactaaatctgacagacataaaagatcatgcttttgtgagcaatatggtaaaattgagtcaaatgacttatcagattcatgaaaaggacaccaaaatcacagctacaatttctcaagaatgggaagaggttgaaagccaaatgatcaaagcagtgattggtgattacagaaaaatgtggttaataattatgtctctaattattaccattctgtcaattgacttagcgataagattgacaattggtttaagtgaaatttatgcagggaatgggcgcttaggcaatttattatttggtacaacaattcagaaagctgggaaaagagtaagaaaattgagggaaactaaaattcaagaagaaagagaaatctatgaagaaccaattaatcaaattagttggcctccaagaattagaagagcgggaaattcacttagaaaatctttcaccagaccttttaaaagaaataggcatggaccaaatccaacacaaatgagcactcattttgaattaaattctttgatgggacagcttgggtcgttaaataataatacaatgacagggaccacttttgtctctcttaataatttccaaatgaaatgcttagtggacacaggctcaagcacctcagttgcaccaaaagcgttagctgattacttaggtattaaaacatttanatcagaagcacatttaatgagtgcttccggtcatccagtacatgtcaaagaagctgctcgtgtgactttaaaataggaaatgaatatgtggacataattattcgtctttttgatgatgaacttt

SEQ ID NO: 3915 - DNA, 2257 bp, Heterodera glycines
ctcaaacaatgagttttgcattctctcaatcacttaggacatttgtgagttcattgaggagaatagaagatgggttgaagcctcattcttttcaaatccaacggatttggctaggtttactttttctaatccattcatttatgctaaaagagcagcccaaacgctcttgaaaatttggccatgcgttcctttggaccaaaatgattatgaatttaggccaaccaaacttcaaaatcaatgttttgaattcataccaattaatttgaagacactgaatagggaacattttgcttttattgacccaacgtcaatgatagtctctccctcgtcaagaaaaggtacctgtgaggaatttagaaaaattataattcaaattgaaggccaaattttagaaattgaccaaatagaaggaaaaattacttcggtaagcccaaataaattaaatcatcacgaagtaaaatttgggttcaacaatttgcttcctcaaatagaagcacatgcttttcacaaattagttgtattaaatctaacagacataaaagatcatgcttttgtgagcaacatggtcaaattgagtcaaatgacttatcagattcatgaaaaggacacaaaaatcacaacttcaatttctcaggaatgggaagaggttgaaagccaaatggtcaaagcagttattggtgattacagaaaaatatggttaataattatgtctctaattctcaccattttgtcaattgacttggcgataagattgacaattggtttaagtgaaatttatgcagggaatgggcgcttaggcaatttattatttggtacaacaattcagaaagctgggaaaagagtaagaaaattgagggaaactaaaattcagcaagaaggagaaatctatgaagaaccaattaatcaaattagttggcctccaagaattagaagagcgggaaattcacttagaaaatctttcaccagaccttttaaaagaaataggcatggaccaaatccaacacaaatgagcactcattttgaattaaattctttgatgggacagcttgggtctttaaataataatacaatgacagggaccactctcgtctctcttaataatttccaaatgaaatgcttagtggacacaggctcaagcacctcagttgcaccaaaagcgttagctgattacttaggtattagaacatttaaatctgaggcacatttaatgagtgcttccggtcatccagtgcatgtcaaagaagctgctcgtgttaccttaaaaataggaaatgaatatgtggacataattattcgtctttttgatgatgaactttcatggacaatgaaagattataattttattttgggatgtgatgctcttgcttcactgccgcctattacttttgactttcaaaataaatgtgtaattattacaaatcccacctcaactgtaaaaagaatttttaaaggaacatgcctcggcaattcaaatgaagtcttaaaaacggaaaatagcactatttttactgaaattgagaaagaggacagtgagtatgaattcaatgcattgatagaaaaagaaataaaaattgccattgtgacagcagcaaatttgccacttgcaaaattagtccaagaattgaatgatgtatttggttctgatgagatggaagaatcaggttcagttgcattcttctcgggttatgccaaagaaaagtacaaagaaatgttagaaaagttgaaaaggcatttgttgatttccaaaatttcgaacgaagaaataataagcaagtttgagacacaagacgatgtgaaggaaattgagacttattgtaagaatttcgaagttcgaccacgcttaacaaaagaacgaaaagtagcgaatttgtactcagaagttgcggatttgcggattgtcttcaccacagtgtcgatggcagaaaatctgattcacacagctttagacggcacaacagtcttaatctttgatgaagctactcaggggtcatgggtctgcttagcacatttagtagccagaatgccaaaattggagaaagtcttggtaactggtgaccaattgcagcttggtgttcatctgcagaaactcccgcctttgctacaatccggttttggtcttgaatcaatggttgatcagttgatcctgtctccgacagttgttcaaactcgtctaacgacttgttacagaatgcatccgacactggtgaaagcagttgcttcggcagtatatgagccaaatgagaaaaattcgaaccag

SEQ ID NO: 3916 - DNA, 7244 bp, Heterodera glycines
ttacgaccaaaaattatcaaataattagtcttattgccatatatcattgttggcatatttatacatcatttataaattatttaaaatattctttatattcatcccctataattgttcttaatataaaatgcttccgttcttagatcgcttgccagccgtcaaatggcaaaacgaagaaggcacagacaaagaaaattatgaaaaagatgaagagtttagtttatgcctaaaataattcttttaaaaaattattgttcatgatctatgtgttttaaaatatttatttgctttttttaatatacattccaccgtaaatttaaaatataaatttttttcgttgtcattttttctgataaataaaacatttttctaatatttaatttataatataaaatgtgtctttaatttcctctgaacattttttatttaattaatttaatcgttaatatgtttgtattaaaccaagaccagtcacgctaaatagaccattgatcccaaataatttatttttattgatattaatatatttatgggctaccttaaataatatatttttataataaataaaattataataatgcttttctaaaattgatttattaatgaaaattagactttataataccatttccttcagttttaatgaccacaacaatattcattatactaaattatttttaatgattttagttataatttttcttcttcataactcgatcttaaatatttaataataaagacacatttaattaaagtttttaaataaatattgaaagtaaaatggttaaaaaatattattgaaataatattatttgttttacatctgactaactattaatgtgtttctgtttctcttgccgtttgttttcgcatatttgccagatttgttgtgtgaacctctcatcatccgcctttttgaggaaggatttgaatacctcaagaccatactacgactttaatttattaatttgaaacattatgaaagtttatcttttattttgtataatttttcgaataaaatatattaatattaagattatttgtaataaagaattttttatggattatcctaaaatggagtattaaatttttttaaattatagtttaaaaactttgttttaatattaaatttagcaatttgaattattgcttttgcgattaatttggcatatttttagtttactctagatgtccgcaacttggtcggctgtcatgttctttgaaaagctttctatgtttggatttggcattttttcacttattatttaataatggcatttattttatatattttttaaatttgatgaattacttgaatttcttccaagttctttcgatttcatatatgacaaatatttttttgttagtcaatttatatatttagtttagaaagtattttgctttattaatttattgcaataaccaaagacagagaagtcaaattttaaaccatttaaacttcgatattttagtttggtaatttttcatggcgtaaattcaaatgttctatcggaaactcaatgaacacacatacaactataattaaagttggcagaaatttataaatttttatttaacctgatactatttagcaaaactattattttttgcatgtttaattatatcttttctatcataatactgttacttttaacgacctttagcgatgtttaagagtatttattagaatttgagttttaattggatcttgaaactttacttttttgtctaaatattttttatgtattatatcgtaaaatttattttattggttttgtatgctttttaaatttttttaaacccttttagggagttataatatattattttcggttccagcattgtcccgaaggaggcaacagcaatttagtggcattaggaaaatttgggaatatcatgaaatgaatctttaactaaatttcaaatgtcatattcgttaaatatattttaggtctcatttctttaagttttcttttttagaaaatcatatgtgaattttatttaaacgagttttttatttctagtgtaattttttattttcatataaaatctaaagttgtttagaattatttattcaaactacctaatacaaagaatagattaaaataaatgtttttaaatttttaaaaaattttattatcaaggaaccattaaatgcaactctttagaataagtaaatttgtgaaaaattggaggcaagaacaaaaatcttaatttttttatgagaccactttttttatttgatcgttcctcattaaaatttacctttataagatgatataaaaattttatataaaattgaacaatttttaaattttaatttaagtcatatttttaggtgtcaaactgtgataatcgaatacccacgatatttttttcgcctattattattaatggaaatttcaaaattttgattttaaatctgataccttacaataaatgaattccgatttcattttgacagttgtagctgtattacttttaaggtttaatttttataataattatgaagcttaacacggcgccggtgccagcaaaggcggcggttgaccccattgaaaattgccgtttgtgggggtgtgagccgaagtgggggaggtgtgctggggtcaccaaatcgatgtccatatcgattctcgccctccacgagccgctccaccaaccttccaacttatcgagccgttcgatgattgagttcagtgtgggattccctgaaccttctaacaacttttcaagccggtaaagacgggcgagaatgtcctctccctcatttaaagttggggaattttgccgacgtttttttttagcaaaaatttatatttttagaaaccgacttattataagtaaaaaaatcttcttgcattaaattttaaaataaaatcattattctttttacttttatcaaactaatcatttattataattttgattaaaaaaattttaaattaatttcttctgtaatttgcgatttaaatattttattttaattcatttatacccacttttctacaatttattaattttcataaactttttttcatgaatttattaaatctttcatgattatttattattatttttagagttttaattttcgcgctcttcgcgacactcccaaatttaatttttcaataatttaatttgtttttgtttataaattagtgaatcatttaaattaataatatatattttgagttaatttctttttgataaagttttatttcagttttcccatattttttaaataggatattttgatgaagtagttttattgctttttcttttttaatgtttatgaatatttttgtataattatattaactccgttttattgatggcataaattattcggacataattattttaaaattaatatacctaatttacatcaaaaaatggaaataaaaaaagattaattcattgtggacgtggtaatttattcaatataaatatgtattttaccatatttctcatatttaaaaaatataaattcatttatttttttggttaaaacttaagttaataattaatataagtaataaattctacaaattgtaagaaataacacaatgggcggacacaaactagtggggctcattgcaatggtatacggatactaaagaaataaaaatatatgaaaaaggaatatattaaagaaaaattattcaggttgtcatttttatcggtatttgatcaaaaaattcttagctacataaaatttacaaattatttctttagagaaagaatttttacaaaaattcgaatagttattagttttaaaataggaattataatacccaaaaattatagtcaatcattttttaaatgtatgattaaggaaagttaattccgtccaattgatccaccttgtttcatatccaagccttcatccttggttctatttttaaaaaataaagatttctgaatattttattttttatatttaatattttattgctttaggttttaattactttttttaacttttgctcaataaactcacttattgtatgtttcctcaggtatgtttttagctgggtcaaaaaagatactatcattttactagttattcacgtattaaaaattagccttgtgaaatgttttcttgttaatggcattttcaaagcatgttactgtacttaaggatcaattactttttagaaaaaaatattattttatttgtattactcgtatttcgttataatttttttaaattacatttatgaccgttcttttttcgatttcggatttcggccgagtgaatttttcaatatttctgcattattattaaataattttttctttgcttttttgttttttaattttcttgttggcttctagctttacgtagttcattgaagaaaaaagtttttattattagtatgctattgataaacattgttggagacacctatttaagagattttcgacaaatattttatttaatttttattttaacgtgtaaattataatttcagtgtttttttataaacataggaagaatttttgcagcatttaatacacaattgacgtaattaatattcctttacttctatagattctttaatttctttttcttattaatgcaactatcctgcataaatgttccttatttttttgaaagtgattaactaatttttttaataacttcatttttctatgataaaaagccatatatctatatatttaaaaaaaaagtctaatctttcaaagatcattttattttgataaaacttcggtgtttttaccattacggtttactattaatttacagtttttgggtgatattaaactaatataattaatataaaatatttaataatttggagaagaaaatgcaatattttttatttgatttgtataaaataatcagtcattgtgaaatttcaaattgtttcatttcagcctatttttattattttctaaattttttatatttaattttttttcaaataaattgcaatcactaatatataaaaagcctttaatatctacttttcttgacaagggggattgcgtattttttttcagctgcatcgaagtcctattttgataaatttggttaaataatcacttgtaatattttaaaaaacattcattgtataatattttagttgttccattctttggtattgttaatgaaataattaatttaattttcattgaaaattttaaataaaattatttacacgtttatatattaattttttgtaatgcattttcattcttttttcttctgtttttattagtcatatacatattctctaatcatttatgacaaattgaattgaagtaataattatttacccattgaattaattttttggcttcagtccgcaaaatttatatttatgtgattaaaaaacacattttaaattgacaaacaaactcctttatgcgaattctatcattattcttgattctatatggtcgtcctcggagctggtgctaggtcgtttcttaaattccgccagggcgtttcttaaatccgccagggcgtttcttaaatccgccaaggggtagaaaaacaaaaaatgtaagacatataaattcataactcggcttaaattcaattaaattaataattctcggtatcattcaatagctctagacgttctctaacggaatattaatttaaaaatttttttaataaaattttcaaaagttatggatttatatgttcaaaaaatcttgagtcagaatttttggccataacttttttgaaactcaatgaatttttttgaaattttaaagataaatagattaaatagtggacttgaaattctaaaaagaaaatttaattttattgcttctgaaaaaagttataagcattgaacaggctatgttttttgccagggtcatgcatatatatttatggattttaaagtccttaaaatgattattcagccaaaatgaatttatattcgatagccctaagaattctctattaaacattaaaatttcaaaaaatttcattgagtttcaaaaaacttatggccaaaaattctgactcaagattttttgaaattttctgaccataactttttgaaaattttattaaaaaaattttaaaattaatattccgttagagaacatctagagctattgaatgataccaagaattattaatttgattgaatttaagccaagttatgaatttatatgtcttacatttttcgttttcctaccccttggcggatttaagaaacgccgaatgtggcggaatttaagaaacgacccagcacgcaaaatgttttcttctacatatttctaaatttgattttttggaaatcaatgaaattcctctcccctccccctccctccgtcgtgtgttgtcccaccatttcctccgataaggaacgaccaccaccaccaaaagcggtggtggaagaaggttaagccgccttctcaccccccccccctttttgttgtcccatcttttttactcttcctcctccttttttctgtttttcacttccttccttgttcccatttgttgttcttcttcctcttccttctcctcctcttctttggtccgtccgtctttgatgaaaggatggaataattgggagcaaatggcggacggaacaaacggacgaacgaacacttttggaaggcaaggggggggcaaaaaaaagtgggggggggggggtgactaaaaaatatggaaaagcaaagcgccagagaaaggcaaaagcggtgccaactcagcgccaaatgtcagccagttcagcaggactcatttatttgccttgttttgtccgtccgttgttccgtccgtccccctcagaacgtatggttaagccgatcaaattgagtgtgtctcaaatttactgtgttttgttttatcttcttggctactgattaaatagactaaaacacatttcttgtttaaacaaatcattttgcttaattttagaaatttttggaattttttgctaaatttcggcacatactaatcccttgcacctaaaatcctctttccctagtaaaaggttcaaaaacagtgaatgatcaaaacataccaaaggttggtcttgtgcaaaatgtgcaaaatctcggcggaagaaaaaaacattagtgctgaacagtccagcgatgaatttccatcccgcgctttccgccgatgggaagcgatgtgtcgggggaggggggagtaaaaaaaaacacacatttgtttacggaaaacttcgggacattttgactgggaaaatgggtggttggagcgaaaagtgggggggggg

SEQ ID NO: 3917 - DNA, 1746 bp, Heterodera glycines
tatgtccttacatttcttactttctttacaagtgatctatttttaagctccgtaacgaagtatacaatatgccactgtaatatattttttcttttaataaatgaaacatatattgttatagttttaaaatatttattagtaaagaagaagaaatcaattaaatacgtattttataaaaaagtttttgtattatgatcttccaaaatttagattttataatttaaatatatcttttaattgacgggaaatggcttgtcgaggttatacttttatggcaaatttggcggtctctattcgttcgacataaatttccgaccttgtgatcccctctcaatttttatttatattttatttaatttgacgtttgacattctctttttaaattctgttttcatattccagtattatttttcgtgaagataaataaatccaaagagagttgatttaccttgtttttcaaaatccaaatttgatgtgcataaagagattaaagttaaatttaaacaaaaaatttcataaatttcataaattttattatttatttcatttcaaaaaaacatttctgtattaaaatggaaattttaagaatatcggttaattattcggtttatttttataagttttccatgattaaatatatttgcaatcagaactaaagatttttaagctctggattacaaatctcatgtatccgtgcgttatgcagcaagcgctataaattttttggcgattcagtgcttttacattttaatatatgttgaaattttgtaaaaataaattatgaaaaatatttaatttttgattttaaaataaattataattatattattaaaattgacaatattcatattacaataacatgaagcatataacactgttcatttgcattgtcaataaatcattaagcaaaatcaaattatgaaatataagactaaaattttgcttgaaatttaatatgaaaagaagaatttgattataaattctaattacagagttaagttaaaattaaattttaattttttatacaacgaaaatatttttaaattttttataatgttttttagttaccagacttatcgcgaatttgtcctttaacatgtacaatctggagttcaatgtataatattcttttttgtatatatgagaaggtataaatattgtttttctatttttaaaatattttaattttgctcttttcactaaaacttattatttgatctttttaaataagcaaattattattttttttaaataaactgatttttattatttatcattaagaacctagcagacagtataatttcttgaatgtgaaggaatttaggcgtgaaaatgcatgataaaatccgaaaattaactgaatatacaaattacaataatattcgataaaatctcgaaaaatattatgcaaataatatagcaaactaatgttttgttataaacttaaaaaccaaaaatatgaaaaccaaacaactacttgtcataaagattactaacaaatgagaagttaaatttaaaaaataaatattatattgcgaattgaataaatgctataataacctataaaaattttatttattaaataacacccattaagtaaaaataatatttacaatattaatatttattcaactaaacatttacattattcgagaaaaaaatttatcgtatgcaaaattaaattgattctattcatcttccattagataaaggtgattctgtaagaaaaatacaagaaaatgaaaa

SEQ ID NO: 3918 - DNA, 2415 bp, Heterodera glycines
  unsure (1)..(2415): unsure at all n locations
ccataattagtttgagtaccccaaacggacacttgaaactatcgatttttttatttcataaatattttttcagaaaatgctctgaaacaaaaaattttcaaaattctgagtctcctattattttatttttttttcaaaattttgaagggcgggggggggggcgacataagggatataaacatgaaaatagactttttatcaaatcgagtgcatggttagtgctctatttcaaaggggatatattttttattaatgattatagattatttatttattttttctccttccatgctgtacggacgggcatttagcagaaattttactaattaaccacaaaatttattgtttattttttcggaattagagaatggcattaaacccaaatttgattacacgcggacttaagcattcttaaaagtctataatttaagccaagcggtccgccacttttgaattatgtgtgtaagtcaaatgggaacagtgaaagaaggcacatttcgtttcttaaccaatttgatttgcaaattgtgccgacaattccaaaagatgacgacagcatttattacgtggagacacaatgccataataagggaaatgaacatcaaacattcaaatcggtgacaagtggcagcattaaaattgttttgcacaaatttgcttgtaaatcgtacgacattatggcacgaaaagtgccgaaaaattggacccagcaaattgaattggtaatgtgatttatataaaattaaaaatttataaaaaaaaatagaggcaatcgcaagatttcttaattgcatttatatttttcgaaatttaattgactgatttttataattatgctaatttaataatttgttcttttgctttaaagtataaatatgcaattcgtcaaataaaagatgccaccgaattaaatgtcaatattgataatggatatgtgtacatttttgattatgaaacactggtccggacaaaccgcagatggagaaacgctgggccttcatcggtaatctttaatgtttattttaataaaatttcgttctgctatccattaacgaaagcggttttaataactcttaattgttctaatttggtaaccttgaaaagttggtatttgcgttaatttttctttatgatttttttttcgtttttgtaaaattttgcctattttaagaatgtcaatctttttgatttgaacgtggaagattatgttgcatcagattatgataaaatggaagaggaagacagaaaagaaacggaattaaataaagcaagaatggatgaaacggatgatgattgtttttactatttcaattaaatttgtatctttttcatgccttttctaaatgaataattttaggataaaatggtaaaaaaaatttaatctttggttaatatttttttttactaaaagcattggtcacattcacaaaaaaaaattgacaaataaaaaaagcttttgcttctgtggcttcatctcctacgcttgcttctgaatgttaagtgttgttttggcggccgatcagtgcctccccgttgatcaatccccgagtgcgtcacgaaccgcctaccatcatggtaaaaaaaccatgttaaatgactacgtggtcgggaggggtcggtttagtctggccgttttagtcagagggttggtttagtctggccgttttagtcagggggtcgttttagtctggttagctgttttcacccacaaanttaattactttttataaatttcttttgtttgtcaatcatatacataaacataactttaaaatgtctgtttagctacaaatcaaatggaaaactccaatcaggaaataaagacaaagcgaaacaagcagaagctggaacatgagggtgcactttatgttcttcaccaactcagtgacgatggacttcggaagtactggcgatgcgagtttttcgggcctaacgataaatgcaaaggtgtatgcaaaaataaaataaagactatttttcaaatttagggcgccttcacactgatattcatggtaatgtcctcaaaataattggaagccacacatgcgacatgagcgccgcacaagtggagtgtcagcgacgtgtgacccagctcaagcgacgtgcagttgagacgtgcgaagcgccggctactattcgtgcgcaagtattgcataacacagcaacccccgtgttggcagcttttccgaccaaagctgcgacaaaaaaggtcaacgtttgcaaatttttatgccaaaatttgatttttttttcctttgctttaagttataaaacgtgttcgtcgtgacgaagatgtaccacctgctgcaccattcagtttggaagcattggaatggccgccctcgtacagaatgtacagtcgaacagagactggcggggagaattttttgttggcagataccggcgtttttcaaa

SEQ ID NO: 3919 - DNA, 4789 bp, Heterodera glycines
  unsure (1)..(4789): unsure at all n locations
tgttcgggtggacnccgataagacattatttattaaatttgtttcatttccatttattgtttgtgtctgacctttcactgtcagacacattctattgattgtatttgtgaccatttgccctcccctcttttcattcattcagtttatgatatttgtgttcacattttccaattgtctcctccgccgtcctccgacatatttatttgttattttaatttgtcttcaataaatatttatttgttcgtccattcgacatttcggggaccgaacaaattggcgacgccctacatttgagctcagcgcctatttgaataaattgctgagtgcaatttattgaatttgtctgcaaaaaaaggtcggccaggaggcaccattattttcaacaagccaaattcgtcgatccgattaatccgccaggcgcggttaatcgtggaatttctacaaaaaaaaacccagataccaatacggttgcggtttccgccaggcgcggttttattcgacacaaaaaccaagaaacctaggcggttgaggttccgccaggagcggttattcgacgaaaatggccaaccaaaacgcgacaattcaacaattgattgacacattgacgcaacagcaacaattggttcagcaattgctgacacatcaaacgcagaatttggctggacaagcaattgcgcccacaacaattccggcacttcccgacatcatggcttttgagcagaatgatgataaaagccgagtatcggaatggatctcgcgcttcaaatttgcacttgactgtgccgcgccgaatgccgccgacggaatcaaggttaaggcgctcatgaacaagcttagtgaagcagcgttcagtgagtacagccgttcggtgctgccgtcagcagtgactgattttaattttgatgcgacagtgcaaagaatggaaaagttatttgcgcgtccgcaatcggtcttcattgatcgatatgagtgcttgaaagcggtgagaagtgaaggcgaagattttcgcagcttcatcaaccgacaccgaaaattgctcgccgatttcaagttcagtgaactgaacaaagagcaattcaattgcctaatgctattaactgcattaaaatcgcacagcgattcggctcttcgtcaaaggattttggcgaagctgtcagcggacggaacaaacatcacttacgacggagttgtggaagacctgattaatttccaggcaacaattgtggaggcaaaagcaattgaagcaccgacaaattggaggaatgtgaatgccgtaaatcggccggtgaagcaaaacaacgcgccgaaaatgcaagttgccaaagtgccagagaatcggcaggcgaataagaattgctggcgttgtggagctaccgatcattggggcagcgagtgccgattcattggagcgaaatgccgaaagtgcaaattcacaggtcacattgaaaggcaatgtgaaagtgtgcagcaatggcgtttgaagaacaaaggcaagaggtttggcaacaaaagaattggccaattacaaatcggtatggtaaatccgaaaaatgacaccgattcgctgaagacgaaaattcggttcaacaaaaagccgattcaatttgcactagacactggatcggatgtgaacgtcattgatgttgactcacatgtggaggctgggagcccaccgatcgaaaagtgcactgaaattggaagagctttcgatggaacgccgattcgattcatcggaaaaggctttggcacatttgaatttggaggaattttgatcgagaatgaaccattttatgtggcaaagcgtggatcgcttaatttgttgagccgccaaacaatgggaaaatttggatttttggatggtattaagcagcggatcagcgaacatgggatcaattcatgcagagccaccaaccaatttgagaagcacatttcggaattgaggaaagaattcccgactgttttcgaagatgcacttggacattacatcaaagaaaaagcgcacctcgaattgaaaggaggagccgcgccaatttacagaaaggccagaccggtgccacatcactcaaaagacgtcatcgaacgtgaattggaccggctggagggcctcggaatcattcgaaaagtcgaacatttggattgggccgcaccaattttggtagtgaaaaaggcggatggaagtgcccgcctctgcatcgattattcaacggggttgaatgatgcattaatcgactaccagcacccgctcccaattccggaggacattttcgcgacgttaaatggaggacaattcttttcgcagattgacctcaaagacgcgtacttccaggtggaattggatgaggactcgaagaaattgtgcggactttcaacacacaaaggcaatttcgccatggaacgtttaccgttcggcgtaaaatcggcgccaagcatttttcagtctattatggacaaaatgctcgcaggcttaaattttgccacggcttatttggacgatattatcgtcgccagccgatcattctccgatcacatccagcatttgaaagatgtgttcaaccggctgcagtcatacggattccgtgtcaaaatgacgaagtgctcatttttccaggaggaaattaagtaccttggattcgtcatcgacaaaaacggacgcaggccggacgcatcaaagattaaggcaattactgaaatgcctgcgccaacgaatctttctacattgcggtcctttctgggaatggtaaaccattaccagcaatttgtgcaaaacatgcggttcgtcagaaaaccgctcgacgatttgctaaagaaggacgcagaatggatttgggccgaaaattgtcgtaaagcatttgataaattgaaggagattttgacttcaaatttgctgctgactcattacgacccgaatttggagatcatcgtttcggccgatgcatcagaacacgggatcggagcagttattgcacatcgttttcctgatggagcgatcaaggccatcgcacatgcatccaaatccctcaatgctgctgagaaaaattatgcccagattgagaaggaaggattggcattaatttttgcggtgcaaaaatttcataaaatgatttatggccgtaaatttgtccttcaaacggaccataaaccactcctggccatttttggaaacaaaaaggggatcaggcagtgcagcgccaatcgattaattcgttggtcgctgatactattggcctatgattttgaaatcgaatatttgaataccaaagattttggccacgcggatgccctttcaagattgatcgcgaaaggatccgacgacgaagatgagcgagtgatcgcttccgtcacagaagagtcggaaatggaagaccttctaaaattggccactaaaaatttgccgattaaatttcatgatttggttttggcaaccaaaaacgatgctttgctgaaaaaggtcgttcaatttgtgcaaaaaggctggccaaacgacaaagatttgagcaaagaagaggaaattgtccgattatttcaccgacggatggctgatttgtcaatcctcaaggattgtttgatgtatggcgaaagagtggtgatcccgaagattttccaaagcaaaattcttcacctctttcacaaaggccatccaggaatgaagagaatgaagcaattggcgcgtcagtatgtattttggccaaagatggaccaaaacatcgaacaatttgtgcaaaattgcgagccttgccaagctgcggcaaaggcgccggtcaaatcgaaccttcattcgtggccaaagtcaacagaaccctggcaaagaattcacatcgactacgccgggccattttatggaaaaatgttcctaattgtggtggattcgttctcaaagtatccagaagtatttgagatgaccacgtcttcggccacggcaacaattgacaaattgagatatttgttcacgcgccacggcattcctgaaacaattgtttcagacaatggaactcaattttcgagttcagaatttgccaaatttacagcagccaacggcatcacccatctcttttctgccccgtataatccgatgtcaaacggacaggcagaaagatttgtggacacatttaagcgggctttccgaaaattgaaaggggaaggaatgccgaatcaggagatcatcgaaacttttctgatcacctacaggacaactccgaacgattcgcttccaaattcggtgtccccagctgaaatgctgcttggacgaaagcccaggactacatttgatttgttgaagccgccgccatttcgaccactgatcagggatttggcgatggaagagagattcaacaaacgatttggcaccaaatcacggaaatttgaaattggtgataagatctttgcgaggcatcgatcttctgaagattggagacccggagtcatcaagggatgctctggcgtcatatttgaagtgaaattcatggacggatcaaagtcgcgattccatgcgaatcagctgcgaaaccgacaaaatatgaacaatggcgatgaagcattggcgatcttgaatgatgcctttgcattgccattgccacctgcacaggctaatgaggtgccagcagcagacccgccggcagatgaccacgaaggcaatggactcgaagaccaaggcattgtgcgatcgccactgatcgcggaccgaaatcagcgccggtatccgcatcgccaacgccgtgcacccatccgctactcgcccagctgatcagtgatcaccggacgagccaaaagggggaggtgttcgggtgggacc

SEQ ID NO: 3920 - DNA, 1519 bp, Heterodera glycines
cccccccccccccccccctgggggaccgtcctggacggcgggagggatttcgtgtaaaacacgatcctggcgggatcaaaaagcctgatttgggattttatttgtaagtcggaagagatctctggaccttttttaagagaaaagaaactacaagatatttctagtgatgctcgagaaactcgtacccgagtatcaattagataaaagtctcagatttttgggattcggtcagtctcgtgaaattccataaactccactgacacctggccatcctcctttgtcagtaaaaagatttttaaattaatttaattattaaacaaatatataaatacaggtaatataaatgtaatgcccaaatttttctcgacgtcgtgtctgccggcgtaacaagaccaaactttcgtctttttcatcttttttctcatttcaactttcactgattctatatggtcggattctgtttgatatttttcctaatttttaaaaccaattttttctctgcccactcactttttcaaaagctattcccgaattgaagtcgagaaggacgaaaagggagaagaggacggtgaccataagctgaagcgagtcggcgatgctcaaagcgaacattaagcgaaagcaaattcgggagcgaaattcgcgcacagacaaaaaaagcttaaaaatagaaaatgcacaattaaaatgaatatttaaatcaattaaataataaaataaaagacaagaccggaagtgtgaacagatggagcaacaaaagagggaatgccacgagcaattggaaggaggcgaccagttccgccttcatttgacagtcaacaggatgccaacttttggcttttcacctaaaaatctgtgcactgagtgccgtctaagattgtcaaaatcaaagaatgcaaacactccgttcttaaaaagtgaattattagcatttaatagaccgcgattaataaatcaaaaccaaattatggggaatggatcgtctagttcaagttttttggcaattatcatgttatacattgctggcaccaaaaattgctcctaattatgccgccacccttctgaaaagaattaagaaaaataaatgaatcaaaatcaaagaatgcaaacacaccgttcttaaatgtgaagcagccctgttcatcggtttacttcaattgggccccccaggctgagccccgaagggtcttggattataacgttttaatttgtcgaccaaatccaataatcttggtatttccaaaagcttaacatgtttagaagctatttctaagctcacaaagtacataaactgtatttgccttacaaaaagcataaaaatttttctagcatgccaaaaagttactaattaaaacccataaatatcgagctttcgaaattcgaataatatcaaaattgttggaattggtcgacaaagaaaaaagttatagtgctggcgccaaaacgacccccattccaaagtgtgcccccccccactctctgtcaatgtgtgcatactgtagttgatcaagtactgtga

SEQ ID NO: 3921 - DNA, 3119 bp, Heterodera glycines
  unsure (1)..(3119): unsure at all n locations
gccctttagcactctccgctgtttgatggctattgggacagaagttccaaccgttctgctgcttgttgtactaaaaggaagttttccgtctgcttttgccttgcctaatggtcgttcacttgggatgtcgttcagtttgtgcctttcctgctccaatttctgcctcaattcctccgcttcccgtgccaatgcgtcgatttggtcgcacaaaaaaagcgcagaatacttttgcactgtttgggttttaattaggttaatttcaaatcaatgcctgatgaactcaccagggttttattgttgatagtcaccctatttgtctccaccaaaatttccccatctttactccaagtaattgtcggtgacggttcgccctttaatatagtaattttaaacaaaaatcactaatttcccaacctcaaagtgagttcggactgtgacactatagtctgaaccaagtttagagcatcataacttttttctttactgaccaaatccaacaaagttgatatcattcgaaagctcttaacaagctctatcagctccccaaaaatcgcaaagatataccgacatgtaaaaaagtttaaattaaaatatgcaaaaattctaacttttgtgcagtattaatgttgcaactttttcatgtttttcaatcgcttagaaatagcttatcaacagcttctaaacatatagggctttagaatgatgcgaaatttataaaatttggccagctgagaaaaaagttatgatactttaaacttggctcagactataacggccagactatagtgtccccaccccttatccatcaaagtgtgtgtgccctgctgtccgtctccctctccctcttccccactctcttccgccgttgatggcaatggcgaaggaaatggcggaatgacgccgctttttccagtacaaatttttaccttgtcaatgccatcaatgtattattgttttcgttccaattcccttcttacatttacaattgtttttctttcattgccattttcggccgatgaaatttctgacgacgaaacaatcgaagcgatcggacgcggtttgcccatttgggtgccacttttgacattacgaactgagcttgggggagccgatgttgagcttaatggacgatgggagagaagtcgaatcactcacaattgccactggcaattcgattatttttaaaaatgccaatggcaattcgattaattatttgaaatgccaatgaatcgtttctctctcacttcgacttgggcactgctgccgttgttctgttgttggttgtgttcggtttgaacgtgtgtttgtgcgccagtgactttttcccctttttttctcccccttttcctctgattttcgtcgtctttcgttttgtcgtccctttggtcgcttcttctgttgttgtcgttgttattgtcgttgcttttgtcgttgtcgtttccgttgttgttgcttcagttgttgttgttgttgtgctgctcaccgtttgtgttggttttgcggtggacactgaaaatggcactcttttcatcgttttcttctcttttcatcgttttcttctcttttcatcgttttcttctcttttcatcgttttcttctcttttcatccttttcttttcttcccaattaacccccttttttcctccctttttcctcctcttcctcttacccccgccctcttttgaccgaccattccatgccttccgttcttctccaaattggccaaatctctgcaggacttcgtccgccaccactttcaccgcttcccacgtctcttctgccgtgtccataatttcggcctcgggtagtaaaaatcccgtgctgtgcaaagtgttctgaggtcgaagttcgatgagaaatgagtacggaatgttcagagagcccttggcaaagtcatgagaagcgccggaagcctcgtctgaagagaaaatgctggcaaattgtaagaagacataatcactcacagagaaggtccgctccggagcccacttggtacttagtgctgtaaagccgcttcagcgcctgaacagcgcgaagcgaaagagggcgctgaattgggaaaagggttacggcggtgaaaaacgacttttgcgaagaatgttcgaattgcccccggggggggggggaggggcaggccaaaaggcgcgcaatgcagcgaatcggtcggtccgttcgccaattacccgcccctctccccaaccagtttgttcactcttccccccgtccttccacgtacccaaaagcgttcacccatcanaagcacgaccattaattagttttggtttcctcccccccaaaatcgcagacgccatccttaatccgttagaggggggggggggggtattggcgaccgactgatcggtcgctctttgatcggtcggctttctttgactcgttaaaagcagaagcatttgactgatctcccacaaaagggactccgttgttgcgaatgttcgcaatttttattatgcataaatcgcaattgacttttccttctgccagcattaatttcatttcaacaaattttgttccagttttttaattggccaattaaaaacaataattttgacttaggacaaagagaattccctcggcgtaatgaaagtgtacaccgccactttcctcgcctcctccgtctcgggcatttccctgctcgcctctcttgtactgatcgccaacatttacagcgatgttcaacaaatttggcaagagttggaccaacaaatcgctgggttccgtgccgaaactgacgacctttgggtggacatgatgaagttgggcaagaagttgcgcgtccgcgcccgccgtgacgccggctacgcgggcgcagaaagcgcacccaaagcgaatgcgcccgtcggtgttgcaccctcggcgcgtaagaacgaatctttgcacttccaaatagtttctttgttatttaagctgtttctggcactggtcccagtggaaatgcccctggcattcccccaggcggcgcttcacccccaagcgttccgccgagcattcaaacaaacggaccgggaggtgccggatgcagtaagtggtattcaccatcatcaaaaccagaaacttaaaacagacttcgtacatatctgtggcggcaatgactctagagg

SEQ ID NO: 3922 - DNA, 1152 bp, Heterodera glycines
gatggtgggtgggcgcaccagagcgaaaaagatgctgatcctctatcatcatagcttcaattgcccggctggcccgcaaggacaaccgggcccaatcggacggacgggcccaaagggacacccgggagcaaagggacagcccggacacggaggacgggacgggaaccctgggccacccggcgaatcgggtgcccctgggcctgctggccaagtgggacctcccggactgcccggagagaaagggcgtgacacagagcagcaaatcgggcgccaaggacctcgtggtccgcgcgggttgcaaggcgcagaaggaatagccggagagtccgggctaaacgccccgccgggactgcccggacccgcgggggaggcggggacgcaaggagtgccgggagtgcagggagcacaaggaaggcccggcgaggaaggaccgacgggacggccggggccagacgcagagtattgcccgtgcccacagcgatcgggctgagagaaatgggagagaaaggaaaacgaacggacgaacgaacgatcagatcatgtgccaaccaacatcaaataaaaaccgacaaataaatcacttcctttaccaaatttcccacctgaatttttgtgtaatcctccgggtaattgcgtcgtttgtgcccgtagggaatcagccaaagttgggagtacgaatggagcgtgaaaaaggccttcaccgaatgatcctcgagaaagtcgcggacggacctaatttggggaataagtcactaaacagaccgtgcagggctaggcttttgagagattggattgtgctacaaataaatgaaaacattttaaagtggcgcttaatggtccgacgaacaaatccgtattttgttgtaaaatcgaacagtttctcttaatgaccttgcttcgggctcactgaatgctgaggggccgtggtatgtctcatggcacgggtcggcactcgaaccggtggctgaacggagagaaagtgccacggaatggaaaggaaaagactcactggaccaaaaccagtcgaagttacggttgaggtccactcccgagcagcaaattcggttgaaatattgctgcctacaaaatgcgggtcgtctgttcttgcgccacattcggttcttaaaggagggggggggagatggaaggcca

SEQ ID NO: 3923 - DNA, 2092 bp, Heterodera glycines
ctctagagtctgcaatttgaaatatttattttaatctatcggatttcaataattacccgcgaaaactctttttggccgccatctcttctaaaaagtgccgcctttcttcgtcctttggcattccgtgccgttcgccgtcgccatcggtcaaagggtttttgtccgacaaaacatcggacaaaatggcaacggaaataaggaaaaaaatcgaaaataaattgacggatgccagagggcagaaaatgggaagcattaagccatcctatggaagcagaaattggcaatgattgaattggaaatgcgatcggaggagaagggattggaaggaacagcagaggatttggttattcaaaaggcatcaaaatcgaatgagacgaagccgaaaagagaagctcaaacagacaaagagcggacggacggagggggagggcaggaggggggggggacactctttgctttgctttgctttgactgaccgctgaccgtctcgcggcaattgtcttctggagaggcggtcgagagcggacaaagcagccgagggaccaataaatgacaacaaacagtggagactgaagtggacacttgagcagaaacggaacggaggacaaatgatcaaaaggagcgatcagaaggacggcgcaaaatgagcgaaagcaaatggagccacgaattgggagacaaaattggatgtacggaagtattgaaatgggataatgccactcaaccgattcagtcccccgccttcgcttttgatggcatggagctgttttttgaaatttgtttttaaaagtaagcagaggttagaaaacatctactgattgcattggaaaatataaaattataaaaaaattttttttattgaatttgcacccctaattttcatttttagtgcatattttacgactttatttgcatatttatgtgcatattttggccacttttcgtgcatattttttgcatccctgataattagaattttaatttttttttttttaattttaggattttttcgtggaaaagtacggttgtactggtgccggttgaaaacccaggtcccagtcctggtggtacagatcatcgcgataccgtcagtaccggtcccaattcttcccaaaatttccgcttcgttctttttctcctctccattttatcccctctcatcattcttttcgtcttttgaccccatcgttcgttttgtccttttcctttccctctgccgccgaactgctcgtactgctcgctgatcccaacgatgactttggcgttggaatgtccgtccttcccttttctgtccttcccatttcagtccttcccatttccgtctcttcctctgcgatcattgccaatgctttgcctccgccgatcgcttcttccttttgacccgatttgttcaggtcaaaatgaacatggcaatgcgactttgtgctctgatcagaccaaatgtactttcccaattccgtttttcttctcccaccgtttttcccatttctccgttcgttggttttgcgtttgtcgtccttttggcgccccataaaaagttctgcaccgattgaggacccgacccggtggaggcagctgagttgacggacaccctgaagatgggcacaatgggtagccaacaaccaattaattagtgtacagtcaattggtgtcaattcactccggatggtgggaaatgccatgccaaggaaagtgtccatctccttttttctaatgcaaatgtctcctgcccccccccccccaactttttcaaattctctctcatttttggcttacctcgtcgaatttcccctctcaaaatcgccactttcgcttgatgcttctgagtattaatttgcttaacatttcgttgtctttccatcagtgctttactttttctcgattggaatgtcccggaggaacgtgagaatttccttcgcattgtttcgatgaatttgctcgtctttcttccgccctcacttccgtccgtattttgtaccacacttttcaaatgtcccttttccccttccgttccccctcttcccttcaccttatccgtcgctttgggttatggttttgcacctgtaccccttgttcttccgcttcccccctt

SEQ ID NO: 3924 - DNA, 2429 bp, Heterodera glycines
gtattttaggattcctttgcttaccatcgtcggaaatctctttttcaccggtgcactgatgtccctgtaaaccatcgcttggacgagcaccaaatatcgcacaatgttccgtcggattatccgcgcctcctccgatttgccacgcaaaatcgtggcgattagcaaagcagggcttaatgggttggggaattagtaaaggaaaacctacatttttgcaataaagagttgagattagttaattagttgccaacttacgaatcgatccaacccaaatttgtgaacatttcattccatcggttaaaaactgccgagacataaaagccgagcataaaagtgattggctaaggggaaaagccaaacaaacatttggaactaagtaattaaaatgaaaagcatgctaattaacaacgcacaatgtaatcggaataagcgtggaaaaacatgcaaatgtcctcgaagagtctgaagaggaaaagcacaatgaaatgagaaaacagaaaaagaatgagcgagggaaaaagggaagccatgggactgaattggccgtagcgaagtcaatcgaaaaaacgaacatttgctggtttttcctcatcagttttctgtacgagaaggaaagggcgtagtaagtgcatagccaacagacaaactcaggccaaatggacttccaaatggagcccttccaacggagcaaaagacggaaaaagccgagaaaagtggaggaagagacggacaaagagtaagtgatggtcattagcagagggatgggagaaaccaagtcgagacaggcgagacagcgaagaatgttcgatcgaagccgggatttccgaagcgttgccgaaactgacacgggactgatcgatcagagtgctgcgaaagaatgtggcttccgtttgccaattttgccttccggtcgaccgattgatcactgatcatctctctgttcttgccgttttctgtctgttgcgcttttctcactgtttgccctgtcgatggattgtcaaagcacttcaatttgagattaattgagcataatcagaaagaaaggaccagcgaatggatgataagtgcttcaaaaaagaacggagagaaggcgaaacataagcaaatggaagaagaagaagaagaaagaagaaacattatttgacattaaaacaccgagaatcaaaaaaaagacctaaattcaaattattcttttaaattttggagggggcgggatgtgctttctctaccccatttctctctctctctttctctaccccatttctctctctctctttctctaccccatttctctctctctctttctctaccccatttctctctctctctttctctaccccatttctctctctctctttctctaccccatttctctctctctctttctctaccccatttctctctctctctttctctaccccatttctctctctctctttctctaccccatttctctctctctcaatctctaccccatttctctctctctctcttcctctctctttctctctctctctttctctccctctcttcttcttcttctcattcccctcccttttcttgaccatttttcttctccaaataatcgccccctctttttgtttggtcatttcgccgctttttattccgcctaattaagtgcgaatatgtaaataatgagtgaacttttctcatctgctccattacttcattacgcatcatcaacaaaaacagcaattaatgcaacggcaaatgctaatgctttcttcgccaatggggcaaataattggagagaaaaggaagcgaaaagcggaggaaaagcacgagtggttgctgatcagattcgaacattttgatccaaccaaaggcacttttgttggcattgatcattcgcattcaaagtgatcagatcaccgcttctttttataatcagtctcagcatacaccaaccttttgcactcggttttgttctgcttctgatcgcataccgtaccttcctgctcatctcttacagtactttccccagttcggctgctaatcttcctaattcccccctcctaattgatcgttggaccatttcaatcacttctgatccatccattcattcattatgatcactttgctgtttttcctttttgccttcgtccataagcattagcgtaaccttaacagctttttctttctgctgcttttccctttgtttttgcttttccttttctttgaccaactctctcaattaagccactcttttctcagcttcgtctctccaattggccctttaaaagggcgccccatttggacacctccgaccattcgtcgttcgtttgtctttttctgttatttcatttggtcgcttatcggtcccatcggtcggtttcacttccctcggccgtcagtgcaacagttaccattccaaacgttgtcaccgctaatgcgtgtttcatggatta

SEQ ID NO: 3925 - DNA, 3661 bp, Heterodera glycines
  unsure (1)..(3661): unsure at all n locations
ttagcagatgtgtccttattctggaaaatttccggatgtttattcagctctttattgcgacaacttacattnntctntagaaaatcgtccaattacacttgtactccgacttctgccnaaatatgtttttcttggtaattggggcatttttgacttgaattaattctaagagtcaaaaaattatgtttagtttagacaaacatttctcggtaattttctaagattgaaaaatttagttttagaattttctaggcaattttcattaaaaaatgttttaaaaaaaatatcgaacaacaatcatccgcaagaaaattgcagaaaatgacacatattaaattacctttttcctcgtcaaaattgctttcaatgttgtgtgattttgagtgatttcctctctcatattttgtttggtcggtgttacttgggcgcccgccgattcggcgccgccaattctcaaatgccttaatttttgaattttgcaaattaacagaggttggccctagcgttttcgagtgacaccgatttttataaaattttgttctcgaataaagaaaattattacccgtgatgctggactagacggtgcaagactggacaactccaaactgtacggtgcccaactggactgagccgaattggacggcgctgggctggatggtgtcgaattgggcgtctccaattttctcgatgcttgactatttttgaattttaacatttctttaaacgactcttccaagttgtttgattttgagtgatttcctctcacatattttgtctggtcggtgttacttgggcgctcgccgattcggcgccgccaatttttaagtatctaaattttttcattttggaaaactaacagaggttggcccaaacgcttttgagtgacaccgactttataaaattttattctcaaagataagaaaattattacctgtggtgatgaactagacggagtaaaacttgacggctctctgctgcacggtgccgaattggacggcgctgggctggatggcgtcgaattgggcgtctcccattttctaggtgattgactatttttgaattttaacatttctttaaacgactcttccaaatgtgatatgtctaaagaaatattaaattttacagaaattctatttagaaatttttactgattttataaaatttaaacggtagcgaagtgttacttattaccattatttttactgatttgccccatcatttgcaagttttttcttctctctaattccccgcttttctttattattagttccgttctgttgaccacttcttaaaaatatttgaattaattaattgtttaaaaccaaatttattcttctagattatggtccgccccaatgtcgggatttggaaatctaaggtcgggactgagttgaccaaatgatctgagtcttttttttgctcgggttcggaaaagccgaagatctcagaaaaatttgcaaaaatgctctattctatgacatgaaatataattattattattttttttatccaaatttaccagataatgtcaaaccgcgcaagtttggactcattaacccacttttctccggcgaatcattacgaaattttttcctggattttaaacaacctccacaaaatgctccgcaattaaacaatgcaaaaaagagaaaaagcataattattattttcatagaaatcatttagcggaaatgaaaaaattatacaaattgacagcaaataataataatttgcttataaaaaattttccgcaatcaatgaatttaaataataatgaatattatagatagctatttgataaagaaattgttttatttttcatatttttatttatgcattattgacgtttattaatgaataatttatgccataattggaaaattaatgtgaattcacatgaaattttaaaaagattataataaacatatttaatttaatactaaaaattgagtaaatttaatgatttgttaattttttaatttttcctttcaggtgattaggaaaaattgtataaaatgaaaatttacttcgtaattttactatgattttgaaacctaagaaaaattatattttacatttttgacgaaactttccgaactctgtctattgtgaaaatattaggctaaactatgaatggttcgtgctacgttattttaatagttcaattcatagggctgccaattttatttaaataaattttttcctggattcattatggtacaaatagaagaaaaacaatcgttgcgccaggaatctatttaaaaagtgacttttttgtgtttgacaaaaaatggacggcttcaacacgggcatgaaccaaatgacaaacgttcttgatgctagtcaaccgtgggtggaattaatgtcgctcgatgataaagaatttgatgccgggtgcgttgagtcttgagaaacagggaaagaacccgagaacccaacttagaaggagaaagcgcaaggagagaccccccaaggccaaccggtacataacggcattccgttgagcatgagcattccgtctaaaaagtctctaagcgcggtgcgaggtgccggccatgggcgcgtcttcatccgaggacgcgggggacaaagctgtggagctgtaacgggaacctagtttcacatgtgcgaaggcaatcgagcgcacaatcagcaccacaaccaccgtcactcggtcccggggccgccaggacattgccgataccgtaactgtcagctgccgaaccatcattttggcattaatttctgtccatatgctccgcgttgacaggctgccgcagaatttcaaagaggtaagaaatggactgttcgttaatctgtattttaacccaatctacttttttcctttgtgttcgctcccgactccccacacgcttgactcagccaatttgttatgtaatttatgtaatttccccgcttaatgtacattcttcctcactccctttaattctgcgtctgataagaattggttttggcattctctcgttccatccttgcctacaaaaacattgtcaccacttactctcggctcttctctctcctatcctaacctactattcctgctttcaactttcattcccaacctttacctaactttctaaataaacctcccattaggaaaaaatttgcaaatcgtacatttcaagtgtgtaattgggatataaaatcaaatttttaatacatttttttgtgcgcattttttaaaaaaagggggtggatccggcggcgccgatcattcaatagttctaggttttctctatcagaataaattttaaatttttttataaaattataaaaaagtatggccaaaaaaatctaaccattatttttttttaatttttaagataataaatagctttctttatacttaagtaaaaaaattttaaaaaataatattctaataaagaacacttcatgctagagcatttcttttgttaaacagttaacgaaacaaatatcaattaaataaaatagtaattatttttacttcgaatttgtcatcaatgactcattcggtattgtattgattacggatttcgagagcatgcgctgatcagaagaatcacccgatgtccatttgaaatttggttgaaaatgacccaattttgaataacattgggaatgcaaatatttttgaaaggcaaaacataaagaccaacat

SEQ ID NO: 3926 - DNA, 7115 bp, Heterodera glycines
  unsure (1)..(7115): unsure at all n locations
aaaatttgcagaattgcgattggcaaagagactgatcttgaagttctctgcgaaatgctcaatggaattgcgcaatgtgtggaggactttggagggaatgacgccattgtgacggaccaagatgtggcgaacattttctgcgtaatttaccaacaaatcgaaaactttgacaagcgacgggcggagagggaaaaggtgactttttatactgaaacaaatattttttgaaataattacgaaataagtaattaaacattagaagtgctaattgaatagttttttcgaatttattattgcctacatgttatctcgagattaacaataagtcattttgttcgtttgtgaatgaattgttttgtttagaagtctaaagaagaggagcatgacgaggaggaccaagagagattagacgaaatcatcgaactcgaaacttcggttttggcccgtgtgtcggacatcatccattaccttttcttggtacaacgatcattcgtcctttttgttgttgtaaatgtcctctttcttctcacagaccaaacgcgaggctgtcatcccccactttgacaaaatggcacaaatattcgctgcccttctcaacccgcgacgccctttccacgacagacagtggggcctttgcatatttgacgatgtcatcgaatttggaggcgaagttggcaaatggaaaacgaaatccccgccatttaattgggagttttgaccttttcagttgagtatgcgctatcagaatattttcttccaaccgatggtcactgctttggccgacaaatatcccgaggtgaaacgaatgccaataatttatcattttttagtttttgtctttttaggttaggcaggcggccgcttacggctgcggaattatgggactgaaggggggacaggtgagtaccaacgaaaaacggcaaataaacaaacatttgatcacggatttcagaattacgcgaaacattgcgcccaaatgcttcagccattaatcaatgccattgagaagaacgggtcgagaagcaccgaaggtaggcaaaggaaaagaaaaaggaacaattaaacggctagattttaaaagataagaaacatttgttcagaggacacgcgggcgacggaaaatgcgataagtgcggtggcaaaaatactcaaatacaacgcgacagaagtgaatttcaacgaggtgagcaaaaaaagggtggagaactggtggattgatggttcgtatcatcggcataatgccaatggttaaggttgtgccgcgtttcgttggttggttgcccatttggaatgacgaggaggaggtgccgtacgtgttcgacttcttctgcgatttggtcgagtctcagcacgacgcagtgcgagaggacccgtctcgtgttttccacgtaatttttcattatttgttaattacactcattaaaaagcgtctcgcttttggttttgttggcgtccctttggagtgtcgttcattcaaatggcaaaatgccttccttcccttccttcagattattctaaacgctttttcgcacggtgcttttgaggacgactcggcggaagagatgcgattggtcaaaagtcggatggtccgtttccaattgaaataaaatcgaacaaaacaaatttaaaaaatggatttagaagggaataatggcacacattcgtgccaatgaacagttgttcacgcaaattgtacaatcgctacaattgaacactcaccagcgaactgtgctggagcaaattttagcctgaggggggaaagcggtgacaagcgacggaactgatcagagtgatcaatgaaggaatgataagacggacattaacatcggacgaaacggataccaattaaattcaccctttattatgcagatgttgttttgttatcactatcgttatattaattatcaccatacaaatgcgcttttctgtttacgatcctttgcgctttgttatcgttttgaattgtgttagttgtttaactaagaattgttacaaatgtgccaatttgttatgaaaaataagttttgggggcccgacggtaccgataggcgccgccggaggaaaaatagaaattttgagtttttaacagattttcactgaaattttggggcattttacacacacgaaaatgaatcaaaatgtacttttttcaaattaaaattttttcaaatattcgcttcaaaaaaatgatatgtagggctgcaacttttagtgacgaaaaatctcaaaatagttacctaactaaaatagtgagtaaaaattccaaaatagtgacaaaatagtggcaaaaagtgcgaaatagtgacgaataaaggggggggggggtaatctacctacactgtaagtttcattcggaagtcccaccgtcacttgggtacctctcctttgttaggggtggggtgtattttttaggtcgattcttaggggtgtattttttggttttattgcatttttgttaaggaattttccaaaaaatgtcgaaatagtgaaaaaatagtgacgatacgccaaaatagtgatttctagttaccgatagtgacatcagaatcgaaaatttttaatgcagaaatgcgtttttttgagctcctttcttcaaatcaatcgagcaaaaaatttagttaaaacctaaaaatcgcagccctaatgatgtgatatgaattggagaagtaaattaattcgatcattcacaaaaaaaatggaaaacagaaaaataaagaaaattgtacactgcgaaaacgttcactgacgaaagtgtatttgaaggtttttagcaactatttcccattttagcaactatttttggggtttttaaaacctaaaaactattttgacagttttagcaactataaatataagccccaatgaccattatctaggattttcgcctcaagagactaaaaaattcagtttttttttgataaagaccaaacatggaaaatcataaatttttcaaaaaagacaaattacaattgtcgagagagaagaattaccaaattataatcagactcaatattgaaaattttctgatttcgtaatcggacattgtcaattcgtttatcagttcaatttccccgtgtttcaacttttgcttgttcatggcaatgccttttttctcctcaattttcttcttcagctgctgcacggtgttccagtcatgaacatccaattttaataagaccaattcaccaataaatatttctaaaaaattcaattaatagtaaaatttaaaaatatatgtttacgttgagtaataaagcgattgggtaatatttaatatgctaaaaatcaaaaactgcctaaatatttaaataaaattagtgcaacaaaaattttcacgatttttcaaaagctttttcttccttttttgcctaaaatctgtcactgttcatcacacaatttagctttgtccacccccgaaaaataaaaattcatagcttttttcaataattttatcaagaggcctaaagtgtgtcataatgcgtcanaatctattaataaatgggctaaagattaagcaaagaactgaccgtaagtgattattggcaatgcttggctcaccaacaggtcaagagtttttatctcgtactcagtgttcgtatagttctcgattccataattcgcgagggttacatcgcttctaagccgttttcctttgtacagcagcgtttggtcaattagtggaatgttctccagttcttggactttcctcattatgtatagaatggtgtaccatcgatgcactctcatttgtataactttaccgtttggcatttttatgtttatttcttaaaacaatttttagtaattgtttgatcatgatggaaaacataactattctttacatttaatgtatttattttatttacttttgtttgtgcatgatggcgtctaattttagcagatgtaaaaattcggtttttaagaattgggataaaagtcaactaagaaccaattagtggacacaataaagcataaccatttaccattcattacattcaatgtccttattttatgataataaattcataattgcagtaattagtagtgaatggatttcaaaaaaaatttcaaattgccatctagcatatattagttaaaaatagaataaacatttctgtacttattaaggtaccaattttacgattttatgcacttgaaaacgctttccctgtacggctttatataatatcatggaataacgaaaatcttatccccgccaaccgtcagagacatgcaattgtggcttaatttcaagtgtaatttctggccaatttgccccttcgatgtatttggctaattcttgctttaaactgtatccgtttccattcaaacaaagccttagctgatcgcgcggaatgcccactttggctttgatcatccattcaatgttgagcaaggtgtcggtgcttttaacccgcagtctgatcattttcttatttgttaaatcctttacaagaattggcatttcctcactaaatcaatcaacattttgtttaaacattatcgttttttcttctaacgaccttggcaaggcaggtcgtggtaccaggtaaaaaacgaactcattttcatgtcccccattgtgtaggaaaatttgcaattcggccttgttgagctgaatgcctcggaagaacagccgctgctctccaatcggaatgcctttcagctcccaaattttctccataatgtcttgcacattgtcagatcgtttcattgcaaatttcagcattatattgttcaaactgctgacaaatacagatatttcatgttgagtaaaagaggaagtcgtcgcttcgcttggcatttcattcgcagagaaaggcctaataaaatggaaattaattcgaaacaaggactctgtaaaaggaccagatcagcaaaaggcgtttgtggccaaatataagagcataacaagggcaaaaataagtacatcatggaaaatgtacaaaattcaaaaaaaaaacatttaatgtcttaatgttttatgaaaagagtaagaattacaaacaggctatttgatcaatcaaaaaacaattattaaattaccttttgcgcatcaatgcggcaaaactatgaggaacttcagcaattatgacaggcgttgggtgcactgcaatgctcgtagttacggcgcgcatgtttgcatcagacgagacggacactgggcgtagggcgatcccaagcggggatgtatcgtgaaggttggcctcgcttgtaccgggcatgccaaacgtgggcacatcgcgcatgctggcatctgccgcagcgggcgaaggtaatacgggcattccaaacggggacaccgcgcaggtgttggccatgctaagcgtggacacttcgtgcatgttaggattttctttagctgacgacgggcgtaagaccatcccaatcgtagacgaactctgcacgttgtagtcgcttagccttcgaccgtcctcaagctgaatgaacagcatttgctggtcgggtggaatgccttcggtttggtggataagcatcttcactttgtcaacggtttccgattcggcaacttccaattttatcattttgcgcgggactaagcttttcacaaaaatttgcattagtccatggccagtggaaaagtggcacaaaacaatggacaaaaataccaaatggtaatgcattggtgaattattatctatggaaaatgacaaatgttaaatttattatatttcttataatatattattcgtttaaattttttttatatttgccaatatgggattatttaatattgattgatttttaatattttatatcaataagaaaaatagttgacgtcattaaatggaaattatataaattcttgattaaaataatcaaaaaatgaatttaatccatatattttaattttcgagcataattaaattaaagtagcaaagcgctcgctgaattgcaaaaatgttaattgtattgtaattaaaaattttaaataattttccaagggtataaaaaagaaactgtcaaattttgatgattcgaacactcaaatttgtagatctaacagacaatgggtaagacaaaagcctgttactatcccattttattatttctagggcttccatttttaagcataaaaaatcacgaatagacacctaaaaaaggctgaaaaaataacaaaattggcattaaatagacataaaaacccctcgaataggcataaaaataggcaaaattttagtttttataacacaaaaaattaatcaaaaaacttattttggctatatttcactttttaaatgaattattaaaaattttaaagttttttttcgaataaggataactttttaacaaaaaatattatcaaaaaataaaaaaaattaaatttttggaaaaattttttcaatttttttttttttgcatttttgtaaaggatttttttaggcatgaaaacttttcaaataggcacttaaaataggcacgaaaaatgtgaaaaaggcacaaaaaattacaaaaacgaaaaaggtgcaaaaaattggccctgtcaggaatccgatcaaattagcaaaaatgtattaagaaaaataaactttaagagattgagtttagagaaaatttttcaatttctaggggctatttaaaaaaaaattcaggacgatttaggggcaggcctgtagccagaaaaaaagatttcggatgtgggaaatcgaaggtttaacaatctaaattcggcaggtcctggttgagccgacggaccaggtttaaaaaattggacgcggaccttttacccaaacactctgacccatgtcacctactcaaaattagtaataacctgtgtagttttttacaaatccgacagtaaaagatttatcggattaacgaaaatgagttgaagcagatttatccatgaaaaaagaagtgaaaaggatggccgatcatttcgtcacagatcatttcgtcactaagaaaaatttaaaaaaaaaagtttggcacattgccttaaaacaataaaataaaattctttaatatctaaacaaaagtgctagcaaaaagaaagaaataaatttgataaaagtttcaaattgctttaattgtgagatttgaaagggattttctctgaaacaaagtgattaatttagcttctcatccttaat

SEQ ID NO: 3927 - DNA, 2380 bp, Heterodera glycines
ttttgaacttatttcaatcataattaagaaacataaaactttaaaattgtatcctctaactgaaggaatgaagatcctagtatgtggaaaagctaatgtggctctaggacaggggcgtgaccaaaaaatttcaaaataaagaacatcaatgacaaaaaataagatttagggtcaaaaaaggcaatcttgcaaaattggttcgaatcagttaatatataattttttcgataaaaatgtattaaaatgttatgtttttcacatcctattatggattttaacaattcttggggaagaaattagcaaatcgtacatttcggtgaaaccgtgctgaaaaaaaagattttcaaacatttttttttgcggtgtattttttttttacaagttgttgaatggaaagtggatccggcggcgccgatagacgacgccggcaaagtttttgaaaatttgagtgctatttcatagcagattttctattaaaatcggtaaaaacatgattaaaaaatcggtaaaataaagtgcggtcatgcgggatcgaacattaaggcaccgcagaaaataaacctgctgttttcaccactaaactacaatacttcaataataaagcttattatttcttaccaaaaaagtcattcttaagggtgtaaatattttcgtctttttcgtaaaatattgctctgacgaaaacgaaacgaaaatccaaaattttaaaaccgaaaacgaaacacgaaacgaaaaacaaaattttgaaaaccgaaaccgaaacgaaaaaactttagatgacgaaaacgaaactcaaaaagtaccgaaaatttaggacgaaacgaaaacgacacgaaatttcgtccagccctggcgggggggggggggggggcaaactgaactattaccaaaaaaacaaccgccattgctatttttagtatcatatttcgccagagtcatatttttaactttaattggctaatcagtttatagctcattctttataaggcacaccgatacaataaatgggttttattatttctgcacatattacaaacaatttgcatatttgacgattctatttaaaatcatcatcaattgtgttatgccaattaacatttgtttccacacagacttcagatatgcaatgccacaagttttgcgcccactccgttgtcgtgaaccccagaaaagattggcactccgtcctccagaaaagagttgaaagggacagttttgatctcgtcaaagccaaactgtaaagtcaaagatttcaaaatggaaaagtaaaatagtgatcactgctggtcagacaactcacttttttaagccccgtctgagaggcgatggcggtggcacaggtgaacaaatgggaatagccttttgcggaagccgtttggatgagtgcacggagcataccggagcccaagccagtcctgaaaaggagcggaaagtgccgcatttgacgagcgagtgattggcattcaacacaacgttacctggcgtgtcctggacctacagccatggcctgcaattcgactaatttaatatcctcttcggggggcaacagtgcgatatgactattcacgaaagtgagaatggcgtggattcgattggcattttgagatggaaaagggccattgcgaatctcttaacaatttgctttcatcttcaatctccgccttacgttgcctaaccttctccgaattcctttttgttcggcatgcgcccaatgtctctgtagctttcgtgaatattttccaatttgaagggcgcattcaacagaactcccagtattttcccatcgttgtttttggccgcaaatgacaaatcaaactgaaaatgagggggaagagggtgaagagaagcaaagcattggagaaactaatccacgaactaactttagaacacttctcacaaatgtcgtcgaatattggtgaggtgtccgagggggtgcaaccttaaaaaatcaaaataaaaattattattggtaaaattatatcatttgtggaaaaaggaccgatgacgcgggtgatcggctcgttgaccaaaaacacttcttgcaagaatttgaacacagagtcacgttcggaagtgaactaaaagaaaagtgcgaaaatcgtctaatttgattgattaaaacaaagagaatacattcacagtttcaatgacatagtcacggttcattgtggaaaagtgagggactttaagagagcgcagcgttttgagaacgcgaggacgacgacacggaccacggagggaggcaagtaaaagcataatgatgtattgtatgtacaattgtcactggaacataaaatgaattttgttacatgcatacataggatattggttaaaaacaaatggaagaaaatgcaaaaattaactttatatagtgccagaa

SEQ ID NO: 3928 - DNA, 3784 bp, Heterodera glycines
tcttctacctaatccaaatccaacattggtgatataattcgaaagctgaacatgtttagaagctttttctaagcgatttcttcgcgatcagacaattaccaaaaaagttatacatgaaaattgcgaaaagtcgaaatttttgaagttttttcttaataaaattttttacaggcatgaaaatctatccgctttttgtaaggctaatagagcatgttaaagctttcgaatgatacaaagattgttgaatttggatgccaaagtaaaaagctatcttggaaaaacgagctggcgccgcattgcgcgcgccgaaatgcgtgggtccctaatttcgcttataaaatttgaaaaccaaaagatttccatttaggtaattccatatttaaatgctcaattctattatttctttctctactttttgttcttttcatgtcctttcccccatcattttactcctctattattattcaattcgtttgttcgatttatttattgaaaattggaaaaaaatccatgtgaaatttggtgatggcaaagatcatctgttttccgaatatatttaagggaatttgaggccaacaagagaattttctgagaaacggctctctggagggagagatggtgggtgtaattaagaaaaccaaaaaatgaattttgtttgggaacggaatggaggaaataacggaaaaaggaaaacggagaataatttggggaggggagaggggtactgcatatgtcaaattatagtaggcctcatttttcaattaacgtaatcattaggcagttaatttatattgttaataatatttaatttttttagattgacgtaattattaggcattaatattcaatttttaattgagatttattattgtatagtaaagtttcgattttttgtgccgatcaaataaggaatttcacattttgtataatattaggaaataattaaatttttaataaatttattattatagaaagtagaagggaaccgaataaaatacatagcaaaatgtgaataaaaatcacattgattaatataattttataaatgttcttgctagtttccattttatttatttttgggagcacgacaaaacgtttgccgggcgaaccttttggaccatatctttttaaaatttttggtcatttttggttgcatttgaaaaaagttacaacaaaaaatatgtggtgcaagacttatttgtcaccctgtatacgttcaaaactttgaagacatataacttttttaatagggcaaaagaaaaaatctgaaaaatttacattttataactttttattcaccaaagtgatcagatcactcattcggatggatatgaaaccctaaatggcttgaaaacgggaaattctacaaaaaaatcttatgtggttgtaaaattgtttcgtggcagacgaacacaaacttgctataaaatgcaaaatccgcatatagcaaaatttgtgttctttctgtacgtaatattcgttttccgcgaaaaattttccgtccaaccccataggaatttttttctgaaagtttcgcaatttcatgccattttagggttttcagatcaccccgaatgagtgatctgatcactttggtgaaattgattttttggtcagtataaaagttttgtaaaattatgaatttttttttcttgtcctattaaaaaaatacatgtattcaaattttgaacaaataattgaaacagagcatataataaataattaaatgaaattttgttttattttataaaatgtgccacatccacctgttcctttttctgatcatcatgatggctattgtcaatgttgcgaatggaatggactacaaatatgaaaagttgaaagaaccgttactttcaaacgaaaacattgatcagcacgaatttgaagtgatcaaagatggcataaccgaagaggaggacatggaaaaagcaatgaaaatcggcaaaacattcttttggcgagttataatacaaattgtttttacattgatggaccagggggcacaggaaaatcatttgtttaatctgctatttttcatttgtccagaggttttttaaaaaaagtgacaaatatggcttttagtggaatagctgcaacattgttaaagaacggtcgaactgttcacaaccggtttaaattaccattagatttaaatataaattcatcatcgtcgattgaaaacaattctaaagaagcaaaagaaattagagaaacggatattatcatttttgacgaggcaccaatggcacctaaatttgtaattgaaataatcgataagaaattaagagagatacataagaacaatattatttttggtgggaaaattatgattttaagtggtgacttccgtcaatgtttgccaataaaaaataaagcatcaaaaaccgaaattttagatttaacactacaaaaaagtgagttgtgggttaattttaaaatattccatttgagaaaaaatatgcgaacggaaaatgaatcacaaaattttgcaaaccaaattttggaaatagggaacggtaaaggtaatgatgaaaacggtatatgtcttccaaaaatttgtgatattgaagacaatgatttggttgatgaaatttttggtgaaataattaaaacaaatgattattcgaaattatgcagccattgtattttcaaaaattttatagttttttagttgctagaaataaaaaactagaaaatagttgctaatagctcgaaaagtagcttaacaacagtcgaaaaaaacatttttttcgtgtatttcaggctacggggagctcaagaaaaaaatagtgaaaacactataaattgcatccctagtcatcatcacaaaaacaatttttcctaatgcacctgactgcgcataacgccaagtgccattcgtgtgtcggtcgcttgggtggtgccaacattcagtttaacggccaaacgcaatttgaaatagccaagaagcagtgatatggcgaaacgatgttcagctttctgagctatttcagtcccactatggagaaacaacacacgcgagtacagtgactcacgatgacttgggcaaagcacttctgtggattttaatcagggctgcacgcaattgcggattgcggattacggaaattgcggggtttttggacccccgtaattgcggattgcgggttgcggatttttgggatttatccgcaattttgatccgtaatttgactattggattatttttcgagacgatttcttgtaagattattttttataaaatgaattttttttctatttttatttaaagaaaatatgtacatttgtttaaattcttatttctttagcaatttaaaaatgtcaaacttaaatcctggtaattggtggtattattttgagcgtcaaggcaaagcaactgctaaatgtaaagccgatggatgttcctactcaaagacattaaatgcttctctcagtacaactgtgctgacttttcacctcaaaaatcaccaccctgaactttacaaacaacgtgaatgtttcttcaccataacttgcttctaaccggattttcaattgaatgattttgcttttataaatttgctttttaatatgcttttaaattgctttaaaagatttataggattttttaaaataaaatttaaaattatttaaaaaaaattttttttttattgcggattgcggattacggaaattgcggggtttttggacacccgtaattgcggattgcggatttccgcaactgagaaaatcgccgcaattgcggattgcggatttccgtaattgtaaatccacttgcgtc

SEQ ID NO: 3929 - DNA, 1479 bp, Heterodera glycines
tcagtccctaaaattccttacgaaattggttatatttagttttttgcgattttttttaatttaattttttttttgaaatttccaaaatcccgcaattccgcacaggattcctcaaattttaaatgcgggattaatcccgcaagatcccgtcccgcaaaaatttttaattccaatcccgcagtggggtccgcaaatttgaaatttccgatctcttcatttaatatcaacaatttattattaaatataaattaaaattactgttagtgacctttttgcaaaaataaaattaatgttaaagaagggcttaaaaattagtaagtgtcaaaaaattaaaaattagaaatagaaatatccttttgcttggaaggtttttaaattttcttcattgaattataaaaaagcaattctcatagatttttgaaattataatttataaaattttcttagtcgaagtctaacaaataagtaagcttaatataaaaaacaatctgactgaccaatgtgcaattgttccgggagcgccttttcaagcagttcaaattcctttacagagccaagtgtggtcaatagacgatcttttgctaattgaatttgttgtgcagcgccagaaaaaatgcctttgaacggattcagccgtctgatcaatcgataaagtgtaaagctgtggatcagctcgttattgggctcctttctaaccattgcgatcagttcggcaaatttttctatggaatattggacattgtttgaaaaaatatgggctcttttgtattcgtttgtaaaaattcagatataattgtctgaaacttttaatttcaattagaaatttaaattaatctttgcattttttattttaaaatatattcgttaaatttgctaaacgattctaatttaaatttgagaatttaaaatctaaattttcctaataaacatactgcaaatacaggactgagcctttcccacactctcacaccgtttctttccatccctcattaataaaaaaataccaaataattaatgtagggaaatacggtaaattggcccacaaaatccttcatatccgaccaccgttttttcccgcaacatttgccacaattcttctctttgctgttccgtggcattcgtccaaaaaagactgatgttcataattgtgaatttatgaagtgtacaaaatcgttgtgccaaattgtccatttgtgcaattcttttcagtgtgacagtccatgccgaccaaaatttgttcattacgtcatttcggatttcaaattcttcactttccaaaacagtttcaataaaaaggaatagttcttcaataaaattatttaactgaacatgcacatgtatatatgtatgaaatatattaaatcatttttatccgtttatttattttgcaatttcttagggatcacaggcaaagattaagcaaggctcccaaaaatttgccgggcaaaagcccgattttttaataaaatttattctaaa

SEQ ID NO: 3930 - DNA, 1736 bp, Heterodera glycines
ttttgctgcttccaaaaaaggcagcccaaaaaattgcttgtataaatacaaatgccaatcataaaaatctaaattttatttttatataagatttgttatttaaataaaaattattggcaaattcatttaaaaacttaaagcaaccttttaagaaagacatataaaacattcttcttataacaaaaagcgtcctcgtaaatgttaactagtttttctgtaagtcatttaagaaattgcggtgggaaattgaaattgaattttaattttattttcttggtaccctctttttcaagcttcaatttgttgcctgctcttaagaattgtaaattcttatttatattaaatcaccaattccataggttaatgatgggtatttgtcgtataattgttgcgtaatttcggcatttttctcttcaaataattcgtaaatccgatctttgatcagccttttaattaagtttggatgcaaatcattcttcaaaaaaacaaccatgcgtagacggaatgtcaattcattttcccaaattgcttttttgttggcaaaaatatctgccaattttcgcaccggtacgctggtgctgatgactcactactgttaccgtaatcgtaattgccacccagtgtactgctactgtaactgttcgtctcaaaaccgtagtttccacttgtagtactaccgtaaccactcgtgtcatcatcaccatcatttacgctataccagttatcagtgtatgcgtttgcgttataccaattattatttccaggaaaattactgtcgttaccataaccataattattgtagtagtaataaggatgatagttgttgttgttatcatcgtcattattcattgagcttatttccgggctttcaccaaaaattaccgggttttcattaaaaatggtattcgtactgtgccattcttcaccaatgccattgccaaaatctaaatctttgccacccattttgccatggctttcctcagcatcatgaccttccgtagaacggtaaaaattgcggaaaaattggggaccaaaaaactgaaaaaatattttgccgcggtgtgccgatgcggcattctttcaaaaagcgcctttttgttggcagtttggggacacacaaaaaaaagtgtgccggaaatggggcggcacacaaaaagcgggacggatgccattaatggcacaagatgccaaagaataaagaaatgtattatgtgagactatgcgttttgttgagcaaccggtgaatgtgtggtggaatagcacattgttggtttaaataataacatttaaaaattctgttaatttaaaaaattatttttaatatacttttttaatttttatttgatccaatttcgtgccgctcgagaatcaaggttaatttagtgattaattttataaaaagaaaattcaattttaaaaccgcacttaatttggcattattatatgagaaaaccgattaaattcactccttaagattttggcaattcgttaagaaatgaaaaaactaaaatagaaccgggacccgggaccgggaccgggccgggaattcccggtcatacgaaggtcccggttcccggtttttcttgcggtcccggtcccggtcccgaaaaaaaatcgaggccccggccccggcttcttcaggccccagcaaatcccggtcccggatttggccaaaaaatccccgggacccgtggccatctagtaaatttgcccttggaaaaaggaacgaaaaaaaa

SEQ ID NO: 3931 - DNA, 10093 bp, Heterodera glycines
aatcaggatttttccgacaaaaaatcagcattttgtaaaattttatttaaatgaaaaaatcagcaaaaatgttttttgtggcgccctttttccaaaaaaacttttggggagaaacaaatgagttgcaaaaatcagcaaatcagcacctcaaaaaaaaaatcagtttgaccccttgaaacagcaacatgctgataaatcagcagagttgggaattatggttatgggggaggggtgaaatacgtatccctagagaccggagaagtcattctcgatattttaataaaatctcaaaaaaatttataacgaaaagtatcgaaaaacacgaaatttctcataactttttttggtgaaatatcgaaaaatatttatcgaaaacggtggtaaattggaccaataaaatcccttaccctcacacaaatgcaaaatttaaaggaagatggtaattttttaaattgaatatgccgtaaataatgttatgatattcttgtttaaatcggcaccagtggcagcctaattagtgactcattaatcagctaatgatccgtttgttatgtgttcagttggattcgtcatccgagcgcgaggaaagcactcacgggacagatttgatgttggaaaggaacaaagagagattaagctgggagaccgcagaagcattggatcaaccagctgcagcaggggataaacaggcgctgaaaaatcctcgcgggggtcagtggtgaaaaaaagggcgaggggaaaattgtgcaacagaaagttggacaattcatcacaatattggtggtgaaatcccaatggggctacaggaaataaaaatacacttgttgtgcaataattcagtgtgtatttctccaattttatagccaaaatataaaagaaaattttaaagttagtcactacataaaaaaaactcataatcatcctaatttattaatgaatttttagataccagaataattttgcgtttaaaatatttaataaaaaaacgcttttttttacaaagttttcattttttaattacttatggcttagtgtttggcaccaattttggagtgtttttcgaagttagcacttattttccatttttaccattatttagtaggacatctttttgtgatttaagcctattgagaaatgatcttgatggcagattaatcagatcagcatcatatggacctgataaatatgtcaacttttgagcattgcattgattggaaattcttcaataggtttaagtgtactggactatttgtaactgatcagaattattattttttgcatgtctactgcaaataactgatcaaaaacttagttgaatgatcatgaactctttcattttacagaatttctgtatactgttaccgtaattaccgggaatcggtgggcggcggacacggaagcgaatctgtacattgacatgcacggcacggattctgattcggaacgcctgtggctcaagcaagaggtgaggagggcgcaaatactgggcgccaaaaagctttgccaaaaattattggcattttgtctgtctccccaacagtttaccagctggcttcacagtggaccagcgggaccacgttttcggcaaaaccaatccgattcctttacctttcgtctcccgtcacggctgggcatcatcaacaggcttactgtaggccatgaacggcacggctacggtgggggagaggagttaatttttcaaaaaaaaccatgttcttatttttggcttagaaaaaaaatgtctataaactttaatctcgatgtaatgattaaatatctttttcctcttgacatatcaaaaattttactggcgatatgccagcccctaatccttcagaaatgttcagaatttatactaggatttaaaaaatatcacgctatcagcgaaatccggtcgtcaatatttctgaaaaatttaattccgtccaagcctaatttgtatcggcatatgacagttatatccatgggattactgagtccgggttactgtggattttagttgaattccatgaatttgattacataatccacctatgttcagttggtcacaccattttgatcaattttttcaaggtgccggtgtgtttattgaccgcattttggtgacggaagatgaggtggatgaagcggatgaggagacgggggcggaagcgccggaagggcaaatgccaccattcgtggagcattgtggtgactgtcgccaatttctgttcctctgcaaccggtggttcgactcgggccaagtggacggaaagttggagcggaacgtacgcctcagtgccttttacatgatcagctcaatcccggtggacggacgcgtgacgcgtgagttttcatctgatcagtgatcaaaaaggatgattttggttagaaattgatgtgatcaatgatgatcagcaataattttagttcaaaactgatctgatcaatgatcagtcaaaattaaaattttattattactaaatctaatgtgttttattttagcaaattggttatttgatcatgataattttttgttcaattcaacgggataatgacctgaaaatcttggcttttaagatcccgctctgtcttggaatagatttactgttttaattgaaaataataatcttaaataatatatttgaatttttcttggcaaaggaagtcctggttgcttaccgaacctggtcgaaagcaaatttccctgtttttttttctcaaactatgcaagattttatcttttcaggcggtcgttgggagttcgttttacacggtggcacaaccgatggtcggggcagcaccagttctcagttagccatcaccggttacggcaccgccggccagtccaccaccaatggcctgtacgactctcgaatggccaacgcaccgtccgatgcactgatgcaggtgagaggaaaaacacatgctaattagcttattatggctcaatcaacccaattaatacacagctggactttggcaacattggcgaattgttgaaagtacgcgttgagcttgatggtggcgatggcaccagccctgactatttcctgaactttgttgagttcaaggtaagttaacgggggatgcgctatgattatgatgattcgcattcagattaagattgagaattctgaacgtaatcctaatagggactttaccgactaattttaggcaaattttttgaaaaatcgggtgatgcttaagaaacttagagaaacgaaaaacaaaatgaggccacgtttggagtgttaagcccaattttgaaatatttgctcaatttccatttacaggacttggacacggatgagaattttgtggtcatgtgcggcaaatggctgcgttggcgaagtgccaagaaaggcgatcagcccttccgggaactgatcgcttttcacattggcgttgaaccgttgccatgtaacatgacgggatgggaatggggaatttatataatattgtcggcctaattaaaaagtagacgagattatctaacaaatttactgctttttaaccaaaacacttaattacttttctctaattgccagtgatcatttacgagggaaaaattcgtgcaattcactccccggtgaactgtttgattgctgaggaacttcgcttggaattgcacggaggtgagagcagtttatggatttgtatcaatttttggaaaaaatgggcggcaaaaatttgggaatttttttttgcgccatcccttcattttcaacctaatattaaataccatggcacaatgtcattctaccacagaccttggcgacactggccatgtgttggttccaatgaatgccgacaaaaacggcgtcaacccgggcggcgacggcacagacgtggaaaacgccgatgccgtccaatggacggacattccgttccgcatggaggcagtcagcgtgggccgcgttggcggtgcgcgagtgcattttttgccaaatttgacgggcgaacaaattttcgaaggactgcttacggtagctagttactgtacgtactctatgttcactttacccctttttacagctccaaaacattttcaaaaaacaaaatgtgtggccaccggcaggtgaaaattccagctttgtgttcagccaaattcggctcaccgagtccccgcacacgccataccggtagagcgtactgtagagggattactgtagtgcagaaaaatgatgataatgtgcccttaaattgttatcaatgaaaatcacatatttcttgcactttcagttatgttctaaatcgttcacagctgcacgaacgccgctgtgatcagccgggaaatttttcgttggtcaaggaattgttgacgacggaaatggaggtaaaatgttgatcagaatgggttttgctaattagatgattaattttgaagataaaactctgatctgaaaagcttatcagcatttataacatatacatattctaaatcatccgacgagaatggcattgttgatataagtctggacacctcatatttatcattaattagtcatttttgaataatccaaatgtttgtttcaaaactggtctcatcaatgatataaaataaattggatcaactcagatcaccttgatccttttggttattacagaattcgttgtttagagtaaacttgcctttacagggcagggttctgtcgcaaaaattttaaattttaatgaattttggtcattaaattctctgattccccctcagggcatttctacacgattgcgaaatcggaaaaaccagtccaaaaaaatgccaaggaaatggcttcttcaaatggctttatcggaagggtgcgtttgtagcttgttgatcacctgctggtcattttttacttaacagttcgaccattctccccgaagtttttctttgctgggaaaagcaagcgctggcaatgacaccgctggacacctcgctctcagatggcattctaagctaccaagtgagcgccattagtttttttttgcgcaatctctgatcactaaatcgcctaaaaatagaaatttgaaaaaaaaatttgggcaggccccagcaggcaccacgctgagctgattaattatacaatttttgtttgactcgttccataaaaaacgagccggggatgccaaaagagagcggttcggactggcgtttccgtttctttcttttttaaaaatttgtcttgcaattttttaactgatttaacctattacagctcaaaaacgtaatttttcttaagtcgggcatccacttaaaaaagtttcacggctgcatatttcagcttgacaatgtggccaatttggaattgttcaccaaagttcgaattttgtccgacggacaaacatttttggaggcggccaactcagtccaaattgcgcaacaaactgaaggcgccgccaacgaaatgccattcacttacgtggacaaagtgcgcatctgcgacacggccaacggtgatgaggtgaaccaattgaatgcttattcctaatttaattattttgactcatcctatcaatgagatttgttgctttttataactgtttattgatgatttcacttatttatgagattcttatttttaaacttttccggattcatagcgaggaattcatttggaatttttaaattttgacctagtcctggaaatggaactgaattggcaatgtttgtgattgtgatactcaaaaccaaaatttcccaaaacccaagacttgacctcgtgagtgggactcgaaaccgcaaaaactctaggtttttttcgagtcgagactcgagaagagcttgaactgatcctcattgctggaaacccaagacttgacctcgagactgagacttaacccgggactcaaccgtaaaaactcgagccttttctcgagtcgaggccaagaggaatttgaacatatgtccattgcttgtttgacatttgacgggaaatgaatctgtatcattcattgacactgatcaattgatgtctcgcggattgaatgagctgaattccggccaccgataatttaatcaataatcacctccgatcacactcagttgcgcttcccctctgccgattgtatgctgcaacggcactccgtctacgaattgcccgtcgtttggcctgatcgatcgccgattccaagtacgtaacaaatcgagaaattcgatcaatcaatcaaccaattaagttctgatttattccgtccgcattgccaccgggccgtccaccgaccaaacaaatccggaactaattgtccagcttaatctgtagggttttcatcatcttcattattatggtttttcaataattttttggtttgataatgttaaatcttatttcgttcatttttggttttctgataaatctatcaaaatttcaaaaaatcattttaacaaatttcactaaaagatattttgcttggacagatttggtgagcatggtgatgttggacaacgaaaactaatcagagatgaactgcaagaaactgtagcttctgatcagcagcaaaaggaaatgccaccaccactttttgcgccgaaaaccgtaacacttttttatttggtagcgcgtactgtaagtgtcactattggcttcagagttgcgctttcgagtttgaggccgtttccattggggacattcattgtgccgaagtgatggtggacactgtaccaaaggtaccaaccaattcatattaattaaacggcaccctccggtctaattactaattttaaatgtgccgcaggacacagatttttgttgggagtgcacagagatggtgatcaccgactttcggggccgttccgccccattttatgcattcaaatttgccaggtgagcttttggtcgcaatactaattatcggatgaatcattctcaccatttggtcaattaataattaattagaccaaaattaattgaaaataagcgcaaagactagttcaaattggcctaatttgccaaaatttgcttaatagtctcagtttatttatttcagtcccttctctgtccaatgccgtgcccaaattgctaacgttttaccattcactgatgcgctctaatttatttgatcggacactgatcagatcccaacagttggtaaagcaaccattgacaaaattgatcgaagcattcattcgcgcattttgtacatacatatcgtaaattatgttcataaaaaatgtccattaattatcaaattatggtcattttataaacaatccacgacaaaaaatattacaataaataaaatttagtctggcttaaaatttcataaactaaatgtgttctataagaaatatttgaattaaaaatcaatttatattttaaatgataatgcaattatttcttgttagaattgaccttatagattcaaaaaataaacctctaaaatggaaattttctcaaaaataaattccttaaattttatttattttttgctttttctcagtaactttgatttggaaaagcgatccggacggatccagagtcgggatcccgaccaaatcagagttaaaataaaaatttattggactattcttaccagtgcctttttcccggttcccgagagccctgccgggggtctgtatcgtttctacgccgactttcggcgccagcccgaattttttggttatcacttttttattgttgaccaatcctacaatcttgataacattcgaaatacatgtttagaagctgtttttaagctattatttggcgattagagacaattaccaaaaaagttataacatgaaattatcaaaagttgaaattttgaagttttttctcaataactttttatttgctagaaatgctttttgtaaagctaaaagaaaaatacccaaaatatgtaccaatatgtaaataaaattttaaaataattattttttattcttcggaaagggtgaaataagcacaaaattacataaaaatgacctatatgcttaaaccatatttaagtttttgaaaaataattttcggttaattttttttcaaaagaaatttttataaattttcaaaaatcctaaaatatgtaaaaaatgtttatgattttttgcgcgttaatttttatatgtcttacattttttttttgttttcctaccccttgtaaaacaatagaaaaatgaaaatttattcgactattcttaccggtgtttttttcccgattgccctgccgggaccgggaataaaaaatcactgctaatccaaatgtttttaattactttacgattttttgcgcatttttaaagcaaacattgatttaaaaaaatatatttattattcgtgtttagcaacgtcacttcccttccaacctggcaataaattaacaaatgaatttcatgcatatttatgagagaaatctttaaaagcaattgctttacaattaaaattttatttaaaaaatgtcaatttcgaaaatttatttccttttctgtgctctcatcgtttccttgctggtcgatgcttcgttcgcggcaagaaagaacaacaaaagtgagtgtattattatttatgctaaataattattgtcttaatttcgctccaaagttggacttaattacggttattatcgcccaaaaagtcgaaatctcgagtaattaattattgatgagagtgatagtaaattatttcaattttttttttcttttttcgacaaaacaaaagctcacaatcaacattttgtggagggcaaagaaagcgcaacaagcggagcaaatgaccaaacgaccgatgaaagtcgacgacattccgacaattcggtaggcgccgccgggaaaattttgaacatttgaatacaatttgttaacagattttcactgaaaaatgatcaaattttgcgatttttgggccattttctatgaaaaaaatagagtttttgggcgcggctgtgccgataggcgccgctgggaacagattttcaccaaaaaataagcgaaatatgcgaaagcgaaagccctgcaaggaaccgcccactaggagagagagacggacataagatagaaaagtgtgacatatggattacagaataattggtaataattaattattattatcatattcaaaatggtcaaaatttttaaggtttcatccagcggtgcgtgcctatcggcaccgccgggccaaccaaaagttgttttttttcataaaaaattggatcaaaattgcaaaactggaaaaatcgcaccgcaaaattttattgatttttctatttgaataaaattttacgaaatactgatttttgaccccaaatgataattttttgttggcaaaatgatgtgtttgaaaatttcatctggcaccactgattatctatattttttattttgaatatatcattcagcagtcatcacataagcagaacactggagaagggaaacaattaagcgatgccgaattgggaggacaaacatcagcacaaggaagcggaagaagcccaagccattctcaaatgccatcgaacaaatcgccacacatcgaagaaagagtggggcatttcaaaatattaatttttacaacttaaaaaaaaattgggcaaatgcaaatttgacatttagcgcatttttcaaaattagaaaatgcattttagctttagtggcaaaattggagaatttgaaaaaggcttttattaataaaagtttcattaaatattaatatattataccccttaataattatgagcaattttggtgaagtagttaaaaaatttattcaattacctttaatgttggaatttatataaaaatcctgcattttgtattggaatatttaataatagattttgcaatttgttgactcctctaattaaaaataaattttacaattaaaaaattaatcattgaaaaggaacctcaggcgaaggacgaaattgctgagttggaaaatcaaaagctaaagaatgaactccaagaaacgaagcaaaaattggccgagcttgagatgtatcagaacgaacagcagcggaacattgaggcaataatggggcaattagctgaaatggagagaaaattgcacgcgaaaattgatcaggtgactgactaattaatgaatttaattcaaatcggagatatgcacaatgaaaggcaatatgtattaaatatttattatcttaatcatttaattttataaaggagtcacaatctaag

SEQ ID NO: 3932 - DNA, 2361 bp, Heterodera glycines
ttaaatttatttaatttaatttattttattttattttattttaatttattttattttgatttttattttgggttaatttaatttaatttaatttaatttaattttatttaatttaatttaatttattttattttattttattttattttttattttttttatattttcagaacaattctgacgttttccagaattttcagaactgttctggtgtgtttcagaattatcagaactattcggacgcttaccagaattttcagaattattctggtctgtaacagaattatcagaactattctgaagcattccggtacaatcagaattattctgcacaaaagaattaaataaaaaaaagttttttggtgtttaaattataaaaattacatgcaaaaacacaaagcaaaacacaaggcaaaaattgtaaaaatactcgaaaatacaccttaacatattgaaacacacgttaatgtaacgaaaacacacgtgaaatgttgaaaacgcatgcaaacgtgtcgaaaatacacgtaaatgtgaagaaaacacgtgaaaaaccggaaccggtttaaagaactcacgccgaaaacacatgtaaaccggtttaaaatacatgcaaaaacacaaaatccatccggtcggtcgaaattccggacattccggatgaatttacaattgtaaacggattgtaaaccggaaggcgaaaacacaaaaaaaatcggcttttttcgacctttgccagggtataactttgttcgaatttgttgtagagctacgaaatttttttctcacccttcctctcgacgagctctacaaattgttcgcttaccgcaaaagcgtagctcttacggttcccgagaaataaggtgaaaacacacattttacaacccatttttagccaattgtaaaaagccgggttttttttattcgaacgcgattttctcgaaatttttcttctgcacaaattaaagtgcgcggttcaaaagttagtaaaaactctgagcttttgaatggtaccggtgccgaagctctacgctgaaatttttcttggccgcgaagcgattgaaataattcccccccttatctttataatttatgtataaagaaatttaattttaaatattgcgttgattcatttttctgaattatttctaattattcttgaaagcaaactaattttaactataatataatcataatattaataaagaagcatgtgatgaagcaaactaattatattttttatgtaaattaataaaattacaatattaataattttatacacataagattaggttatatatacacatttctgtaaataagggcatgttgaaattttggataaaattcaacagcctggaccttcttattttaatattattaattaaaataggttctttattattaaaaaaaaaaaattaaaatagataaatattatgagtcaaaaatagtcaacatgcgtttatataattgtatatttatataattttcaatttattaaaattattccgtgaattaagagaatatatactaacatattaaaagaattgtgctaaataataatcaaaaatatatataactctaataaattattaaattatataaatctttatgaaaataatataatatatcaacaaccagatcctcatacagaatacgttctaatagattacttataagttaatcttaattaaagtgaattttacatttaaaaatgtaaagaagtaaataataattgttttctaaaattaactttataaattgattacaaattcaacaaacaggttgcaaaattaccaaaaatatttaaattttaaaaagcgagaaaatgcatttaagtatatatattttaattgataatgatattcataagacataacaaaaaattaattgtttctataaaataaaaaaataaattttcataacaagttattttattctacttattttgacggaccttattaaatataatggagctaattaaaaacgaaccacgtcgaggtcgtaaaagcttgttaattacatttatgaatataaatagaaagctataattaaagttgaacaaatttaaaagaagtaaatctatgccagcaatttatatattaaatacaatgaatggtatcatgaaaatcaaatggaaaacatatttaaatagaagaaaatattaaaaaattaacaattattctaaacaaataagtgtaaacaaaaaacactaaatcctcattctgtgccaccggctgctgacgcaaatcgtgctgctgttgatattgcggcggaaatggccgaactggcgatggcgtaccttccgttgctgacccacaagcggcgactgcaccaacggtgtttgctgacgcagtagcggagaag

SEQ ID NO: 3933 - DNA, 4218 bp, Heterodera glycines
tgacaaaaagccaaaaaagtgaatttttactattttaagtgacgaaacgttaaaatagtgatttctagtgacgaaaaatgacgtccaaatgaaaaaattttaacgcagaaatgcgttttttgagctcctttcttcaaaacaattgagcaaaaaaaaagttttttcactagaaatcggttccctagtgatatttaaaaatcaatcaatatcccatatttcaaataaaattttgactaaacgaatttaaaaattgagaattttgacccaattgtaaagagtaaaaaagtctttactaccggtgtgcagacaatttgtccaacagtcagcaatttgtcccaacaccatccaccggaccgtccatccatcgttgcagtgccatggcacaaacaatgccactgcgcagttggtccgcaaagtcaacagccttttgcgcaaaagcgtcgaatgctgacgcaatttcatctgtcggctgttggccgatgatggcctcacgatcagcaggtccaaacaaaggctaaatttattagtcaaaattgaagacgtaaaaaattgctaacatcttgcaatgcctttgcaagagtgacaggttggtcgtccgcgttgagtccaggctgttctggtggcacatacccgtcctgatcgtcaggaatgggtgggcagtcctcgattgggtagtaaactccacgggtggcgtaccacgcggctgacgccaatcgagcggtcgacgatcccaagaagtttgcgcggaagcgtccagcgatggttgctgctttttggaattggtgatcggtgcctcggccgtaggctttacatgaaatttattgattaacctgtgtgtaagcatgctcatatgtaagagttcttccaacttagttagtttcaagcgtagtgtaactatttgttacacatagggcaaaataaattcacatgtaaggaatccttacagaataggaaaacttgcgaaatatcaaaagaacactaatttagagcttgtagagttgcatatataccttgtttgatgtaagcgttgtagaaggcttttgcaggaggccatttcaccatttcaaggcttttctcatttgaacgcgattttcttcttttccgcattacttttgcggcgtccacatgcttttaccagtccagctagttctccttccagctgctgacgcctttgctcaacctgaagacgaagatcttgctttccctttcaccaaatggccacatgtttgattattgtgttgagcttttgattagagagaggcatgccgactaagggaaaaaagcttagcaaagtggtataaaaattaagtaaaaatcatagttattttttaaaaacattttactaaaaacatgtaacctaatttacaggtaaatttattgctgacacaataaaaaagaataaatgatgaagtggggggggggtgagaagaagacccgccgggtaaaaaacctcaaagatttgaggaaaaacggcaggggtctttgctggctgggagacgggctagtgtaagcgtttaatactaatgtaaaatacacattttaccgaaatagttatgcttacactagcatatcccccagctatggctaagtggagaacaaatatatgagttataaatttgtggacggcgggcagactgtattccttcactcttacggccctaaagagggccgtttgggttagagacgcctcgctattgaggcgcctgttgatcgcaattttaattttcaaaacattcggccacccgccggccaccacccacccgcccgtcccaatggggacagccgttgggggtgacaaaacaaaaatatatgaaaaaaaagaattagtggggggtcttctccgcctcctcctcctcagccagctgcatcagcattctgacgatgctgttcttagcgtccagatgatcgacgggatgaccggttgccaacgtcagcagcgctgcgggcatccgctgtaaaacaattttttaaaacacgacatgtaagtaaagccaacagctaacagaataaactgtactagctgtaagcattttttaactgagtgagacaaaactaaccccaagggaacgaaggtgctcccgctcctcttgctgacgcaatttgtcctccgcctcttgctgatgcaatttggcggcggcctcttgctgacgcaatttggctttggcttcctcttcttgctgacgccggcgcacgatcttcccgtctaaaaaaaccgcaaaatttaaatcacagaacaaaaagcaataaccacgaaacaaaacaaaccgaagccctcgacaacttcgcagagcaccttgccgtccaagccgcgcttgtcagacaaaaccagccgcatcgtctgcttatcctgtggacaggtgcgaaggaactggtggtacttgcgcacaatgtcctgtttaaagaaataaataagataaattgaaaaaaatttgttttaaaccttgttgaggcaatgtttcacggtgcggtggcttgtctgttggcacgcaaaacacatccattttgtcgattgcggcggaaacaattcattggcacttttcgctgccgctctgagttcctctacaataattaagaaaatttataaaatatcaaaaaattggtagttgtccttaccgagcacatcccatgctgacgcaagtgggatgcacattttctcggcatagccgcgcgcatcgaaacggcgttttccccacttgaacgtgagttccttgcctgctgacgcaattgcggcaaggttttcacctgaagtcgtctttatatttaaaaaaataaataaataaatatacgccaagcagccaatgtccagcagtcctttggcttgtgcccgcgcaatttgcagcactggcagcagcaaaaaagaatgatattctcagcctgaagtccaccatcttcgcaggcggcggcgattattcctaaaaatccatttccttataattagaaaaacatagaatttggttttcaaaattagaaaacatagaatttggttttcaaatttttaaataaataaaattaaatttccaaaaaaacacctttgtcaccaggacagttgctgacgacatgggtgccgaacaagtggcagaaactgcagtacatgggcccagcttccaattccttgcgctgctgacgccgtgcatttgcagcaacctttcgctcttcctgttgcccaagccatctgtactgcgctgctgacgccgacgccgactgctgctggcgcaagtgacgacgaggaagaggatgaggtggaagaggagaattggagataagacgagagtacatatttttgatacaaaaaattaaatttttggctatatttataaaataacaaatatttttatagcttatttttagtggttggaaaattttaataattaaattttaaaaataattttacaattaaaatgaaaaacaatgtggcacttttcgctgccgctctgagttcctctacaataattaagaaaatttataaaatatcaaaaaattggtagttgtccttagcgagcacatcccatgctgacgtaagtgggatgcacattttctcggcatagccgcgtacatcgaaacggcgttttccccacttgaacgtgagttccttgcctgctggctgacgcaattgcggcaaggttctcacctgaagtcgtctttatttttcaaaaaataaataactaaatatacgccaagcagccaatgtccagcagtcctttggcttgtgcccgcgcaatttgcagcactggcagcggcaaaaaagaatgatattctcagcctgaagtccaccatcttcgcaggcggcggcgattattcctaaaaatccatttccttataattagaaaaacatagaatttgtttttcaaatttttaaatcaaataaaattaaatttccaaaaaaacacctttgtcaccaggacagttgctgacgacatgggtgccgaacaagtggcagaaactgcagtacaggggcccagcttccaattccttgcgctgctgacgccgtgcatttgcagcaacctttccctcttcctgttgcccaaccatctgtactgcgctggtgacgccgctgccgactgctgctgacgcaagtgacgacgaggaggaggaggtggaagagtagaattggagataagacaagagtacatatttttgatacaaaaaattgaatttttggctatatttataaaataacaaatatttttatagcttatttttagtgggtggaaattttta

SEQ ID NO: 3934 - DNA, 2904 bp, Heterodera glycines
  unsure (1)..(2904): unsure at all n locations
tatttatactcgttataaaaatcttntaattctgatatttttcatatttttagaattntaaatgaattccatttcttgttaaatcgtctcgatagggtataatcaatgcaaaagactgacagctaaattcattatattctaaatattaaataaagaaaaatttgcatttcttattattctttttttattgcattatttatttttagtgtgttttattgaagatttaattatgcatatttcttaatatcatgattacttatcgatttaggtcttcacgtggtatgacagcaattaataaattatcaaaaatttcagttttatttaaattaattgcaagattttcattaaaaactattatgattaacttatattaataatacataattaattttcaaacatttttagggtatttaaataattttaaccttaacgacaggatcagttttttcaattagaataaccatattgacgtttcatcaacatttctcagacttcattttgatcgattagatttattaaattttaagcaaattaaaaaaaattaatttttataataatttttataactacataggtaatttatcaaaatattgatatttataaataataaaatttctaatatgggtttacaaaaagatttattttcattatttattatagtttttgcaagttacacacaccgtttcaaaaaacgagatgtgtaccaataaatagagagtgccagagaaaaacattatctttttttctctaattttttgtctccttttggcgtactatctaatattttcattattaggaaaaacaacatttacttcgctatgtttagcttcttttctatatgttagatccacaccaaattttgcgaatcgatagagaaaaggaaaatgagcaaactttcagtgttttgagtaaaaattttggcctagaaaggtattcaattcgcatttatctgaaatgtttttaattttttaggatttatggttaaaaaaaattattgcttaagcttcaaggcagaagaggtgctgaacaactgaaaaagaggcgagaggaggaaaagcgcagacggagagggcgagacaaggccgatgggccaagaaaagtgagttttttcatcaattttatatcaaaaaaattaaaaaatcattttttttgttttccagccgctacacaaccgaatcccaatgccgaaatagcaccgcagaacgaagcagggccgtcaacatctgctgcatcaacggaagaagcggtggagcctccgccaccagctccaggaccagtgccaacgccagaatggacgaggaaattttggaatttggcttctcggcaaaattcacaatttttcaaaagtgttttgtccgattttattgagataaaatcataaattttaggcacaaattttgtccccaaatgacctggacggacttgagcgatcaactgacgatttcaaagtatttttggcagagcaggaccggatgagtgcctttctctcaaagaaaccaaggccttattctactcttccactttgtgccatttgcacgacaacatcaattcattggccttttggatgagcagggtgaaaaacaaattgcctaattagcacaaatttttaatattttcaaggtgatgaagcgcttcattcggtgtggcgaagactctaacaatggtggaaatgtatgcctgacgcggaacaaattttgcaacaattggagcaccatttcgtcaacaattggctgctggacaccggaaggattgacgaattgaagcgggtttgttttttcaaaaggtttcccatttctgaattctcatttttagaattatgaagaaagggagggtgaggatgacacggataaagaagcggcggaagaaattgatgacgaatgccaaattgatgtaatttaacaaatttggattaaaggatgattttcaaaaaaaaagtgaagtaacaaaatgttttatcatttttgtttattttcagaatatttatttgtcattttacaagtcttattttgcttaaaatcaccaaaaacgtccgttaacatggatcggattcgaacctggaaccccccttttggtgactagcacatataccactgagacaaaaattcaaatctttttggaactgggaggaaaaaactgaaacggtgtgttaagttaactaaatttatactatttaaagagcttatagtggacttaagtctaaaaatttataacgatattattaataaaataaatttatgtataaagaaatttaattttaaatattgcgttgattcatttttctgaattatttctaattattcttgcaagcaaactaattttaactataatataatcataatattaataaagaagcatgtgatgaagcaaactaattatattttttatgtaaattaaatgaataaaatttcaatattaataattttatacacatatgattaggttatatatacgcatttttgtaaataaaggcatgttgaaattttggataaatttcaacggcctggaccttttattttaatattattaattaaaataggttctatattataaaaaaaaaaattaaaatagataaatattatgagtcaaaaatagtcaacatgcgtttatataattgtatatttatataattttcaatttattaaaattattccgtgaattaagagaatatatactaacatattaaaagaattgtgctaaataataatcaaaaatatatataactctaaaaaattattaaattatataaatctttatgaaaataatataatatatcaacaaccagagcctcatacagaatacgttctaatagattacttataagttaatcttaattaaagtgaattttacatttaaaaatgtaaagaagtaaataataattgttttctaaaattaactttataaatt

SEQ ID NO: 3935 - DNA, 1304 bp, Heterodera glycines
aaataataataaaataattgatttgttttatagctttttgtgctcataaatttaatgttttgtcgtgcgatggaagaaaaaacttttgtcgcagttgaaagacaaaaaccggtgccaaagccacggcgacaccacacaattggcattttagcatcagcagaaggccaactgaaaaacgaacacccggacaaagaggaagcggaaaaagcggacaaatcaaagggaaaaaatggggcggaacggagaaaaagtgtggaagaaaagcacgaaacgcaacagaaatatgggacggacgaacagcagcgtaacggggtcagttggtcattcgattgaccattaggccaattgtccattcttttgacccaatcgatcactctttggccaattgtccattgttttgaccaatcatttaattttttgacccaatcgatcactttttgaccaattgtccactcttttggccactgtgaccaatcacttactcttttgtccccaaatcgatcattttctgaaaaatatccttgacccattttacgctttctttttgaccaaccaatcattttttggcctttcatttttattctttggcctcttttaaattgtcaaaattcagacaattcgctcatcgcagcagccaacaaaaggccctttcaaacaacaaaagtgggaaataaagacaaaaaattaacattttatcacaccaaaacaaaaagaaatgcccaacggaacatcggaagaccaaaggtcgagggaaagcgattgccaatggtcggcaaatggcaagacaaagcgaatgaggacaaagagggtaagtaagagcaattaggggtattatgcgaaatcagaatcattcgtcaaattccctcgtcaattaattgactgaaaatgccctcgggggttttgaccaattgcccaatttgcattcatttgtctccacaattttctcatctgttctcatttgtccgttcctttctctctttaattaatttacaatttattcatttttcgctttttgtggcaattaattaattagttaattaattgctgtccttttttgcttctgtttgacaaaatgtcaccacaattcgttctgcgatactcagccattaaaatacgaagaaaagcttaagaagggggacgaatgaatgaatgaattgggtggaagggatgagcacatatttattcatcccatccatcgtcaaaggttttcttcagcagcggtccgactaagggaagggaagggaagaagaaagtgtgatgggacgggggggaaacggaggggcaatcgaatcgatacgcccccc

SEQ ID NO: 3936 - DNA, 2107 bp, Heterodera glycines
ccccccccctcccccgccctccctctttctctcccccgcccctttttctgtcctttcccacccttttttcgccaatcctttcacagacaaaagcaaaatattattgtatgaatcattagaataacaaattacaatatcactttaacaattaaaataaatttcacaaaaatttgaattgtttatgattatttgtttgggcaacaaaaagagtgttttttgatttgttcgatttagaaaagccccaaaaaattggcccgaactctttggaccaaaatccttcggttaactccgaccaaaaccaaacattgttggaagaactgctgcacgagtgtctgtctccgcaaacggcggaaatggcggaattgggggaacgaaatggggggacggagacggaagaggtggacaaaacagaatggaaaaatggaggaatgggaggggcaaatgagggaaatataagggccaaaataattaggatttaaatagtgtttttgccatctttcggcatttccaattagcccaatttgccccagggaaaacgcccgcgcttctctttggaccgtctcgtgccgcctcaactgttcgcttcggaatgcgctgctattactcagcagcattctgctgcaaatgtttccgcttccttttccctgaaacggcacccttctgtggaaatcgcgtgccacggcaccgtccgattgatcggagacgaagcgacggctcaagcggaggaccagcgaatggtattaagtggccgagcggttgcagatgcggccgtttgtcccggggggtccgccgacagcgactcgtccaccccaacgaccgcctccccgtcgcttaccccccgctttgacggtttctcccggacggactcaccgcggcaaagaatgggcatcagtctgctcgaacgccttgtcaaatgccaccccatttggtttttgccccacctcaatcggcacgcggttgcgcaccttttgaccgcacaacccccgggggtataaaagccgaacattccgtggggcaatccatcgcttaatcattcattgataggtgttcatcgtacgagcttccagccgtggcgttcgttcttccgttggcacttcgccaatggcaaagcgtcgcgtcgaagtgatggcactgagtgttcgcttgcccactgcggaaaacggagccgtgtccgaggcatgtgagcagcccgagttggaccattttttgatcgaagccgtggggacgggcacggcggtgcgcctcgagggatcgccgtacacgtaaaagggggcggacgcggggaattcagtgaattttggattatcaaaggttcaacagcttgcccctattgctggagcattacagcttggagggggagggcgaactgaaagtgcgattggcgttgccccaaactttggcattctctgaaagcattcaaacgctgcagggaatgtctttgatgggccaaggtgggctttctgctgattatcattatcgtatataaatgaactcgtctaattaatggggtaattaggaggttaatggaccaacaattagttaattattgaaaggcataaattataaagttcgaaatctgtttcaaacggccggtcactttacaatttttcttcgcttgtttcgaatttcaatggtcgtcaatcggaggcaatttgaccatgacccaattccctcgggcgaattgcggacagacggaacttcgctattttaagccccgagggaaaggcggagaatcggcaaaagctcaattggaacactgagcatagtttagcatcaattaaactttaaagatcggattcatttataaacaaacatttctcttctctttgatcccaaattgacttttctttcccttttttattaatttgtccccaaattgcaataaaagccatccattgtccccgctttaatgagttggtggacctgttttttcttctgctgccctcagcttagaatgcttttggcggaataaattggccaattagccaacagtttcccaaccctcctcccccattattcaaattcccttccctccccctcagatttttggacgagtcccctctcccgctgctcccccacctcctgcgcttcctcctcctcctccttc

SEQ ID NO: 3937 - DNA, 4413 bp, Heterodera glycines
tcccattttcccccacctccgccttctcccaccccttcttcgtccaccactttcctccattgcccctcctcctcggcatcaatggagcatttccctgctgaccatcatcggcaccactgctgcttctgctgcagcccttgcccctccaatcagccgcattgccatggccatggtcagtgagcattccctttcattttgttttgaatcaatctttccgctttgttcagtgcctttgcgcaaaagtcattccgtccatggccgtccgttgaacgctccgtcgtcgcggggctgcgcgtgggaaagggacggaccgccaccgccgtctccgcggagtctacgcgagaggcgcgtgggaaatggcggctttttgcgcggattattttctccgtcgccgcagcgaaaacactcgtcgacgaacagaacgacgacaagcggcagaagaaggacaatggcaaggaatgaagtgtacggaacgctgtgggaagagccggaattgaacaacggcaacaatagcagcaggtcgagcagaacggcacaaatgatcaaaaatcaaggggggatgtctgatcagccaaatttgaggaatgacactgatcagccaaattggggggactggcaccgatcggtcaaattaaaaggaatggtactgattagccaatttcgagagtatgacaattaattaatcatgggtattaaatttcgtttatttttcagcgattggcttgcccatcaacaacgcatactttttgcgcgcgaagctgaagaacaacagaaaagcggcaaatcctttttcgcccgacttaagggattcaagcggacaaattccactttttctttgggctcaaaacgcgacgacaccaatggcttatgcttcgatgacagcagcggcactttaacacaaagtgacgcccggggaaggggtggggtttgaccatcatttttaaaaatcttgccaaaaatactaaaataaatccgtctgttttttccatttgtgcctttcctctcatttcctccgcttcagtgagccccgaagtgttgcgcgcccgtcagttggcctttcggcggacgaatacggacaccggcggcggtgccatcgcttcggcgttggtccgactgaaagcactgaacgaaaggacaccgcaaaaagcagaagcgagcagcagcagaaacaatatttgcgaacggccgacgcgcaatttcaattttccgctcgcccgcgtcttaccgcagccgaggaaaacgaatgcaaacagagaaagggagggggaagagacagcactgacaatggcggaaaggcaacgaggggatgagaaagagtgcaaaacgccagcggaagagacagcgcaacagaagcaaaagtgagaacgcacttggaaccccgttgatcattaattagtgcaaccacaatgatcaacaaatcacttaattaactgtttttgattttagcaacagcacaactccgtccgagcccccgattcttttcaaaattttaaaagattgatttacgcgtattatttataatgccaaaattaaggttctgaaaaaaaattaagtttccaattagaagtttatgttgtttttttcattttttttcatcgtttagctaatttatttgttattcttaactttttgattttgcatttttataattttagttttgccattccttcggcggaagaaatttgttcgacttcatcacttcaccgtcgagccgacaacagtttttccatgaatagaaataagagcgaccttccccatatttcgctgcccatcaaccgtttgttgcaacagaaagggacaacgatggacgcctttcctatttcgggccagcatttgtcgaccacttccaaccgtttacgacaaagcaacgccatggaaggctttgagcgtcgcttgggtgatgagaatttgggttggaagaaggcgaacgacgaacaccgaaacagtacgagcacaacgaattcaagcagacgaacttcaaaaacagcgatagccgcggtgagagagaaacagcagaagccatgggaaggacaacgcattcgcaaacattaaaaggatcatttacctaaaaccaaatgaaaagcaacttaaaaaataacaaaaattgaattacggggagaaatgtgagaaatattgtgtggtttttttttgaaaaaatttaattgatccattagatgggttcgtatttatagcaattgctttcatttctcatgtcatcattctcccaaaaagaacacatgcgcgccacttgagtgagacggggtaattagagcacttctctttcagcgtcgtctttatccctttttatattttatatgggtaaagaggcgctcatttgctaacccatttccattattaactgctaacaccttttcgttttgtgtttagtgagtccattttcaggtgcgtcctcagctcaaacaaatgcaactcaatggcatttcgacaaaactccgaaaggcgcccgatgtgccgacaaaggcacacagttccgactactcattgctgggcgaaatgtttccgcaccggaaaagcagcgaccagcggaacagcggggaaattgcaaactcacaattagccacggatggcaatgtggacgaaactgcgagacacggcttaataatgggtgagtgaaagggggggggggaaactgattgattgggggcactcatcgtcaaatattgtggcaacagatgaggatgaccagcacagtttggctggcactgatttcaatgagccgtgggattccaatgcgtgggagaatctgatggatttggcacgttttggcgatggtcaggtggaggaaagtccacgcgcgtcgcaaatcggtctcttttggagtgtttaacaaaaagacaatttaattttcagaaaacgacagcttggcagtgatggagaaagcggcaaaaatggtcaattgtttgcgcactcaaatccctcattttacgaccggagaacaccggcggagtttgatgagagtgcacgggaccaactcgatgatggacatttctgggatcggctccaacaaattgagttatccgatatcaacggaagccgctaacgaacccatgagagctaacggactcaattttggccaaaatagcatcggaaaacaacaacaacaaatacgccatcatcggcccgtccctgcctgctcgtcgtctgtcgatgaactcaacgcttacaatcagccgaacaaagtcacgtccatttgtccttctctcgtccccgtctttttgtcctctcgacttcgcaatttggcacacgaacatcccggagaagaggacccagcaaaagtcatccagcgatatgttgaagagtgagtggacacggaatttacagcccaattttgggtctgatgctttttgttttaagcctttccaaggatgaccaaactcttttcgaggccgctttgcatcagttcatcgaatgcactttgctttccaaggagaaggatccgtacgtggtcattcggcgagtgcgacagttcatcaccgggtcaataaatcaccagtgttttggcgtgacgctgcgctcccattttcaggatgaagaattatttgatgaaaatcggtgaggccgatttgcatccgatcattaagcgggagagaagtcgactgaacatcgacgaattcctcaacatcgatgcgatcctcgaagaagttctggtcaagattctgttgtgtgagttttctggagccaatggggtttaaaaattagtttctaccatttatttaattatattttcgtttaccggtcggtcacattttaattttcagccaaattgaaggcccatttgtaccgtctgatgattttggagagcaccagcaacggcgagctgagaaggctgtctgagaacattgcgcaagtgcgtgcgatgagtgcggctgagttgggttttccggagggcaccgaactgccggacagcgcccgcatggaacagattagcagacagttgcgcaaaatgcagaaccattactcgccgttgaagaaagtgcagctgctgctccgcgtcctttcgttggccgtccctttggccaattcgccgtccgcttgcgcaaatgaccattcgtttcggcaacaaaaccatggccaaatgggcgaattcagtccccaaacgccgaaagcgcatcaaaacagcggcagcagcagcagttactacgcattgtctcccgcactctccgccgtcagacatcggaccaattcggccagttcctcctgcgtcgctgctgccgccctgaaacacccgccggccgacggtcgtttttcacaatttgactaattgcaaccgtcttatattctacggcttcagaattaatccgttggctcgtctatttgttggctcgcagttcgaccatcaattgcgaaatcgaggcttggtacatgtgggagcttcttccgcaacagggtccg

SEQ ID NO: 3938 - DNA, 1570 bp, Heterodera glycines
aacagcctatggtacgacgcttttttgatgaatttttcatttccaccccaaatgaatgcaatttaggggaaaattcagcatgcgcaatgagctgggcgcaaaccgagtcatcacaaaaccacaagaattctacaagcttgtccttgaccataaagtggtaaatgtctaagctgcttttttgttattaatggccaacaaaatgatggatgcatttaaggaaatttatgcaattattcctttgtctgatgatgtcatcagggtctcgtacaggacgaaaaaaaattttgtggacgagcattcgtcaagcaatattatgctcagcttgtggacaacgagtatgtgtgccttcgttcccagacaaacattccatcatcacatctctcattttataggtcgcgctaggcttaaactccttgactctatgcaacaagttcacgagacggaaggggcagaattgctttatacggtaatttgtagagataaatcatcatcacatcacgatagtgtttctttaggacacagacagcgtgattgtgaagcatcggcgcgatgtttctccacttcagactggcgaattccttggacaaatgtcggaggaatatgccggctatgccatccaatgttttgtttgcggaggtaaatagatggtggctgctggtagctttattctttaacatcattttttgtacaaggagcgaaacaatacgccttaaaaatggttgatgagcgaaccggcgaaacccgatatgtgcaaaaaatacgcggcataaccttcgatgtgcagaacagccaagcactacagttcgagcattttcgtcagaaagtgttgaactatggccgacaaggagaggcgccagccgttttccattatgacaaaattcagccaacccgcgggagtcagattgtgacacgtgagcagctcaagcgatatatgccggtctgccaaaagggaattatcaacgaggcgctggaagttcttcctttcggttttgagtgaacgcacagttgattgattggttgattgattgattcagcactccttatgtgttaaccgtttataataaaaaaataatttgttgttgttgtggatgccgattttaaagttttaactattaaaacacttcaattaagtagcacatttattgttggaaactatatttattttctcgaaaataacggtagcgaaaaaatatcatattgaaaaaaaacacatgttaattggtagaatcagggctcagttgcggtaaacatatttcaagcagttcaattggataataataacaatggtgattgcccccatgttggacaacacatggaaggaaggggaatctgagacgaacgcgatggcgagcgtacaagtgctgctctaccgttattgacaaatagccacggtaggcacaaagacgatccgcaccatgaaatgacaatgaattggccgaaatttcaatgttattcttcagatgaacagtctttagcccgagatcaccaagaaagcgtaagttttccatccgtctcttctggagcatttgcggcaaaagcgatggcatgcacccagccgtgaagcgacaca

SEQ ID NO: 3939 - DNA, 5970 bp, Heterodera glycines
agcgatatatgccggtctgccaaaagggacttttcaacgaggcgctggaagttcttcctttcggttttgaatgaacgcacaattggttgattgattgattcagcactccttatgtgttaaccgtttataataaaaaaataatttgttgttgttgtggatgccgattttaaagttttaactattaaaacacttcaattaagtagcacatttattgttggaaactatatttattttctcgaaaataacggtagcgaaaaaatatcatattgaaaaaaacacatgttaattggtagaatcagggctcagttgcggtaaacatatttcaagcagttcaattggataataataacaatggtgattgcccccatgttggacaacacatggaaggaaggggaatctgagacgaacgcgatggcgagcgtacaagtgctgctctaccgttattgacaaatagccacggtaggcacaaagacgatccgcaccatgaaatgacaatgaattggccgaaatttcaatgttattcttcagatgaacagtctttagccgaagatcaccaagaaagcgtaagttttccatccgtctcttctggagcatttgcggcaaaagcgatggcatgcacccagcgttgaagcgacacagtgccttcactaggttaagcggtcggcgcttccctcgtcttcttcttcttcgacgacgccccccgggttgtattggttgtccatcagccacaggtccagctcgtccacgatcagcagtcgattgggtaacaggttgttgctgttgttggtttgtgcgaagcgacaacgaggcgactcgcccgggcaaatcttcatgtcctttagctccacatataggggttcgctcctaaatttaagaaaaaaattaaatacagttattgctctaactcgtttaccattcgatactcccggtttccgtcttcgggtagcatgttgagaagagttccagtccggcaatcagatcaagcgttccctcaacgagcaccggcaaatcgggatgatcgtcgttggaaatgtgcacacaattatacacgcaaagaggattcgggtaatattcaccaggggcactcaaaatctcctctttaaaataggcgtacagcgcttcaacgctgtcaagtgcaagctcttgttgaaaatgctttatcgctttttgcatgaaacaacggccaggacaatataattatatttgtcgatcataaaaagcgcttgtaacttttgtgcaggtacatgtgtatgggcaaattcaaaaatgtgagccgcttaaatagtggcacaagacctcaactggtgggatagcgtggtatttgtaggattgtaagcagcaggaacaccataggctccgcccccattgttgttgttttgaaatgatagcgagtggaaaaggtcatattcattcagttccatagcgtgatgcccatttcgtgcggatccgccatcagttcccaatcggcggaaatggcggaatgcacaaatggcaagcaatatgacgacaagatcgaataggtaagtcaaagcgagcaagagacgttcaattccattggacgacaccgctggtacaacaatagctgatctgctgtttctacggtcgccgtcttcacccaacttttcggcacctgcttcaaataagaggaagttgaagcgaatgtcgcttgagttggtcagaaactggagctgtgacgaaggatcgttgaaatagtgtccaatgcggaacttgtacactcgccttcgccaaatcatgtacacatggtcagctgcaatgaaataatccgttttttgttccggcaaaaagccaacaaaattgcttctcagaacatgtgccgatgttgtgttcaacgcatcgtccgtgttattcagtgtccaccaccgctccaaatcggcaatgagcaactcattgattcggcgttcactcttgtccacaatgtacaatcgggcggcaatatgatcaaacaaaatgcggccataagcgctcaattgccgtgctatcttttgctggtgtccacgcagcacggtcacctcacccgcgtcattttgaagattgaaaattacaaaactatggccgccatgcccaaaacatgcccatggtaatgcggttgacggtatctcaattgttgtccgtcctaagctcattaaattatccacatctgtcagggcaatgttccatgtatccgggttggtgtacagccgattgatattcctctccagttcaacatgacatgcggtgtcccggttatagccgaaccaatgttgcgcaggtgaagtcttggaaatggtgcggaatgaacggtcaaaaaagtttggtgggtccacactcagctctacattaatccattcgccggaagatagatggagaacattgaaaaaaatgaaggcgatcagcaagaaataaaagaatgacgacatccttctgttctctcaatgaaagaaacaatgtggtaccttctccacttttagtcggccttttatacatggcgagccagtgtacgtacataccatttaactaaccagtccgccatcccacgcgttttgcgcaatgtttcaacaacgtcgcaaaacggggtgccggaacaacgactggccaagaaatagacacaaaaatggccgcaagcgtccgatgaagggaactgaatttgatgcatgtttacctgcacatgctgaaacttgttgagataggcggataaatcgggatttggtgccacacctaggctgtcaaagtattcaatttgcgttgcagatggcacgtaacaagccacccaatgctctccgcgtgtgccctccttgtctgtgtttacaaccatgcagtgggggtagcgccgcattcgtttctgcctctcaagaacaggcggtattttgtttgatggataaacgccaatgaacttgccgcttgtaacacgcagccttttgagcaacacgtctatttgtgctgaattcatctctctctttcactgtttaaacacttccgtcggtgctcaacactcggtcagcgttgatggaaaggacagaatcgaactcaccaagaatcaacatttcgtaaccatcctcttttataggcttttcgagttggaccttaagcgtgcaagtgccctgacggatcaactcaaacccgggcgtatcgtctagcgtggaggtcatcggaattacgaagaaagcccatccgctgaggaagcgttgcatcccaatggacactgtttttgtgtctgagtcatccagaccgagaccggcgtacatgtcgacaaaagcgcgcacaaaacgttgctgcgcatcgtcaaacgacaacaaatatggcgtgctcggaaaagcttgaccgtttgcctccgcacagatcgatcgcacgtttgcatgttcaaatttaaagggcgacaaccgtcgattgccagaataagcgtctgtagagacaaagcagcaaatcagacgacggggcaaggttgaagtgaacacgttgtgagccaactcagtcctgcctttgcccaggaaaatggagcgcatctcaatcttacgaagagggtatttggccgaggtggactccaactgacgactgattgccaggttaaggctaggcgtaacgtccacggtgcgaacataaacacgcaaatcgtgcacacgaatacggtattccttactgttttcctgcaatgttccgtccgctttcttccaaggaggtgtaagcaggaggaaagaatcgttgttacgatgaatagtgaatatcacgtcctggttgttcagcatcagtgcattttggtgtgcaagatcaaaattcagtttcaccatcgtttcgcactgttttccgttggaaaagcgcgatgcacgggcgatgaagccatcattggtgccactgtcttggccatcatcctcatctgtataataacacgccgcctcatggaaagctttgcgaatttcatgggagtagcccagctccttcattatgtaatcccgataatggtaatagatggagctgtcgaacacctcaatgcccgaaatgttgatcttcaacgagcgcacaaaactgctgccaaagttttggattacacccacgcgcttatcctccggctctgcatcactgattgaaaccattcacctgccccattcttgcgctcaatagagctgagcaagtacaagtatgttttgctcaagtcgcagtactgactgtccgaaaacaaacggaacaggtacggaccggtctgattaagtgctgacagtggcaacaactcgcggacatttgtcttattgatcgccacattcgttggcggaagagaaaacaacgaaaggctaccctcaacgccttcaacactgtctttgtcaatttttttgattacgctcattagtgttgtttggactaaaattatgcgaactgtgtgcggtaagtagacagaaaattaatttcgacacctatttatagatttttgtgtgtgggctcactataacgggcgtgcgtgcttgccaccgtgtaatttatggtgcaaatgtgagttggtctattgcctgtcttttgttgcctctcagcaaatgcattggcactgccgtcttaacccttttcaccggtctcttcctcttccttgcgggcgcaccctttccacactgtttcaatttttcggccaaattttccatcccctgctttgtgtgtgcctgaatggattccttaagtgcctttccctgcgaaagatcctccattatgcggctcccggcactcactccctcgcgtgacatcgcttttagcatgttagaagctaccggcatcaggaaccgggcaacatttttcaataggccagcaccacgctgatgccgtgtaccaacaaaatattgcatttctccccttccctcttgttgtagagcaagaagaggcgcccaattaatggtgtccgggttaaacgcgacgtgagtcatattgcgcaattgttgttgttgttgttattaaaataattttcgtctaaaatgcagtgtgacaatgctagttccccaattaaatttgacgtagcgtccaaaagcgttctgaatttctatgcaaatttcggaaatgcgtttgttttgaagtgaatgaaaaatttcattagtatatataacctcaggcacgtccgtccctcccccactggcaggtgcggccgaaacattgaccaccctaagcagaggcgccattcggtcacctatgatacactcctcaataagctttggagcataaacatacaattgtttaacaccaccagacagatctggcatatagcgtgcctgttccccatgaaacagacgagtgttgtcaaagccgagcacatatgcaagatgcttacttacatccacatgaacgacgcctgcaccggttatcagaacaaatcgttgtgcaagatcgttgaacacaaactcggcagcggttgactctttttgctgcttggcgacaagtttttcaaaacttacctcttcctccctggaaaacttcatatgttccaacatcaactttaaaatttctcctcgcgtttttgcagaggatttatgcaaaggttcattttgtgtttttttaatcagttccttcaatgcttcacctcttctcgacgtggaaaacagaagaaatgaattctgtatatggtgccctaaacaataagatgcgatcttagcttatttatttattttttccaattctgtttgggtcatgactagagatcagaattttacgaaaatgcggacccagaccagcaggactaggcacccatacggactaaaaacccataaaacccttactccgcataagtccgtactcaggaaaaatacggacccgtatacggatcagggttttttgaaaatattttttatcaagaaaaacatgctttttttactgtaatcaaattaagatttgctataaattttattacgaacatttaacaagttttgaccagaaaaaaaataaaattgcgagctaatgaaaaattaatatttgtaatttatattttgagagtgctttatttcaaaaaga

SEQ ID NO: 3940 - DNA, 1133 bp, Heterodera glycines
  unsure (1)..(1133): unsure at all n locations
ttttttgattacgctcattagtgtgttgggactaaaattatgcganctgtgtgcggtaagtagacaganaataatttcgacacctatttatagattnttgtgtgtgggctcactataacgggcgtgcgtgcttgccaccgtgtaatttatggtgcaaatgtgagttggtctattgcttgtcttttgttgcctctcagcaaatgcattggcactgccgtcttaacccttttcaatggtctcttcctctttcttgtgggagcaccctttccacactgtttcaatttttcggccaaattttccatcccctgctttgtgtgtgcctgaatggattccttaagtgcctttccctgcgaaagatcctccattatgcggctcccggcactcactccttcgcgtgacatcgcttttagcatgttagaagctaccggcatcaggaaccgggcaacatttttcaataggccagcaccacgctgatgccgtgtaccaacaaaatattgcatttctccccttccctcttgttgtagagcaagaagaggcgcccaattaatggtgtccgggttaaacgcgacgtgagtcatattgcgcaattgttgttgttgttgttgttgttattaaaataattttcgtttaaaatgcagtgtgacaatgctagttccccaattaaatttgacgtagcgtccaaaagcgttctgaatttctatgcaaatttcggaaatgcgtttgttttgaagtgaatgaaaaatttcattagtatatataacctcaggcacgtccgtccctcccccactggcgggtgcggccgacacatttaccaccctaagcaaaggggccattcggtcacctataatacactcctcaataagctttggtgcataaacatacaactgtttaacaccaccagacagatccggcatatagcgcgcctgttctccatgaaataggcgaatgttgtcaaagccaagcacatatgcaagatgcttacttacatccacatgcaggacgcccgcaccggttttcatgacgaacccgttgtgcagatcgttgaacacaaattcggcagcggtttgctcgggtttctgcttagcgancagtttttcaagcttacttcctcctnccncggaaacttcatatgt

SEQ ID NO: 3941 - DNA, 1254 bp, Heterodera glycines
tttttcattttattgccctacgagaattttatcaaagccataaaaggcaataaaagaaaatgatgaacaaatgaatgaatgatgtgattttgtgaaattgcatttgactacattttttgtcggcggaagtcggaaatttggggaaaaaggaaatggaaaattggaatggtgaattttgatagaccgaaaaaagtgaattattgagagaaattaaagggggggggggtaattatggaaattaccaccaaaaaagagagagtcagaaaaagaatggaaccaaatattttcttttttttgcttctcttcctaaattgtctctcgctttgtaattcattatcaatttgactctttctcttccccccccccccctctctcactctctctctctcgttctctctctctctttctttctttctccctcgctctctccttctcttccttttcccttctatctttccatccttccctcccctttttctcttttctctatactctttctttcctccccttttactctaatttcttcctcttctttttccctgtactatctctcctcccccgcctttttgtcactaaattcacaactatttctcaaggtcactttcatcagaaaaactctgaaaacaaacaaaaacattggcgcaaggacagcagacagacacctcccaaaataacccaaagcggcgaaattgggccaaaagtcgccgatagtcccgccgacgcaccgacacttcccctccccccccccaattgcttttgttgttttagcgtaatgccaacccccgcaagtttaaatgtctcgccactttccttccgtcccgtctttccgtccgtctgtctatgcttttttattttttgctatccaccgcctttattcatcctcaaataatgaaaggaatgaatgaatggttcgtttcccctttctcttatcgtctgtctgtcctcccccccttaagtgccaaccccattaaagacaataaatacaacaattacatacatttggcggtaatcacgcgtgctctccccccattttttcttttttttctccgtctgtcccgagaaagaaaaatgtgatttttatttccgccggggaaaaagcccgccgccggctatgggtgggaaaaaagggaaggcgaatttcgccaccccgcgtcacttttggagaaggaccaaattccccatcgtcgaaaaaagtaaaagataggatcaccgcctcgggggggggggggggggtggggttgattgtttgtttct

SEQ ID NO: 3942 - DNA, 2451 bp, Heterodera glycines
ttcgagcaaatcgagaatattaattgcacgttttgtacattatgatggttttgtttttgtttttggatcaacgtaccgttaactttggtacaatacgccgcctaattggattatttaatttccgtcgtcgtcatcactgaccgtactcagtttatgagcccatcacataattcgttaggacacaaccctcccccccccccattactcaccttaaataatctttccgatcccccagcgaaaccaaaagttaaaaaaacacttaattaccaaattatcccctcccctttgtgttgctggtatttgctgatgagacagacaagcgccacaattcgctgtctttccctgaatttcgcttgccatttggctgattgagacggcgcggactcagccggcgacgacacaaagggattattggcacagaaagtgaccaaaacactcactttaacgcgtttaaatttgaggattgttttgttgggagagacttttgaaagtaaacgattgcggaatttgtaggggataaaagtcagtcatttggtctttgaaggagcaaacacacggattaagggggggggggggggagcaaaaacagttgcgcaaaggatgacacagcggacaaagccgatcggcatgtttgcttgcatacatttgaatttgttgccaatttatcaaagccgatcagcgggggatttgttcgcactttgaaattgtttccaaactttgcacggcggactttgctttgttctgacccgcaattgccccccccccccgcccaatttttgttctgttccatggccacccaccacttggacgcgcactgtgcagctctgttgctgctcctcctgctcctcttccaccagcttttcgtcctccgccacttccatcgcttctgccgctcttttcatttgtctcttcacaaccattcggtgggggttcttcttcaattggttctggtcctgcttcaacttcgtgtcttcctcctcctcccaatcgtccgctttttcttcgcccatctgattttttcgggcaaactcttccgacgacgatgatgaagcggaaaaagaagaagaagaagcgacgtactgaagcgatggcggagagtcgccgatgcccgcggacattggaaattgggcggaggcggaacagacggacggagaggcaagaaggaacacggacagactgagcagcaacaacatgggcagcaagttcagggaggacagagtgcgggcgagcgacggtagtcgacggcattgacacgaggggcacgggaagagcggttggaacagtgccaaattcgaatcgaagtcgacggagcttgaggacgaagcgaagtggtcaaacattgtctgcaataggaagaaatataaaattgcacctttgaatttgcgataaattagtcacttttgtccgtccgttcgttttttgaatccgttcgtttgttctttcgcttggccaaatgaattaattgtcgtcgttcgtcctttcctttgtcttttctctgtgaatgctgataatttgagtgagctgttggccgggcttgttgaggtttggcggcgattgccttttgcgtaacgtttgaggagaaatgtgccgccgctgtttttgcgcggctttttaaaatacctctcgggggagggggcagacggaaggagggaggggaggggagtgaatgggaggggaggagagggggaagggggaggggagggagggacacgcccacttccttttgagagtgacgagtggagggaaagagagagagagagaaagagagagagagagagagagagagagcgagagagagagagcgagagagagagagagagagagagatcggaagaaaaacgaggaaaagtgagagcagcaagagaagagggtgtttctgtgtctctgtccattttcgtgaaaaaagccgaagagcgggaggcggggggcgggggacagaagggacattcgatgggttaattttctgtccgcctccgtccgtccgccgatcccttttcttcttcatcctccgccgattttgccgccagccgccgccgccaatgtccgcgcgttgtgcatgagcgattcgtccgtcccctcagggtcagcagaaactgactcattaaattttttcagtgccttttcatcatcattcaattttggacagtcagttatgccttttgactctaatgcccagaagcggacgacgtctgactccggctgaatgtgtgctgattgaatgattgtgcaggctagcgaattcccggggttcaaggcaattgccatttcttcgtccccataaatccgttccgaaaactgtctggatttcgaaaattcccggtcgaatttccctacgatccagaataaaacgcccagaattcacgaactccgattatgatttttgcttcaaaaaagctcggtataggcccttcctgatcatcaccactgcaaaaattcgtttggatctcttgt

SEQ ID NO: 3943 - DNA, 1920 bp, Heterodera glycines
aagagagagagagagagaagggaaaaaagtcttgagtgagtgtctgtggccgagcacaaggttcgtaacgggttaaatgtgaattgggcaggcattacaatacaaaaaatgtacaaatcgccacagcaccggccattcattgaggcgccaaaacacactttggctttggcgctgggccggcacatgccatctccggaggaaagtgcctttttaagctaatgaataattgagtccgctgcactttggcattactggggaaatggagtcgaactggaattaatgggcaattaatgcgcttttggcattgactatttttgcaaaacttttatatccattttcgatgatttgttcaatataaggccaccattgggccattaatcgtgcattttaaatcaaataatgaatatttttgtgtgcacaagttgcattaataataataataaaataataatatggcttaatgaatgtgtttgtagtaaataaggttctgctgtagtacggtaggagaagccgtaattggtgtaataataacaataaataataatcataataataatgaactgactgcgcaatggactcaataaaaaggttaattaaatgatttggtttgggccgttaagcggaagcctcggacatttcgactacaaaaacttccatgtttatttgccacataataattaatccctggacattctttcgcttgtgcattccgcctccacacattccttcgccgtctctcacaatgttttcgcaattccctcctcaaattcagaaaatttttgcccacccttggcccaattggccgttttgtcgttgtttttaaagtcagggcgatggatggccaaatttcgaaaatgctttttgaaattggaatcccccccaatggctttcggttgaatttcacagataaaaaagggcaaaatgaataaaagggcagtaaaaaaaagaagcagaaattcctttctgcgttcttttgtccctccatttccaataatttttcatttttattgccttttaatttcattttcctccctttgcttttcctctcccatttttgtctttctttgtcccttctccgaccgatcatttcgattttgttcattttattccttttttagtcattttagctattcggagcacaaagcacaaagcaataatgtcagctcgtaaaattgaatttgcttaattatttttgtgtgtgagcgtaaatcagtgagaaattctgtcgcttataaattcgacaaatttttacaatgagatggatttattcaaaataaataaggaatttgaaaatgaaatagtgaaaaattatcttaaataatagcattctcaaaattttcacatattattttttaaattctcatattatcgaatttactcaatgtcgaaaacgcagtaaagtagtgaaagtttttgcaatagttcagtgtccaaattacacagtgcacaaaaattcggtgccgctttttgctcttttttttttgtcgttggtatttcatttgaccattcgcttttaatggcgttgcgtttttgcgaattatgtaattcatagttcgtcggatgactcatcaattctccggtggaaaaacagaaaaataaaagcacggggaaaatgaaaagctttccgcaccgaaatgccaaactttgccaagtccgccgctctaaattcttttccctcgtccgaaaatatttcttcacattttctcatttaaaaatgtaagaaatttgatattttatacgactcgccgagaaaaacaattcttaatttgtttgagtgtcttttccggccaatgaacgccaaaaatggcatattttttgtacttttcacaccaaaaaataattcacacgacacaaaaggaaaaagagaaaaagaaaaagaaggggcaagagaatggacacgtcactcggcagcaaaacaag

SEQ ID NO: 3944 - DNA, 2088 bp, Heterodera glycines
cttaccgtacgccgcgcgaatgtctagtagtaaaacttcccgctacagtaccccctctcccccccatttggcacgtcaaatgccaattcattcgcttaaacaaaatccccccccccctaaatctcccgccctatcggtgcccttttaatttgtccactcattaaaagttgcaatttaaagaaatgattactaatggcactttgcaaaggcaaaaacaaattgggggtggggattttgtgtggcattcgtcggcatttggcatggcttacgtattatgacgacgcggacagtttattgttttgcactttttaactttgcttgcaattgaccttttggcctcgttccgccacgctaatccagcagtgtttgtccacgggggcgcctttggacttttccgccggagggggcgccaattcgaagccaatttttggtccgatggaatgtcggattgcattgctgaaattcaccaaaccaagctcaatgttaattatgcggaaagtatcaactttggactgaaattttcggtccaaggaaacgccgaggaaaactttcgcgacctaacacagtcaatctttttgatgtttaaaaatacaaatacgtcgtgtcttctcccaaattatcaatccaatcccacccctactgatcaaatccattctgtcccggtaccccattgatcactccaatcacttcaagttcttcactgatcagtccaattcctcgtgatcagtctactcagtcccccccccccccactgacaatttcacaatgtgtcgccgtctctccactgttcgtccggccacacagatcagcagcgcttggccagcagcaatcagcaacaaataaacgggacaaagaacattgatgccgcttcctcgaaccattttgtttgtttatttgtgtttttggtcactgataccgtttcaaagcaaaggaatgcctttgggggagagattaatgaggggagaatttgatgaggtatttagagggggaggggagggaatttggggtgttctttgaatctattaggacgtggtggtgaggtggttcccccaacactgataataataataataataatggcaaaaaagaagcgatgatgacgaaacattggagagatgatgaaaaggacgaaaaaatggtcaaatcgacattttaagatatcggtctaatgatctagggttgctccccgacccctcggggggcaaaatgtcgggggccagggacctcggggggcgacatctcggggatcggggcggggaggagctcaattgtcggggatcggggaccccgatcggggaatggccaaatttttttaacccaaaaaaaccattttttctttttaactgctcgtaaatcttctttttttcactttgatcatctgatttcgttagcgccagtaagagtgagtccaagttggcctttaaacctggggtttccatttgttcttatttataagaatattctgattttggggggggggggtatcgactaaaattattctgatttttaaatatacttataattttgaaattttatataaaatttgatcgaataaattggaaaaataactgattggaaaaatgttgctaaatgttcatatttttgacactaaaatcttattttggacttggtgtttatattttgaaaaattttcaatggaagccctgttttaaaaatacgtagaaaggagtggggttaaacagaaatttttgcgaacccgtctcaacatcgaatttgaccatcattttttgcggcgctctttttcagaaaaacttttggggaacaaaggggtgatgagggcggtggtgttaggagccgcgaggaaatttttttttgaaaatttgaaatttgttaacagattttaaataaaaataccaatttttgcaattttgggacattttttgcaaaaaaaaattgaattttggggaggcgggggtggcgaaagaaggtgtcgaaaagttttttggaatttttaataattaatattaagaaaattgtttaaaatttcataaatttttaacctttccccccttcgctgttgaattaatttcttgtatttttacaacggcttggagtcctcaattcccc

SEQ ID NO: 3945 - DNA, 3024 bp, Heterodera glycines
tgctgctgcctgcgtcttttgcggttgcagatttttgccggtctttgggcgtttcccccccccccccccccccattttctttgtttgttttttggttccaaattggggacgaatgacgaacagcagaaaaataataatatacaaatgcgacgaaataaataaataattgacaaacgatggaatatttatttctttttggaagcattcccttattaaacaaagtgcacgggcaaagagactcattcatttcctattttaacaaatattttttataatataataaatgacaaagggtggtccatcgtaaaaatccaacgcatcagcagaatttgcaggaaaaggaggccaaacattggaaaaacagataaaattagagaaaacataaagcattaatcagcaaaaaacaactgccgaaaagccataaattaatacagagaaaattgggcatatttttgcaaattatgctccacaaattcagcaccaaaaaatatcacttttgcagaagagggtccccgaaaaaaggggggggggagggtcattgatcacgaatctgacatcaattttgacgaatctcccctaagccgaattcgaacaaaagttaaaattcaaaactttcgttatttcgattttttgttcagattaaaattgggtattcataattagtcaaaattggtgtcagattcatgatcaaaatcatgacttattattagggtcgcgacttttagtgacgaaaaatctcgaaatagttaactaaaatagtgagtaaaaatgccaaaatagtgacacatagggggccaggacgttttcgcgtggccgttttcgcgtggggtacgttttcgcgtgagtgcctattaggactgaaattggtcggatgtgtgccgaacatacatttcgacctatttcgaatcccaaacccgatttcaaacaatttttcgcttttatttactcaaaagcgtcctcatttttatgcttgcaaagattaacaacttcaagtattgacaacgtgaatgagacacagaatccgaccatcggcatcacgacatttctttaatttttttctttttccggggcggaggactcttcttttcacatacctatccaagagattaacccattggaaagtcttaactgttttgttcaattttttgccgtacaaaagtaatgccccaaacattttacgcacaaataactcaattttatatagaaaaaattctgtaataggggttggaaattattgaattaagcaccagaagtaaaacgggagtgaaaaaattttccaaactttaaaaaagtaaaaaattcgcttatgtgcaatcacgcgaaaacgaccccgaccgacacaatagtggcaaaaagtccgaattagtgacaaatagtgacataattttcagccaaaaattgagcaaaaataatttttattcactatttgcagttgtaaatgagtaggactgggatttttaagaaaaagtttttaaaattaaaatttttgccaagaaagtaaagttttgagaaaattttttcatttcataggagtatattttgaaaaatttaggtcgattcttaggggtgtattttttggttttattgctgcatttttgttaaggaattttccaaaaaatgccgaaatatgtacacggcagggatgggccgaggtttcgcttttcgcatttcgcctttcgcattattcgcattttttggcgtttcgcatttcgcttttcgcatttcgctttttggcgcgaaaagcgacttttacacccctaagaattggattaaattcccataaaatttttcaaaattttacctataaattggctaattttcagtgaaaacctgtttataaatgatcaaaatttccaatttttttccccggcggcgcctatcggcaccgccgcgccccccaaactcctattttttcttagaaaatggcccaaaatcgcaaaatttggtaatttgatgaaaaactgttctcagtggcgcgccaaaactcttatttctcattagaaaaatgataaaaatcacaaaatttgatcattttttagtgaaaatctgtcaacaaattttaatcaaattttcaaaaattttcccggcggcgcctgccccctcttcccaaaaagttttttttggaaaaaacgcgcctcaaaaaagcgttttattgatttttaaatttggaataaaattttaaaagatttttgctttatgattttaactattaaaaagttgtagaaaaaatttcgcttttcgcatttcgcttttcgcattttcgcatatttcagtttcgcaaatttcgcttttcgcatttcgctttttatttttcaatttggcccatccctggtacacggcgagtcaattttgggctccaagcgcaaataagttggacttttcgtcggagtggtctgtgagttagtcaccaaaagggggtctcaggttcaaacccactgcatgttgtgtgttcttttcaacttattcttttaaagaaaaaagacgaattatttttttattgtaaaagttttcgtgtcaaaaaaaattatattcaaaaagcgtttgttacgtacagcatcgataattttgtgtaatttttttagcttataacttggtcaatactagaacaaataaaatcattttatgctcattttgaagggaaaattctgaagaatatttctaagttagtcaaaagtttaaaaaaattgtttattggcaaataaatgattcatgtgttattttatatgtcagagacatggaaatagtatgcccaaatgagagaaaaagaaaaaactttgtcctgggtcaaaaattttttcctagggtcagatttccttgaaattttgcataggccaatattttgacctcctctagcgattccaagtttattttgtgaaagttaagtttttaactcgagatcggctcttctattttatcaatggaaaattccacaaaaattttaaattttgcaaagttttggcgttctgattactaaataaaaaataaacttatttgcactgggagaccaaaattgactcgccgtgt

SEQ ID NO: 3946 - DNA, 2253 bp, Heterodera glycines
gaaaattaggactgatgggaagtgtttagaaaaaatctgtcaaattaaatgattaactgtctttggtttgccccctaatccgaaaaaatttttcaatgttattcgaaaatttttatttgtatccgctatttaaacttactgtttccgaagtgttcgcgttgttaatccccgcatttttcaacaacgaattgacaatctccgcatatttgtgctgagcatctgcctggaaatgataatataaaataaataatgatttttgagttttttgttggccaaagtttaataatttggcaattcaggcattttcaattggtaaagcaaacaaacagttcaccttcggcatccctttgactttttcccaggcgtcgaatttggcacgcgccacaaattcgagcatttttggacgatcgccccgaacgtcgccttcatttgcctggaaaattgaaaattatcgtttttaaacgaaattttttgccctcttaaaagcaggaaaatttgactatacaattcaacctgtttgaacaaagcgtacagctccaatttggtgtcgttgtccggctcgtccttcagctgtttcatgtccttttgcgccttctcaaatgcttcggttgaaaaacaaaagcgactaaaaataaaatagacaaaaataaattaatagaatcgtatttactcgcctaaaaaatggaagtgcgacttttgtgaacggtccgtttttcaaaaattttgacgacaaattgttaaagagcatttttagcttaaaatttttaaatgatgcttttaacattttacaataggaaatcagagttcgattttgatctggatatagatcttagctttttcttgatccagatacacctgggtttgagttttccggaaatttttgcacagaataaaacacaagttaaattgaaatccttgcaggcctaaaaacaaacctaacattttttagtttcattatttttggcgaaatgttttaaaaaggcaaaaatttgaaaaagataattatggggacggggacttcaattttttttaaaggcacctaaaatagtaatgaaaaagtcgaaaaaagcacagaaaaatttaaaaaaaaaatggcaaaaattgacgctttacgaaaaaaattctatcaaaataataaaaaagaaatatttattatcaaaaataacaaatcaaatacatttcaatgttttctgaggtgatattcttgtggacacggaaaattcatacaaaaactcaaaaagaagacctcattcactttttctttccatcctccgcactttttccaccaaattttccacgcgctttctctcaatttcatttcgccaatttccgtcttttttgaaatttgagccgacaataaacgcatccgcccctttgaacaaattcacattgttcacttcgatgcccgatccaatcagaacgggaagtgtgcatttggagcgcacttctgtccataaaaatgatttgttaaattgccgagaattttcaatttctaacacaccgtccaattcgtcgggacacgccgcttcacccgtggcggcaccgcttaagatcacaccgtcggcgaggaaaagttcagccgcacgagcagtttccgcgacactgacatcggcggtgatcgcatgggaactgacaaattttgaaatttaaaaaatgcaattaaaatggaatttttaaattgaccaatgctttttcttaatgtccgtcacgaccgctatttggtcggcgccaattgcgcgtcggtaacggagcaattcgccggcacatccgtccatccaaccctcatctgctacgtggccaaacacgaacgattcagcgcggacgaaatcgaattcttataggatacaatgaaattcatgggccgtaaaattgggaatgccctaattttggcttcaattttaaaatttgtgattcacccgccgcctgagcgaccgccagcgccgcgcggttggcaccggccaaaatttgcacccccaaaagcatctttgggcgacgattggcgcccaaagtgtgtgcacacgccgcgcagaggcgtgccattgtcgcgcacacttcgggcccatggtcaattcctttttggtagggcaagtcgtgcatattctccacaatcactccgtcctgcaataaccagtaaaatagattatgattgtctaccaagatagtctcaattccgacgcctcttaaattttgaacgacgaaacactaagatgctaattattgttttcatcaaatgtgcttacaattccgcactcg

SEQ ID NO: 3947 - DNA, 2933 bp, Heterodera glycines
gctccaagtacaattatgctggatttttcgtcttagtggtctgtgagttagtcaccaaaaagggggtctcaggttcaaatcttctttgtgtttgtgtataaatttcattttttaaagcaaataaataaaaaaaataataaaaacagaacgccaaaagaacaaatacaaacaataaaaggtaaacattttattttacccttgattttatgaattttttttagcttataactttttcaataatagaccaaataaaaccattttatgctcattttgaagggaaaattctgaagaatatttcttaattagtcaaaagtttaaaaaaattgtttattggcaaaaaaatgcttcatgtgttattttatatgttagagacatggaaatagtgcgtcaaaatgagagaaaaagaaaaaactttgtcctagttgaaaaattttttcctagggtcagatttccttgaaattttgcataggccaatattttgacctcctctagcgattccaagttattttgtgaaagttaagtttttaactcgagatcggctcttctattttatcaatggaaaattccacaaaaattttaaattttgcaaagttttggcgttctgattactaaataaaaataaacttatttgcactgggagcccaaaattgaatcgccatgtttaaaatttaaacatcactccagcgcactgatttacccgggcaatgcgggtacatgaatcatgccgaagagcaacggatgttggcgcatttgaagagcacgtgaaaaggaggagagtattggaatggaggacattttgggaaactttaattaaagaatgaaaaaggtagcagcagcagcacacagtcacacacagcagaacctattcccttcctacacatacatatcctttcattttctttttcttatcagcaaaacaacaaaaggtgataatttgaatcggcgtctgtcgccgggtactgctcgagaatcctgtgctaggcctagagagtcccacgactcgggaaatatgtagtcggaggactgactatacatatgcaactttgcagattccaatccaatcgaaactaagacttttgccggattatttccttttcataaggcatttatactttaggcactcagagttttgcattgtgaaatttcaaatttcacaacatatgataattggcattatgtttttttgaaaaagtgttttttaaattctatcaaatttaaaattgtttcctttgccttttctaccactctttaattgcctgcgattgatttttgattgtcgtttatggaagagttcacatttttttccatccattcctttacaaaaattggagggaattctcttcctatttatgtcatgtcgcaaaagaatatgcatggaatggtactgctgttgtatgggcccatattttttgagattgatgggatggaattggagaataaaaatgagcacaagaaaaggaaggaaaggtgaaggccttccatcgtgtgatctttggtcttttccatcagctcacaaatattcgagtggaaaggaggggggggggaaggggtaacaacgattcatttttggtgtgcaatcgcattgaaaggagagaaagtggaaaaatgaaaatggcaccgccccgtcccctttcacatatttgatgggtgtgtatattcttaatttgttatttgcatggttttatttatggaatttcatttttctggttcttttttatttcatttcattttaaagaacttggtaaattaccttttgtttgttcgaatttcttgaatttgatgtttcgctttattctgactgacagtgtccgactagtcagctcaatttgcgctaaaaatcggatttttctgtgagaatttaagcctcatttgcactttcacatttttctctcccatacataaataattatgcccagtctaacctccacaatttttagtccgaccaaattttccactcattttgcgtccaaaacattccatccaaaaatgaccatttctgcgaccgctgacgttgacaagctccaggatgcggccaaccgaatgcgcatttcgtccattgagcagacgtgcgccgccaactcgggccacccgaccagcagttgcagcgcagcggaaattgtggccactctgttctttgccgaaatgcgttatgacgtgaaggacccgcgcagcgcatccgccgaccgtttcattctgtccaaggtttgcaaaaagtcgcgggaactcgctgatcgcgcgaaattcggttgtgtccggcacgggtcgtacgactatttttattggaattgggtattccagttagtggatgccattatcggggagtgatttaatattccaattcgttgcttctactatatttccacaattcggactttcctccaatattcccatcccacatcaattggccatacaatttcaatttccagggtcacgcttgcccaattctgtacgccgcttgggaagaggcgggcctgctcagccgtgaccaagtgctctccctgcgcaagattgactccgacattgaaggacatccgaccccgcggctcaacttcatcgacgtggccaccggctcgctgggccagggtctgtcatgcgctgccggcatggcgtacactggcaaatatgtggaccattcgtcctaccgcgtgtactgtttgatgggcgacggagagagtgcggaaggctccgtgtgggaggcagcaggtgaactcaaaatccacggatagaggagacgtagtcaaagcctgggaacctacgggaaaatattttttcatgaccgttagtttctgttgaaactacatttaaaaattaatcataatttgacataagccggaatcgggattgcatggtttaggagaaataaaaaaaattttgttgtttttttttctaatttaatgttggggcaacgaatatttgtcccttttcagcatttg

SEQ ID NO: 3948 - DNA, 1732 bp, Heterodera glycines
ttttgaatgcttacgccaatgccaagtaaactcagggacagtatttttccttttcctgaattactgattgattgtgagccgaaattcctccttttccttcctgctgctggggagcaggacaaaacgtcgtcggggcataatgtcgacgcaaaaatttttaattagaaaaaaaattaaaattttttatttacctagtctaattcgaaatttttttctaaaataaaatcttataaagaaaacaagggaaaaaatgtccccgttttttttcttaaaacttgagcagattttattttcattaacacttagattttcaaaaaaagacaaatatttttttaaaatttttcttggactttttaaacaacattttttcatcgactttttggggtgtgcccttccccctggactggtattttaacacaatcccattgaatttatattggcgttaaggaacgtgactggcaaacccacggcaatcatcgccaaaacgctcaagggcaagggcattgacggcgttgccgacctgaacaaccagcacgggaagccggtgtcgaaggacaaggcggagcccatccgggcattgctcaaaagtgacaagccggcaaattggaccatcccggcaccgattcgggacgcaccggcggtcgacttaggcatcggtgccatcgcaatgagtgcaccgccgcagtacaaaatgggcgaaaaggtggccactcgacaggcgtacggaaacgccttgctgaagctggcggaggccaacaaacgcgtcattgccttagacgggtgggacagataataggcacctaccgaatttaaatggatttaaataaaaaaaaatcctttttgatgtgtcaattcaatttttaattgttttttccgtttagtgacatctccaactccaccttctccaacctggtgcaaaagaagctacccgagcagtttgtccagtgttacattgctgagcagaacatggtcggtgttggagttggcatggcgtgccgtgggcgtgtgcttccgcatgtcaggtgggcagaaagaagccttttggattgccaaatggccaagaagacaaactgctgttatattaaggggattttaaaaacaattaaaaatttttttgttacactgaatttacaacagaaaaaaaaccaccgggtttttgccaaaatttttattaaatttgccccctattttatgcattttacttttttagcacttttgccgccttcttcacccgtgccggtgaccaaattcgcatgggcgccgtgtccttcacaaatgtcaaattcaccggctctcactgcggcgtttccatcggcgaggacgggtaaactgctgctggcagagcacttggaaaaaaagggaattgcttcaatttctgttttgtttcagtcccagtcaaatggccctcgaggacttggcgctgttcagcgctttgcccgccagtgtcgtcctctacccatccgacgcggtgtcggccgaacgtgcgactgagttggccgccaattacacgggcatcacttacacgcgcgtctctcgacccgccaccccagtgctctacacaagtgacgagaagttcgagctgggcaagtgcaaggtgggcagcgatgggaggctagaaaattttcaaaaatgtttttgaattttaaatagggtttcataaataattttgtagtcgtcactaatttcgttagaatttcaatttaatggggtggtcggtgtcggtttatgtaaa

SEQ ID NO: 3949 - DNA, 2173 bp, Heterodera glycines
  unsure (1)..(2173): unsure at all n locations
agattctcatgcaaaaaaaaacaaagttcaaacgcccgctgcaatgggtgtggcgaggcgagattgggcagtctcatcaattagcgcgctaattatccccataaataagtgcactcagtcgcttaacagtgggcgtcagcagtcgaggcggtccagaggggaggggggggtatttggatggcatttgaggggcatactgtagtcatgggctaattgtaagtttttccttttttcaaaattttaaatgttgtcctcttaaatgagtgtgtacattttgcaggattttgtcggagtgcgttcaaacggtcaaatgctgaaggtgtgctgcagggagtggaaaaataaattattgggaaaatttaaagaattttggcacaccattccaatcactgtttttgttttatgtttgcattgtctcttttttagttgaacttagagagagagagaaaatgggacagagtgggagagggagaaagagcaaagggagagggaggcagtgagagagagacagagagaaaggaacagacagtgcaagagagagaaaacgaaggtagagacagtgcgggagagagagagagaaagcaaaggggaggcagtgagagagagagaaagtaaaaagacagacagtgagggagagagagtgtgtagggagaggcagtgagagaaaaataaatgaacaggcagtaagagaaaaagttaaggggagagacagtgcgagagagacagagaggaaggaacaggcagcgcaagagagaaaagggaagagagacaaagacatagggtttttcgattttgctcctactgtatgcacgcggcggaggacaccgaaaagggcacacagttcaaacaaatttcttttattccgccaaataaatatttgttcttcttttcttttttcttttctccgcataattaccaaatggaattgtttttttttgaagagtcgaactttgaaaaagcttggacttggttttctgaataaagcgccaggccaaggaaaaccagggaacttcaggcctgggcccaagttagggcaacctcttttttgataagattttctttgccccccttggataaatagtttagagggaatttgccatttattagcagcaaattcactgcctacaataattaacaaattgttcatttcttcagatttgcatcactcacaatcagcctttacttatggaagaaaaaagcgcagtaagttttgtttcttgtctatcgcccagaatttggaccgtatttcggcactttttaacgccctaatttcgtgccgtccatcaaaacggagagagcgaactgtgcagaagtttgatttatggggctgagatggtcggtcacggggcttttgcttggcggggaataagcccctcccttctcccccagtaacgagtcattgggggtcgactgggcgccaaccaactgagcgcctgaccggtttttggggtataactcatttcatagttgcccgaattgagtgaatttaatatcattcgaaagctttaagtgtcctctattagcctgcaaaatttcgttaagtttcaataaagttctggccaacaataaattaattcaattcgggcaactatggaatgccgtgctggcgcccaggcgttaatttaacaaaaaaaattgctactttttgaatttttttttgactactctgaaaatttttatgaagagcgaaatgacgcatgccaaaagcactcatttttagtaatgctgcatttttctgagccaaattggctgagtttttctttgtttcgccatgggagggcggggcgttctccgccactgacctcaacgccgtccatctccgcgtttagttttcaatcgactcattcatttgtacattcccttttctttattagttttttatataataaaaactcatttttcatgaacaaaaaatttctgcaagaggtccacccataaatggctgagtgtgccaaaaaatgcaaagttcaaattccgaccgaattggtcgctgaattggtcgctgttctccgttttgatgcccgttgggccatcgtccgcgtttcagcggcctttgacattttggtttttaaaaaacaaaatgcttttataattgccaaaacagttgcgcaattcatccctttaaaagtattttattttctctaanttttagcagacggatctgaacagtggg

SEQ ID NO: 3950 - DNA, 967 bp, Heterodera glycines
  unsure (1)..(967): unsure at all n locations
cactaaaaatattttatttttaatttttttgaaacttccctgggttcntatgtntatgtgtgtnngggaagggctcttataagggantaaaaanaagaatngaaatnaaaaagnanagnangggangnattgattnatgnanagnaatgttaanagnggnagnttntgtngtgggnaaatagtngntganattganaaaaanttggaaanggagggntaaatatttgnaaagatttnaaatttnttaaatggnatttttnattttgttttttaattgaaacgcatttttaccataatttggcccggctcgttcactcaacacatttttgtccgggtgggcattgaatgtgaaacagttgccataagtcgggtccacatacaatgagaagtcctcctccaccgaacattccctcccattgaaactgcatcttaaaaataaatattaaataaaaatattttaattatatttaatgaaaattaactatcaaaagtacataaagggtcagtgattattattagtgttaaatttccgtcatataatcacaaataatcatttgattgttcgtgcattgtttacttggtgatgaactcgcgcttactgtagcccatctgactctgttcgtattcactcatttgtgagacagcaaacacgagattctcgacagcttttgaacgaattgcgatcggatcatacacaccctttaaaatttaattaaaattaatcattcaaagcagtgaagtgaaaataaattgtaaaaggaaaaaactcgtagagggaggagggaggttggatatttatttttaagtttgcattttcaataaagggcaaaaaaaattgaaaatttaaattacagttgttccctgaatctaccgtatttgctctttttatcccccgtccccattaatcccgccgtccccaattatcccccccccccttttctgaggtgtttgaaaaataatccccccg

SEQ ID NO: 3951 - DNA, 4756 bp, Heterodera glycines
gcatagacaaagaggtcgtgttttattcagtccatcttgcccattttcttccctaaactatttaaattaaaataattagataattagataatggaataatttacatttatttacaataaaaatatttaatcaaaaaatttttaaaatgtttataatataaaagttcatttaaatggattttatttgcactttcaatgcttgacatccaagcttgcttgcactgcaatcgcagaatgagaacaccgcaagaagtccctggtaaaaatttaattacgactgataatgagactaatcaatctaaatatttggaatatggcatttttaattagttaaaataaaaaaacaattattattattattattattatttcacttcgtattttgtgtaaagacgtcgtcgtgtcgtcggctcgtataaatagccatttttgtcggcaccgcgacgacgacgcaaatgacgagcatttgaaacggatgaagccaaatccatggcgatatcataggcggacaacttcaaatttaaattcagatttcaatgatttatcctgtctaccgtatctccaacagtagtcatttcacgggccaacgaatttttgtacgggtttaaattgcatacggttaccaaaaatagaaatataacattaatgttttaaagtagatcgtatttttaaatccttagaatctaccaatatggaaaatgtgaaaaatttcatcaaaaaaatttgccaaaaaataagcaatttttttaaagacatttgcgctcatgcccaaaatctgattcaaaactaattttttttcaagccatgatagtctaaacagcattagttaagaaaacacagtcttttagtttattaggagcattaattctgctgtttgaataattcataatttttcaaaatgtaattaactatcaaattatcagacacaatcactttcgaccactatataatgctatttagttcaccagggattgagaaaactaggtttgaacccgattttagacattgacgcaaatgtggggtaaccgcttttagatagattttgtagcaaaatttgaattagaactggagtccgtttgtgtgcccttgaacagctttgatccctgactgagccagttttaaaaaaacgaactgatgggaatgcaatattttcaaatttcaattccacgccgacaatgatgtcgttgcgccaaaagcgcttcacaatttgcacggcttggccagcgaatgcaacaaagcagcacatgaacaacagaagccagaggaagcggcggagacggccccgagacgtataggcacggggaatgccatgggcgctgcattttgggtgggacagattaggaaataattgaagtgcttgctcgagaatcccgattttaaaactaatgtttggccctaatcccgactcaggaattttttcagttaatgggagcactaattactcgaaatgattagggtttgcagttaacggatgttaaataatgaaatatggctagaaaactacgaccaaaaatcacaaaaatggaacataaaattgcgaaaatatggaaaactatttaaaatgaagtccaatatttcttcaaatgcattaattttaattaaaatctattaaatggctaagttcggttttaaaactcattttagatgtaaaaaacaaaagctaaactttattatgtaaaaagcaagtaaaaaaatataaattttccattaaaatttaattattttctttaattggctggtacataaaaatcaaaagcctcatggtaagcaaaaagttaaatttagattcaaaaaccaaactaaaaaaaaattattcacgttctaaatgcacaaaaatctttattttaaattctccatccgtaataaatagttaatgtgttaaatttaaatgttgagaattatgtggcgctgttcatgttgaaatttgttagcagatggcttggcctaaaatggttaattcgaagtgccgaaaatttagccccatctcccgcccccctccaaaagaccacaaaatgaggggctaaattctctccgatatgcggatcagtgatttgatttactctcattggttttgcctggtgttggccgcaaagtccccaaaagtggtctccaactcggcatgaaaatcgcttttgcccgtcgccgtcctttgcattcgccgactttcctgcgaacacagcgaacgccgtgacgtctttcggcgatggcattggcaaaaggtggaatcttttttcattgctcaaaataaaaataaaatataattaaaacttacaaattatactcttgaataattaagtattggatgtttttccaattagtttttaaattttattttaatgtttaaatggttatttgataaaattactcccttttgagagtagtaattttgtgcactcattcaaactaaaacagatggataacttcctgcattttcagcaagacataaattaaagtgctttttcctttctttgtttgtcaagcaattttcctctggacaaattaagtaataataataatcgtcaaacggacaaatggacaaaagtgaaaccccaaaaagacatggcagtaattaagcccgatctcggcttttctgatgctgcacaattcccatccttggttttgtcaaaacttaaatgtaaagaagaaatgatagtagaaaaaagaagaataaatgtacatgactgactaaatatcgaaggtgtaatttttaaataaatgatgatatttggttatggtcgtctgatcgtccgtcacaaatcatcaaatccaatgaaagtgatcggatgctatggaaacaatcacaactaagcaaagtactgaaaaatgattgtttgcatctaataattattcaaattactagcagttggaagttttccaaaaatgcgtcttgtttcgtctccagcagttgcaaaagttcgttagtcgttttggtcactttgtctttgtctgtttggtcaatcgttttggtcactttgtctttgtgcacattttccatctctttgatcaaagccttaatgtccgttatttttgacacaatgtccaaatattcgatgccaattgtttgcacagcaattaaaacggtgtgacaaattgcgtcgatagaatggacaaatttgttgatctttgactcattaaaatatagcagaacaagcacatgactaacatcagtgataagctccgacagatgatggctgacgagccatttcacctgatcagtcaatggccgtgccatctcagccaaattattcagtttttccttaatttattagatctatatgtatggactaaaaaaattcaaaatattgactaaaaaccgccaaaaaagatcgagaccgaaaatatccccgaaagttgagacagagagcctaaaaaaccgagaaattcttcgactcgagtgagagccgagaatctcgagcagccctaatgaattctctcactcacctccatccccgcttcgtctgttattttgcagtactgtctgatgttctccaacgctgtgccaaattggcaaaaaaatgcgattggaatgagcgcatccaattccttccaatcgcttaaggcatcttttttgttgcgcatttcttccgttaaaatgcttagttttgctttcacaacgaatgccttcgcaatgttttccatcatttgttgcttttccttcttctcccccatctttttcatctgtgcctcggcttttccttgcgcactttcgatgattgactgatcacaaaatgcgctgccatttttctctttcaaaaatttcagaatttcgttcattttttccaacgatttattcgccccattttcattggcacccttttcattttcaattcttgtcaacataatttcgatgacaaaagtgttgaactcttcacgaagtcccaaaattattcctcgaattttgggcatttcgtccagctgtttttcgctgttgcctttaagtccaaactgatcggtgcccttactcagctgtttacagaagccaatggcacggtgtgccgggagtgcaattcgccggttgaataccatttcaattgtatgtatcggctttccccaggcatggatgtgcgggtacggtactaaatttgcagccattaccgtgcctgggggttttggcataaaattccattattctttcgaccatttattcatttttcgaaggattttttttagacaaaaccgtaattagaataagtggtcaatttatgtaattacccaatttataaaattggagaatattttgctcaaaatttgccaattctttttccaaattaattagttcgctgacgtcaactgttgatgagttttctgagaattaataaatagagaaagaataaaatagtttatatgcgttttgtttttcaagaaaaacacctcatttcctagaataaatgtcaaatttcttggtgtttaaggggcaacagaaatttggacaccggaaagattctgcagaatatttagcatttaaaaaaatttaaatatatataaaaaatacctctaatctcaaagcaaaaattttaatcaaattagatttaaaattttaagcgaattatacactcaattaaaaggttaattttcctggactcattacacttctttatggatcaatgtcaaaatatattattttatatcatttttatgcccttaaataaaattggactttctcgatattttcgttccatataagccgggtattcgagtctcaatccaagcggaaactaatgcaagtctaaccctacgttaaacagctgaagaaatga

SEQ ID NO: 3952 - DNA, 2446 bp, Heterodera glycines
cattttcattcttgtcaacatatttcgatgacaaaagtgttgactcttcacgaagtcccaaaatattccctcgaattttggcatttcgtccagctgtttttcgctgttgcctttaagtccaaactgatcggtgcccttactcagatgtttacagaagccaatggcacggtgtgccgggagtgcaattcgccggttgaataccatttcaattgtatgtatcggctttccccaggcatggatgtgcgggtacggaactaaatttgcagccattaccgtgcctgggggttttggcataaaattccattattctttcgaccatttattcatttttcgaaggattttttttagacaaaaccgtataaccaatcaatcaatcccttttaatcaaatatttaatttgctcgcattaaattgttccccagattaaggctaatttttttttggcataattatggaaaaatccttctcaaaattgggataaatggtcaatttatgtaattacccaatttataaaattggagaatattttgctcaaaatttgccaattctttttccaaattaattagttcgccgacgtcaactgttgatgagttttctgagaattaataaatagagaaagaattttaatagttaaaatagtttatatgcgttttgtttttcaagaaaaaacagctcatttccaagaataaatgtcaaatttcttggtgttcgaggggcaacagaaatttggacaccggaaagattcggcacaatatttagcatttaaaaaaatttaaatatataaaaaatacctctaatctcaaagcaaaaattttaatcaaattagatttaaaattttaagcgaattatacactcaattaaaaggttaattttcctggactcattacaattctttatggatcaatgtcaaaatatattattttatatcatttttatgcccttaaataaaattggactttctcgatatttcggttccatataagccgggtattcgagtctcaatccaagcggaaactaatgcaagtctaaccctacgttaaacagttgaagaattgactaaataacaagatttacaggttccatatttaaaaagccagtttgggtcatatagtaatgaaaacacagcaaaattttcaattttaaattaatgtcgtagtgcccgatttctgctgccctaacttaatgtcgcctcttttcctatgtataaaataaatttcattttttgtacgcaaaaatctgctgatttcattcttataaacacaaacaaactcacgagttacaattggcttagtttcgatgttggaaatcacttcttcgcagtttttaacccatcgatggaattcgaccgaaacggacaaatcaaaacaaataaaaaattggataaaaacaaataaaaatgatggaataaattttttcatctaaaaagttaaagcgatgcgtgaaaaggattttacccgggtcaatgaatggtccgggtttttcaaaattcaattctttactcatgagaaggataaagggcatacgctcagaataaagatttcactagtaaaaaaaacaacagaatttaatgctttcataaaaacgaagtttaaaatcgactttttcattctctgtttttaaagaagacaaaatgaagttgacggtgccgattttgggtgcccaaatgccttacagttattggaaaaattataaaaataaaaaataaataaacttataatgataaatgtgaatgctaaaaagcaaaatccataatttattatttgacacgtgaaaaaatgctttttatgaatatattcataaataattttgtaaaaataaagaaaaagaatttgattaaagaaaatttgtgaatattaaaagctaaatccataatttattatttgacatatggaaaaagtgcttttttatgaatatattcataaataatattgtaataaattttaaaaaacaaaaaaaaattgtgaataaaaaaaaagcataaatccatcaacccgactgtcaacggagagagaaaaaatagaactataggaatggtagtcataaaaggacacacatccgccggtggtactcgaacttgttgctgttctgcttacttatgggagtgttatttgaccaccttcttataggtcgggcccaattagtaaaggttcggcaaaatggtagacctgggagggaatcgaaccctcggtcctctgctggtgcggcgatcggtttccaacccaaaccaattgcccatccctctgaagggtaaaagacgtatgaatttagataatggaaaaaggcggacagattttgcacataaagggagagagagagagaggtggggatgggaaaaagagagagatacacagagagagtgaaagagagagagagagagtgaaagagagggatggagaggagaagagagactgatagagaatagacagacaagagagagagatggagg

SEQ ID NO: 3953 - DNA, 2046 bp, Heterodera glycines
  unsure (1)..(2046): unsure at all n locations
acaaactcacgagttacaattggcttagtttcgatgctttaaaggacttcttcgcagnttttaacccatcgatggaatcttaccgaaacggacaaatcaaaacaaataaaaaattggataaaaacaaataaaaatgatggaataaattttttcatctaaaaagttaaagcgatgcgtgaaaaggattttacccgggtcaatgaatggtccgggtttttcaaaattcaattttttactcatgagaagggataaagggcatacgctcagaataaagatttcactagtaaaaaaaaaacaacagaatttaatgctttcataaaaacgaagtttaaaatcgactttttcattctctgtttttaaagaagacaaaatgaagttgacggtgccgattttgggtgcccaaataccttacagttattggaaaaattataaaaataaaaaataaataaaattataatgataaatgtgaatgctaaaaagcaaaatccataatttattatttgacacgtgaaaaaatgctttttatgaatatattcataaataattttgtaaaaataaagaaaaagaatttgattaaagaaaatttgtgaatattaaaagcaaaatccataatttattatttgacatatggaaaaagtgcttttttatgaatatattcataaataatattgtaataaatttaaaaaaacaaaaaaaaaattgtgaataaaaaaaaagcataaatccatcaacccgactgtcaacggagagagaaaaaatagaactataggaatggtagtgataaaaggacacacatccgccggtggtactcgaacttgttgctgttctgcttacttatgggagtgttatttgaccaccttcttataggtcgggcccaattagtaaaggttcggcaaaatggtagacctgggagggaatcgaaccctcggtcctctgctggtgcggcgatcggtttccaacccaaaccaattgcccatccctctgaagggtaaaagacgtatgaatttagatacctaatggaaaaaggcggacagatttggcacataaagggagagagagagaggtggggatgggaaaaagagagagatagagagagagagtgaaagagagagagagagagagagtgaaagagagggatggagaggagaagagagactgatagagaatagagagacaagagagagagagggagggagagagagagaggagagaaaggtggggatgggaaaaggctgattaacaaattattaaggaagaaaatttaatagaggagaaaaaagagagnnaattgngggtgggactaacatcgcaattgggaaaagtcaaaaagcggggtgggggggggggggcaccaaaagagaaaaatcaaaggcttatccttttctcagcaccttttgtcgtttccttcaagcaccaagcgcgcggtcgtgttgggcagcagcggtagctcatccaacatggagaggacaacgtcaacagtttgcgcttgacgtcctgcaacttctccagcgcggtctcgaaccgagctcgccacgcatgtgcggcctccgagcggggacggagaagttcaagccaaaggagaagacaatgtcggcagtgccgcacttggggatcccagagagagcgagcagcgagtctgccgacgcaaagagatgcaagtggagaggacaggcggggagcgaatctcgacgaaatccgacttgattgagggatatcgggctgaggatatggttgaggtgaattgaggaaagaagcgctggtgcgggtgaaagcagccataatgcggcgcctggccaacccgccacgggggaaagtttgaaactatgtgccactgagctgaatcctttgaattttgtgaaagcatacattatgccattattaaatgcattagttcacgaaattttatctgttttcaactattatttctgattttgttcttcatggtgtcatgccattattttacaaatcgtaaaaattgatgattccatcataaaaatattatataaaaatattctactcaatgatccatttaaagaaataatttta

SEQ ID NO: 3954 - DNA, 1194 bp, Heterodera glycines
  unsure (1)..(1194): unsure at all n locations
taaaacgaaaattcaatctcaataatttttatttattcgccaaaatcaatcaaaagaaaaaaaaatactcgccataccntatgtccttcggattctaatgtctcggattattaaatgagaaaaaaaaatttcaaaaagaggctaccacctatttacattaaaacttcaaaatccagcgacatttgaattcattagcctttgccacaacatgaacagcaggcttttgccaagcgctaaaaggaataaaaatatgtacatcttatattggtcaatgttgttctgattataccggcggtcgactaaaatttgcgatcacttcattgacgatctgcgacatttccgcaattgattttttttgatcaaggtaaatacctcggaacacaacaacaaagaccaccgccaagatgaaggtgatcacaaaaattgtcttcagacagccaatgtaacattcttagaaaaggagtgaaattaaattatttttataacttaaaattcatgttgatttcaataaaatttcgacaagcatttcatttactggtcctgaacaaaaaaaaaaactttcggaaaattctaataatacgcttcttagggaaggtgttttatacgacttttaaatcaaaaaatttcacgtaacaaacgtaaaaagcataagagctaaaaataaacgtcacatatgtgtcagcgcataaaattaccccggaaaaatgatttaaaaaaaaatttcaggggggtaacaaaaaggagaaccgttaaatttaatatttttataatctattaaattcgcgctgatttcaataaaatttcatatattattaacaaatcacatttgacaagtgtatacacttactttgagaaattgaaaaattaagacgtcgccaggacatcacaaaaaacagcagctgctgcaatgataaaaaattggattttatgtatagaaatgtaaaaataaatggaattgaaaccattcagtgatttactgaacccattaaaaaaaaggatatgaattggatttatacgattgagaaaaatgaaaagtaggtaatataaataaataagacacatttgttgaggcattcatttatcatttaatcattctcctcctcctccgtgttcttcttcgccatcggccagcaaacaattggcctcattttcggggcggacaccagcaacagttcgttgccttgtgccaaaagt

SEQ ID NO: 3955 - DNA, 2096 bp, Heterodera glycines
cgaacataaaagtgaattttgaaaaattggaattttcgactttttgttcgaattcgggtccggggttcaaaataggccaaaataaatgccgtattcgtgatctgcgaccacaaaaactgctaaaaaagggggggggggcaccatcggcagtattaccgctttttctgttaataaaaatgttttattgctttttttgggaaaagataaaaaaattcaaaaaaaccgaaaccgaaacggtataccgaaaatttttcttcggtttttttcggttttttaatcgaaaccgttcgaccgagaattttttgagtttttcggtttcggtttttttttcggtttttaaccgaaaccgttcgaccgaccctcttgtccggtctctatttttaattagctccaaaaaatctcacaaatttttttttttttgaatgatgtgtttggttggctccatattcctttattcgatgtatcgcctcgattcaattctttttggtataattgcacagatattgtctaaaaatgaccaaatttaaggattataaattatgccagaatagtcaatttttatcggtgtttttgtctaaatccagggtttctatttcaaaattttcaaaataagaataaaggccaaaaaataagattttagggtcaaaaataagaacattttgcaaaattgcttcaaatgtttttacattttattcgatcaaaaatgtattctattattatatttttcataaatttcagtgcattcgggatcactaaatcagatttttaacattttttgcggcacatttccaaaaaacttggtgaatgtgcgaggggagaggtccagtggtgccgattggcgccgcaagcggaaaatttttaagactttatataaattttgttagaaattagccaaatttttttagaaatttcccttttttaggtgaaaataaggcactaccccaaaaccagaacatttcttagaaataacaacatacaatagaaaaaccctgtattatttggaaaaaaaataaaatcaaaagaaaacgtcaaccggtgtcgaagtcataacaaaaagtattgttaatgttgaagcactaaccactcaaccacaaatattttataaaatataagcaaatttactttatttcataaaaatttgtaaaagatggttaaaaaaattcaaaattgtataaatttttgcctttaattccacgaatatgccattcttaggggtgtgtttttcacccccgcgggggtgaaggtcgcgggggcgggggttgcggtggtcagagtcacgggggcgggggcgggggtgagccccaaaaacctgtcccgcccccggggacgggggcggggtccgaaccctactttactttgcccatctctcccaatttaaatttgaaattttctttagttttttcctaaaatttggtgcgtcccaaaatctcgccgccgattttttttaaattaacaaacttagaaattttcgaaaactttttttctaataaaatgcaaaaaaaaaatcttagaaaaattaagagaattttaaggaaaaaatcttagaaaatagcgcaggtagaagcaaaaatttatatgcaaatacaatgaataaaaaatacaaaatcattttttatttaaaagtctaattttttttctagaaatcaaaaaattgattgaaatttgttttaatattttccatttaaattaattttttaaagacatattttaatttttgattttataaaaaaactgttgtttttctctattttcattgtccaattccaggccaaaagctgacaagcgcagaagagcacatgaattgtatgtataggttaaaaaaatgaaattgttaccattcatcaataaaataagaattatcaattaatttttatttgcgatatttttctaaatgattgacgaaaagtaaaagatttaacttttttgttttgtgattaaaatcagtttcagggggttttcgagggtgctgattactaatctgaacttgggtttgcctaatttcgaacctcggacccgaatttgaacaaaaagttgaatttttttttcaaaatatacgttaaaacctgtcaaatttttagcgcaaattgtgccttttt

SEQ ID NO: 3956 - DNA, 2966 bp, Heterodera glycines
  unsure (1)..(2966): unsure at all n locations
tgaaaatttagcgcaccacaatatttcaatccactttatcattctcgtgaatgagtcgcctgatcagactttgctcaaaaaaggggcggaaaaaagtcttgactcacacatgcaaacccaccttatagttaatttacatgcttgcttatcttttggtcctcaacaaaaaacttacatttttaaatcgtgatcctttgatttatattcgagcgtgctcatagcaccttcattttaggctccaattttgaatatactcgtgttttttttaatttttcggtactgtcgaaatcaatctctgtcgaattcacaatttttctgatactgtcgaactcagttattgtcgaattcactcgttgtcgaaatcactcactgccgaaatcacatagcaacgttgtgtctcaatgcaaattttttagcaatcctgaataatggttgtgcctaatttaactttttttttggcttaaaatcagtttcagtgggttttcgagggtgctgaatacgaatctgaactcggatttgcctaattccgaacctcggacccgaatttgaacaaaaagttgaatttttttttcaaaatatacgttaaaacctgtcaaatttttagcgcaaattgtgccttttttatcaaattagcaattaaaacattgttttacatcaaaataatttgttatatgaattagaaactttacccaaaaaaatgcattactgaaaaaaatattcaactttttgttcgagttagggtccggggttcggaattgggcaaattctagttcaaatccctaacctgcaccgtagaaaactcataaaaactggttttgggtccaaaatttaaaaataatataaaaattagggaacacatattctgcaggatgccaaagacaaaaaaaaaaggtttgaaaaactcttttgttcaagttttaacggaaaaaaatttgttttttgtatgcttaaagcgccaaacattgattgtcattcatcattagggttgtaaattatatggattaacatattttttttgcgcatatgctatgaagaaaggggctcaaaaatagcatttctgcattaaaattttttgatttggtgaaggtttttagtccatataaatccatattttgggggttttcgggaataaaagcatatttcgccatttttgcgtttttagtccatattttggccatttttagcaaatttttacaagaaaaatgcaaaaaagcgaaaaatacacccctaaagatcgacttttttggaaatttttaaaaaatacaccccctaaaaaggagatttttttttcgaaatttcggaattttttaggtatttttttcgcttccgaaaatttttactggcaacagaatgagattattacaaaaattttgagacgtatttggtttgcaattgtgaagctagaatttaataaaaattttcatttttatgtttttaaattcattttttggttgtttattgtattttttaagtttatttaagcaaatattgaatatatataccttttttggaatttttgagggtttaaaacatagattttggcagtgtttagtccatattttggtccatatttggccattttcgagctttttagtccatatttcgggcttttttagtccatattttatgtccatatttagcgttttttaatccatataatttacaaccctattcatcatttatcgcttggaaatgattgatactcgtatgtatgagaagtaaaatttgtatgagaaacaaaaccacaatcaataagtatataaatacgcagataaaatgacggtttttggaatgcttaaatgaaaaatatgaacataaaataaaacaaaaaagggcgaaaagaattttcaacgaagaaatcaataaattttaggcgaaaatttttttaaaaaccgtcaaaaccataaaatattttaaaaatataaagtcagtttgagtcctgggaagttcgagccccgaattcgaattgaatctctgaaatgtaggctggattcgtgattagcgacacccaaaaacctaaaaaaaggtattctatccaattcttcaaaattgtaattttttcgaaaaaattatgggcgacaaaccatataaaagccgatttttctcatcactgccaattttttaggtgcattaattatgtcacaatcaccgcaaatggcgactttcagcggtctgacagcaaatatttaccacgaaaaacagaagaggcaactttgcctgctccacacactgaacaaccttttccaacgtgaagaatttgtacgggatgaattggacgaaatttgtgaaaggtaaacgtcaaatgaacgcattaaaatggcacttattcattctaatggacgcgattttgttcataagcattgtgtctacttaggcccgtacccaaaattttttttttttgctccgggtcaaaatttttttgtccagtgtaagtgagctaaatttttcgcgctgtagaattcccccccccccccgcttctttcccactttgacttttttagatttaaactcagaaaattttttatgaattttttgaaattttacggggtgcttacaatttttcgccccaattttccaatctgcgcaaaaaaaattaattatgtaattaaaaagagtgttttctgaatactaataaaataatggaataatacacaaattatcgaaaaaatttatttttatttatttttctttttttttattatgatgaatgactatttttttaactaaaaagtttcggggtaaacccaactcatccaaacccaactcatccatagcacgatacgagtcgtcgccgtggcatttaatgctacgactaggaccgtacaaccaaaaaatactacgactaagaccgtacaaccaaaatatgccacggctgagaccgcataatcaaaaatgcaggngcgttctagaacatttttcggggggggggaccgacccaagacttttttttttttttttttgctatt

SEQ ID NO: 3957 - DNA, 2800 bp, Heterodera glycines
  unsure (1)..(2800): unsure at all n locations
ctagtctaatctactcaaaccggttcagaattcaataaaaataacattcacggtgcgaaaaatggggtttgacaagtttattgggggaaaaaaagactttacaaaataatacccctgggagaagggagtgggaaacatgatttcaaaattttcaatgttttctagtctaatctactcaaaccggttcagaattcaataaaaataacattcacggtgcgaaaaatggggtttgacaagtttattggggaaaaaaagactttacaaaataatacccctgggagaagggagtgggaaacatgatttcaaaattttcaatgttttctagtctaatctactcaaaccggttcagaattcaataaaaataacattcacggtgcgaaaaatggggtttgacaagtttattggggaaaaaaagactttacaaaataatacccctgggagaagggagtgggaaacatgatttcaaaattttcaattttttctagtttaatctactcaaaacggttcagaattcaataaaaataacattcacggtgcgaaaaatggggtatgaaaagtttattggggaaaaaaagactttacaaaataatacccctgggagaagggagtgggaaacatgatttcaaaattttcaatgttttctagtctaatattctcagggcggttcagtattctttagtgatatcgttctcgaggtaaaaaatgtggtatgataggtttcttggggaagaaaagtctattcagtataatatctttgccccccccccctggatacgcccttgagaaaatgccatgccacgaccacataagcagaaaatgccatgcacgacgatgactcgcagcgttatggatgagttgggtctatggatgagttgggtttggatgagttgggggtgactcaaatacgttgtcatgaatctgcaatcagattttgcgtctttttgtgatatatcgtaacgatgctaaaaaaaagtgatagataaaaatatacaaaaattaagcgttttttatagctttcaagcgagaaagtgtgtttaaccggcggcagaggttgcattatgacgcaaaaaaaaaacgctgcgtttgcgtaaaagagaaaagcattagtatatggcaattactttggcatccgtcttataaattggcttgctgaattgtatttttcaaaaatcatatttgtaggacccaaattatagttttggccccaattagattttattttggtaaaaaacttggcaaatttgtgaacaagcaagtattgggttcaaatactcttacagcacatcctccgacttcaccgccttgccttgggttctggccatcactgggccggtaagccgggcgaatgtgcaggtcggggacttcatgatccctttcgagtggcgccacgtgcctgccaggattgatggactcttgggatgggtgaacgaagaggaggcccggatcagggaggggaacggcgctggcattatggagctggtcgccattttccagcaccgatttgtatatttttgggttcctgtgtttaattagtttaattggaaatttaagctgtacatccatccgtatcgggacgcaaatggtcgtgtcagccgtctgttcgcaaatcttttgttgattcgacgcggcctcaacaccatcagctatttgcccgccgtgcccgcccaagagacccaatattatgatgcgcttgtggccgcaagcagtcataacaatccaatgccattcattaattttgtgtcagcaatgatacaaaatcacaattggtaaatgtattgtttttgaacagaaattactttaaagcataatttaaaaaatttaaattatatttctaaaataattttgaattttgtaacagttactaaagcgggtccaatgcaaaaaacttgaaaatattgccgtcgaagatgtttattgattttgcgtagaaatgggaccgggaggttgtgatgggaagggtgcgaatttggttgagcacttccgccgcccaaaaaagtcttcaaaccaaacaatctttttcacaaaatgaggttctattgcagttttcacaaccagcaaaaaataatctgccaactattttttggtcataattcttccataaacaaaaaaaaactttttgggattttataggctaatagaaaattcttagagctatcaaatatacaactatagtcgtatacactgcattagaaccaaaaacaacaaatatttgaaatatggtaagtaatataattatataaaacttaaaatatggaaagtaatataaataaataagacacatttgttgaggcatttataatcatttaatcattctcctcctcctccatgttcttcttggtcatcggccagcaaacaattggcctcattttcggggcggacaaccagcaacagttcgttgccttgtgccaaaagtgtgttgatgtagtggacaatgccatttcatttgctgtgctgatcagtgttggggcggccaatttggagtccaaattgtaataagtgggcccaaattgtttggtggtaaactgaacatgatgcaaaaatgaagggagtaaaggtcaatttcaaatggatgtccgagcaaatttttccctttttatcgcaaaaattttttcccatcaaaatttttttttgaaaaaaattaattataaaaaacaagaaaaaatcttgcgaaaatgttttggtaaaaaaagatttatgctttagtttagggttcggaccccgtgngcggggtgacttttcgcggaggcgggggattgcggnggtcagagtcgcgggggcggngggcgagggtgagaaattt

SEQ ID NO: 3958 - DNA, 1290 bp, Heterodera glycines
tgttgataaaaatgttattttccttatttcaatttaacgttgtcgcagaattgattttgcgtagaaatgggaccgggaaggttgtgagggggagtgaaggatgcgaaatttggttgattgtgagcacgcccccctcccaaaaaaagtttccaaatcaaaaaatctttttcgcaaaatgcggttccattgcagttttcacgaccagcaggaaaataattaggcaactattttttggtcataatttttctataaaaccaaataaaatttttttttggataggctaaattaaaatagtaaataaaatgaaaaaaatcggtaaaataaagtgcgggcatatgggaccgaacccataactttattttttccgggaccaatgttctttaacattgccggttttgggtcacatgcctaaatttggcaaaaaacttacaacttcggtcactctgttcgctctttaattttgcaaatttcagactaattagcggatcaataacagctcgaacttcagactgaaaattgtaaaaaaaaattattatattattaaaaatgatcaaatgccatttattacatattcggcaataagaattttacgcgtagcaatgctggtggctttgggccgcaacaattcagccattttgcggtttcgtttatgcacttaaaaacagaagaatgaatataaaaatcggttgtatcattcgatcgccctaagtgtcctctattagtctgcaaaattccaaaaaaaattgtcaattttgaacaaacttatagccaaaaataagtgaaatcctgatttctgatgttcttttggccataaatttgttagaaattgacaaaaatttttgaaactttgcagtctaatagaggacacttagtgcaatcgaatgataccaacaagattgtatttggttaagaatgaaagaaagttatggccaaaaacgtgctggggcccaactgatagagttcgtcaaaaactactttttaatatataaaaacagaatgctaatacatgtcaaaaaagaattttaagcatgaaaaattttgtgtacactgtacaattcaacaaacagtaagtatcccattataaatgaagtaccaaaaatattttgcttaaagatattatggctgtttataagtcactcacctctcagcatttttgtagtttgtacgtgaaatataactgcttaaaagcaacaaaatataataaacgagcaacaatttttgacagatatatattataaattaagtgcatcatgactttgtatgaacgttgacaaaaggtgtgttcgtaat

SEQ ID NO: 3959 - DNA, 6706 bp, Heterodera glycines
tttttttaaattttctgtttggaattttatttttaaatttttccgggtaggggggggggtaataatgtgcacccaaattttgatactgtattattctgtaattttaaagttttttcaataaaaaatttcaggtgctttccttcactttgtcccagtggaaaatctccaagtcgaccattctgcagcccacccacaaccaccagcatctgctggttgccggcaatgagttggcgcccgactgtgtgaggcgccaaacaattttaaatttaaaaatgagaattttttttaaaattaatttcttggcgtatcgtcgttcattttatttcagatttatatgtttcacattgcctcacaattgcttgttcgcacattctcttcatctgaccagaaacaagtttatacataattagtcattaattaaaaataattaagaaatcaaaaaattaattttaatggaaattattttaataaaaaaaacaattttagcatttaaacaacataatttaagaatcccgatttgaattcaattcgctctttaaaccaatactcttttttttaaataaatttaaaaaactaataaatttttcaattttgaggaattattttgtttataataataaatactaataatattatgaatttgaaaaaattttaatgcatttaaaaatccgatttaaaaatttaaattaaatctttaattattaaaactagctctttattttttctttttttaaaaatattattagtaaatcttttaaaataattaatttccccccaaaggtcacttcgttgtgcgcatcgaaatggcgcgacggcggcgacacggttcagcaacacaaccaacaccatttctttgtcagcacatcagcagacggagcagttcgagtgtggagcttcacacaggtggaaaaatgtggaatttcataattaaatattaatttatttttaaaatttcaaatgggcaacaactaaattattaattaattggcgcataattattttgttcgtttttctgtaaaaagaaaaaaatctcaaaaagtttggctggagagaaatcctgcttctaatataggttattttaaaagccacatttgccatttacaaattgacattaaaaagaattttgccaattttcaaaattgccgagaaaattgggtgtcaaaaattgttgtttttttttgaggcttcggttgtgaatttttaaaaagtcataaaaattcaatgaattaacggatccggatgcggttttttgaattcaatgtagcataaaggcttgtctaaaatacaggcactggtgttgaacatcgaactcttgcttaaatcaggtttataacacgggaaacccggttttggccattttaacccaaaccgatccatgattttttctcgcattattttaaaattggcaacaatctttttaatgtcattttgttgtagataaatatggcttttaactaatataattagcagctttctctccagccagggtataattaattcatttctaattagttaattaactattaatatttaattaataaactaataatattttaattaattaggcgcaatgtttgaaaacgctgcacgcctgcagcgcgcgcattctgtgctccgtgctcagcagtgacgaccaatggattgcggtcggcagcgcggattcgtgtgcacgcgtgctgctgctggacagcgggcaggtgacgcgcacattcaaagagcacacaggtggaatttaaaaataaagaaaaatagttatttaattagtaattaaaattcattaaaaattaattaattaattaaattttacatatattttcaaagcaataaaattattaaattttaatttaaatattacaaagtaaaaatattgattttatataaatgttttgacttaattaattttataattattttatttaaattaaaatacaaaaataaataaaaataaaatttgcccataggccctgtggtcggtttgcaactgtcttctgacaacactcttctcgtcaccggttccggcgaatttgtcgtcatggtaaggccataattagctatacttttattattatttttttacaaatttcttaaggtttgggacattgaaaaaggcgaaattgttgtccgattacaaggtgtttattgtctagaattaaatttcactatttaattaatttaattacttcaccaattagttggctaattatccaattatactttttttcattatttagttaattaattagtggtaatttaactaagcaattgcatttttaaattcattaatcaattacattattgtttaattaattagttcattaattagttggctaattaattcattacttttttcaatcgcttttttaagggctgatggcaccggtcacttgcttggcattgacaaggtgttctaattaaattacaccccatttaaattttatttttttctccttttcaaaaattaatgatttacattttaaatttaaaattaaaaattcttttaagcaatgacgcctttctggccgttgcatgcgaggacgagacgctgcgcgtcttctctcttgtttctgcgcaagagctgcacgaactaaccgggcatgagtgagtacgcacgcaacacaatgcgtgcgcgcatattttatgcgcaaaaaatcccaatttttctagcaatttttgaaatttgatcataaaaatttccaatttaattttgtgttctatcgcaataaatgccattttttggcattctgcctctgttgcactttatcatcacattcgcatgcacctaggtcacgcatcaacgcgttggttgcgtccggcgacgactgcaagctgttcgcgggcacgcgcgggcgcgtcattgtctacgacatacacaacggccagctgctggaggtgctgcagtgcgcgctggagcgccaaccggtaggcatttattggtcgtgcagaaatttcaaaaaaaaaagttttaaaaaattttgtaggtctcctctgtgcggattagtgatgatgattcgttcgtgctggtcgcatgcggcgatcgcatgtgaaaattaaattaaattttttatctttaatatataaatttaaaatttataaaaataattttaaaagattaacgataaataatattttaaaatttaaattaattagaaaaataaaataaaagttatattaataataatattattaaaatgaattatggctaaattaaaattctgcataatttaatttaaaataataataactgttttcctaattaaatataattaattaccactaattgctttttataaaaatgatattaaaaacaatttttcatttaaaataaataaaacaaatagtattaaaatgaaaaaaattaaattaaattaaagttctattaaataacaataattattttttcctaattaataataattaccgctaattgcctctaagtcacatgtgggcgctggacagcattgagcgcgacgtcgccgcggtgcagcagcacaaaatggcggccgtgacggtggcgccgccggagtcgccgtcctccgcggaaccagcggcggcggaggcggaacaaaccgcgacggggggcggcaccgcgttgacaagcgtttcatgtgtgcaaattgcaccggacgaaaaggtggcacgcgaaagcaattaagaaattaattgatgcttgatttcatggtcgagaaatttctcgaggattatttggtgtctcggtatcgagacgcgtgggtttttctcaattttgagagtgcttttagaggaagcagctcgttccaccaccctctccctgaaattaaaaaaaacttaaacttagaaatttttcattaaaaaaatcttagaatattttttataagaaagtttgaagaaatttttttttttgacatatttgttttgaagaatgtagcagcgattcatcaataatgctgaaaaattttcaaaaaaatttttataaaaatttttctgagatttttcttgaaatttcggttaagaaacggcgacgggcggggagggggcataacgctatttacgactcttgaaaccaattattgatcacacttctgtgtgtgtgtgtttgtcagtctcgagatcaattatggtcacgagactcgattttttgaaaaagtttcaatttgatcaaaatccccgcgcgcatttcagagtgccggctgcgggacggcggatggcatcgtggcattttgggacttggacgtgtgccaatgcatgtggacaagcaatgcgcagcgcaacggtgccgtgagcgcgctgtgcttcagttccgactcctttctgttgctcagcggcagtgaacagggtgaacagcttgccaaggctgggaccaatatatctgatcactgatcaggccttgaagctttctttatgcagggattggatcgaaaatttttccaaatcagaacatcggccccaaaaatcagatttaggggtaaaaaatcagaacattttgcaaattaatgtagtatcaaatttcgtatttttggtctcccattatcgatcgatcttaaacaattttcttaaggaaattagcaaatcataaattttagtgcattcgggataaaaaaaatcagatttttaacaattttttgcggtgcgtttttccaaaaaacttttgggaagtgcgaggggggagatggtccggtggcgccggccgataggcacctccgagaaaattttgtaatttttaatgcgatttgttaacagattttgtccaaaaatgaccaaaatttgccacaaattctttattttcttgtaaaatagtgacattatgccataaaatttcaaatttctgaagaattttaagaaatcagaacaaaattgggtcactaccctccagctcaaaacatttttcagcaattttctggaaatttttttttgaaaacaattcgtaattcatcaaaatttcggaaaattgctagaaacattaaaaaaaaatttttccttgaaatttattgtgaaaaaattactaagatttaaattttctaaaatttaaaatattttttgcttagttgtgtggtcgggtctgattgtttactagacttgtccctaatcactttggtccattgggtctgatcaactcactcataggcattgtgcctgatcacctgaatggccagaccccgctttgatcattcaaactcggggactgatcagtacgcgccgataacatttttaaggtgccgtctcgttgtgggagaccaacaacggacaattgctgaagcaggtccaattgcatgccgaagcggttgtggcgttgtgcacatttgcggatgggtagaaaatttaaaatttgatttcgaaattttttgaattttgaaatttttagggttcgtgtgctgagctgcgattcgtcggacaatgcttatctgtggagtttggcatcgcttgacgaatcttctggcggaaaacggatggaagtgggcaaaagatggaaatactttaaaaatgaaactaaaaattagagaccgacctggacatggatccaggcctggatttttcctggatccaggtccaggccatttttcggcaacctggatttttcctggacttggattttcctggatttttgtccaggaaatcaaggtccaggtcaaatgtggaaaaaaaaatccaggtccaggctttttcaaaatgtcgatctctactaaaaatgtataaataaataatatttaaattaataataaaaaaatttaataaatatctaattaaaattgaaaaaagaaattatatttattcttcttttataattaatttttatttatttgaaaaaaatattaattaaacaaatgaaatatataataaaattccagaaactatctaatagcaaaataaaattaaattaacaatattttattaattaaaaaaaaattcataattcaaaaattttaaataaaaaaaatcttctaaatttcatatacaaaattgttgtaaaataaaataaaatatcaaaagaagattcaaaaatacaacgaaaatcaatttagttgaatatttgagtaattaatcgtcatgttttataacgaataatgccaattaatttaatttaattgaattgaattaattaattctttcatatttatttaaataattaaattttttaaaaagaattaaatccaaatttcaattttaacaattttcttagctgatcgcctccattgcgttcatgcatccgccactgtatgtgcgactgtcggataccgtactcatcgcgcagcatggcgccaacccgcgggagttcgttgcgatacccacaaaatctgaacaaaattcaaatgcaaattttcttttttttctccagaatgaatgtttggtcagtgtccggcgatcggctgtttacgcgatcgaaggtctttttgttttccaatgcaaaattttaccccgtagtgcgtcgacatttgcggaccaaatgtctgggttgaattttcgaataaagaaaaaaatacgaatgcattttcaataaattttaatacatcaaaattaaattaatgaaggtagctcatacaagtctacttttgcatttttttcttttttcttgatgggagagattggctagaataagatatttctaacctataattgaactgtgataaaaaaatttgctttattttataaaagtcttcaagaattttataccaaggaaagttttggtgtttcacttccatgctttggtagaccaagagcttaaatttttatc

SEQ ID NO: 3960 - DNA, 2022 bp, Heterodera glycines
ttttacacttcgaattttccagccaatgcccgtcatttctttgtgtacagaaaatttgaaaatttgcgaatttccattttttttttgatttacggactttttaccccaaattttccaattttaattgccatttttggggaatattttttttttgcccatttagtcgaaatttttaggggaaaagtagtatttgtattttctgttggaaatttttgattttgcttattggtacctcctccaaggtctacgcacctaaattttccaaacaaatttgcgctaaatttttcaaaatccacaaaaaaatttcaaaattttcccttcgccgagccccctatttcccaaaaaaattcaaaaaagcacactgcaaaaaaagagtgacatgaaaagcaaaaaaaaaaaaaaaaattatcttcgcccgagggcgtaccccctccaagccgaaattctggcacattttaaacgattttttcaaaatttattttcaacaaaataatttttccaaattttcccgggctaattgttgttgtaataggtccaccacaacgaggccatcctttgctatggcgtcaatcggtgcggcactgtgctgtgcaccggctcacaagacttgtcactgaaagtgtggcagatggacagtggcggactgcttattcaggtggtgccaacaaattttgtagcgccaaaaaattaaaaatttgcgattgtcctctgatcatctgatcaatcaattttcagtcgagagttattgggcttatttgagttgatcgtaatcgaagtgatcagagcagtttaacatttgccgaaacgcggaattgatccctttattcagggctggtattcaaggacgtccttggaatttgactctcttccttggaaataaaaaatgtccaagtaaaacatgtccttggatgccaaggacgtccttcctttactcattttcagcacgtttaaaattatggcacaaaaaagactgaaaaaactttttaatttttttttcttaaaaaattgtaaaaaaaaaaaatcagaaaaacaaacgaattatcccgaagccgagaccgtgaaagacaaagaattttcctagtcgagactcaagatttaattcatgattcgatatcagactgaaagccccggggagattctagagatttgagactgtgaacagcttgggacccgcgaaaagagactgatctatgcttatagacttgacttggagactgaaaagccggggctcttctaaacgaggccgagtttttctcccattcccgacaaaaatttttcaattttcttcgagttttttttctagttaaaggatttaaaaaattttttgagcgtcgagactttcgaacatcatcatcacccattttgtgtgttgtacaggtgctggtcggccatgaggaagtgcccagttgctgctgcgtcagcgaggacgcgctcaccgcgtgcagcggggcgcttgaccgccagctgatcatgtgggacgtgcagaccggcgctgcactgttcacgctgcgtcggccggccgtgttgcgcttcctcgagatcagcctggacagcaccgtggtgtgctcaagtaggggattttttgaaaaatttttcaattaatttttttacgattttctaggcggcgaagatggctgggtcgaggcatggcattgcaattccggccgactgttaagtgccttcaacacacacagacaggtgggacgggatgggactacggtgtggggggggggggaggacctttaaccgacggaccggattagacactgttaagtatttttctgagacaatacccttttgagtaataatattacagtattgaacataatcagttactgaataccatttggagcaatattacgatattaaaaactgttattagttcttctaatatattgtaattggagttatatacggtattagtcattatactgaatattggcaaaaattgggggacccacgcgtttcggcgccagcccagcttttaaactataacttttttctttgtcaaccaaatctaat

SEQ ID NO: 3961 - DNA, 2427 bp, Heterodera glycines
  unsure (1)..(2427): unsure at all n locations
tttatatagaaattatttatttattttaaatatttttatgctttttttcattttttgtttatttttatgtttttaaatttaattagactttccgtttacaattttttcacaacctttacacaaaactgctttttctattatttttatatcgttttttgcgatttaattattttttggcatttttttgcaattttttatgtttaaattaataatttttcaaaatgtttttcagatttgccttcacaacacaccagccaatttgcattccacttctgccagccggtacgaacgcgtcacaatgccatcgccgtcgtcgtcgtccaaaaatcagccggaggcccaagcgagggcaccgccggcacgcggcggtgccggcggcgggtcattcgcattggaactcagtgccacaaccaccggagcagcaagtgaacaaattggggaggagagggagaagcaatagaaatggcatttttgaaatgattagaattccattcccgagtgatctgaaagttttcggcgggattagttaacggacaattgtttgggattaatataatggattctctaaagtgattaaagaaagaatgtctttcgaatgattaaaattgattaagtctgatctaaaagatttgaatgatctgaatctaatttcagacaaactgttagaattttgagtgatttgtggaattaaaactttttttattagaatgggtttccgagtgatcggaagcctttttcataaatgatcaattatatagaacacttcttggggtaattaaacagaatttttggatttcggcaatcagaaacactttggttaattaattttttgtttttaattaggctattagcaaacatttaaatcattgccccctttcaaaggcgacgacgggcccgaaccgatgggcgacagaattccgcccgcaaacggtgcagacaaagagccggtgacaagtcgggtaagcgcatgcacatatggggaaattgcaaattttcaaaaaattaaatttaaaaataaaatttttaaaataaattttggcatttttttcgcgcgcaggcgtccgaagtcgaagcgcacgcgaaccgactgcgcgcggtggcggagcaagagcagaaacggcaagcggaacaacaggcactatgccaaaaaaaaaagaatttttaatttaaaaattcaaaaaaatttcaggcgacaaattccgccatcgccgcccctgcggaacgcgacgcggcgaccgcgtcagcgaccgccgcgcagtcgccggacgccgccgcctccaccgctcaacagtcgcagaaggagcggcggacgcggcgctccaaactttgtacaataatgtgatcggtggttggtcaccgcctgggccggcgagcgacggtgcgcacgattacggtattggtgcaacagcgacgcggcccgataccgtaaccatgaaagtgatttgtacagttcatactgtgtatatttttgttatgtttcatatacggtatcttttttttatttcagtaaacgtacagaaggaactttctattttttgtttttgggaagttgttggttttaatgggaccacttcttttttgaaattattgaacagaatttatccaacaatttttaggtaaaattggttaaccgtttacggggtgaagaatttgaaaatataaataaagcgatcaccaatgtgggaaatattaaaaagcggtggaaaatgccaccataacatggtgttcaaattggcattccatgggttgtaaatgttcaattgggcatctaatttgccaattaatgtcttaattactagagtgctcagttttcagcacaaaggaatcaccgattaagcactcactgtaaacagaaccaaattttctaaaaataagcatgaaaaaagcacaaaaaaggcaaaatcagcacaaaaaaaattgaaaaaagcataaaattaagagataagttggccaattaatgcttctgcctattactaattgagttccattcattgtcctatcttctttattttattttgccaaagatcggcgcaaaggatcggtcggttttttcggaaaaaagtcgaaagcccaaaaattttgtcggttttttttgataaatattcgaataaaaaagtcgaaaaccctaaaaaaaccgaccgctctgatctcaagcttttttcaatcccaaatgatcagttcttcgatcacttttattcccccaaatgctcgtcaaaatgttctcaggctcacttcattatcatgttattttattaaaaaaaaagtttaagccaaaaaaggaaataatgaaatgttaaataacgaataaatgggacaaaaattcagcagcagtgctctcgagaccaaggccgaacttgactggattttcaattacggaaatccgtaaaccgccnttccttgggtctaaaaatgccgtaattacggaat

SEQ ID NO: 3962 - DNA, 6659 bp, Heterodera glycines
  unsure (1)..(6659): unsure at all n locations
ttgcacacgaattcaaagtttttgttgattttttcgctatgcgttccngttctgcncatcgtaagggtaattgcgctgnttaagtatacctactttttccaccaattttctttcttatcttcgtagcggtagacctntaatntaattatttcttaatttttatgaaataaagagaactatgaaggaaaaaanaattaaattacgattgcatgtgcagccgtaccggccttaatccaatcgctttcggccgcacttacgtcgtaaacaccaaatattgttttctccgatgccgcacctccttaatgtgcaaaacaaattttgggttaagcttgaaaaaccaacctaaaaaatactgtagtgttgccgttacttgcgcaagtgtatatttttcgcgaagagaaacccaagtgtgtccatcattaaactgatcttccactatatctgactaaaattaatgaatttttaatttttcaattcaaaattttactgctaagcactcagccccatccttatttaggtgatttgccataatgtgcccggcttcgtggtgtgctactcttcggcgaacagccatctgatttagtaattattttgcattaattaaaataacattcatacatccaccaaagcaggcacagcatcttgctgagccgttgcacagaaattcaacgcacttaattaattaattttatttatcaattaataaaaatttttacacaagcagtaaaatgaagacggcgctcatttcggcgttaaatgattatcatatttgttctatccgagtaattacttatatagtgcatccaatccttaccatttgggtggtcttgtttatttagcctttctagaatgcattaatattcctctcttcttctaactttttactgcattatttagtttatttcatttttattaactcagctccctttcaataacaatttttcattaaacaaattaaattgaatccgatgactggctaacttgttggccttattatttgctttgctcttttaaaaattatttaattttttaattcattttgttataggttgaaatgatgaaaaataataataattcttactttagttttcactttattttaaataatttatattaaatatatttatttagcatctgttttaaatttctttatatttaatatttttaagtaaaatttaaccgattttcggttttttaaagcaggggaacggtaccggggctgaaaaagagcggcgttctcaaaaacatcccatgtgttccgctatgtttaaaaatccaattttttgtcattcacaactaaattttcaaaaaaatttccccaagccgcctaacggcaccaccggacccataccccccccccccaagtttcaaaagtttgaaaaaaatgtgtcacgatattgctgtcaaagttaaatatcactgaataatttttcaaccaaatacacacaaatatatttgtttacttcgcatttaactttttaaattgatttaaaattttaaaatttaaccctattaaaaatattaattctattattttttcaaaaaatttctgcttcaattagaattttttatgaaatttttttcatctttaaattctccagaaaactttctcacggaaaaagtcccgattggtcccggcccgatctcgaccagggatgggcaaaacttcgagcttcgtgctttcaaagtaataaaacaccactaatgattggcttatggtatactttaatttaaatatcattattaactttttgtttattaatcttcattacatgggtggtcagtgggttgtgcttttggatccattcctcatttttttcgttggatcagttccactccaagtagttgtttttgtttaattttcaaaaattaacatttaaaatatgacgaaattataatatttttaatatataggtccaaaatttacatcttttcaaccggcgacgcctactcccccccccccccaatttttcttaaaaataggctcaaaatcgtatttaagataatccgttactcccaatattaaaagatatgtggttaaacttatgccataaaacgtatatagttttgcatccatttggaagaactgagtttttaatttaaaatatttttattaaatgaatgtgtaaatatgtatatgtttttatttatgctggacaaggaacatagttattacctaaatttttcaataatatttttaaaaatattaattctgtggtgtgatacatttattaataggtttggaagttaaaaattattttttgcaataaattaaaaaatttgccacaaaataaaacattttgattgtttttttttgctttcttaattaaggaaacactttttaaaatatgaaaggttgataaattataaattttaaacgcaatatttgaacacgctttttatatattttttgttcctttccaataacgagccattaggaagagaaagcttttacagcccattgtttgcctacgaacagcgcaagcaatggcggcgatgtatgtgatctgatcggctctgatcagcaaatggatgccaaaaaaggtactgtggtcagagtttgatcgatctgatcggcaaaggatgaactttggaaatattttggcatttaaaattgaaaaataatgattttttatgaaaacaaaaaatttattttatatatttaaaattatgttttttcattaaatttcattattttagtttagtaaattatgatattattatatccattattatttttatttttgtatattatcgcgcaaattgaaaaaattggatcatcagaaaagaaaaaattagagcaaaaaacatttgaagaaatatttggagaaaaatgggaagaaaatgaagaaaaactacgaaatgataagaaaaaaaagaaataattatctatatatttgaaaaatttttaaaataaaagagaaaataaagcaaaaagaaaaaacattcaacaaaagaatgggataaaattgatagtaaaataacaaaaacttagagacgaatctcatttatattagaaatgattaaagaacttggtcttcaaaaacgcaaatagtacaaatcaaaaattcattgatatgacaaatgaatataagctaatgggaaagtattcgtaaaagaaaggaaccaaaattatgccgaactttgtaagaaaatcggagtaagctttggaacaatgttggggtggaagaattcaattgaatattaattcgaaaaaatagatgagaaagaaaaaatgaaaaaaattttattggacccaataaaatgatgatggtaaattggccatggaaaagggaggaaaaaaaagtaaaatgcctcttttaatgttaaatggcctaaaatgtgcaatgaatgaataaaaagttttttttgcagaaaaaatggattgggacgtaagtttttagtattatcttttaacttttcagatgaacaaaaattaatatgctttttgttatatttttttcgtaagcctatttttaattattttgtatgttactaaagcaatcagaattttaaattttagttttataggtttttaaaaattaattaatgataatgaaactttgcttttaaacagttaaagaaggctacatttatgcattttaatttttttgatttttcccatgaaaatttttatttaaaatttatgtgtttttgcgttttttgtttgtcgcaaaaaaatgatgaaacaaatactttacttaacttaattaggtattactaattttttgaaaaaatataatataatatttttaacttaattaaattgaaatatattttttttaatttttcatcaccgttgtttggtaaaatcttttatttttttcttattttgatgtttatttagtaatattatttgtaaatatataaaataattattctctgagcagtgtctttcacttgttgtttctacatttattaattaattggaatctaattttaatatttaatttttaagttaaataatttttttgcttggactttttttgtttgtttttttctaaaatttttaaaacggatttatttaaataccagtataatatttcatagataattgtattgataaaagtcaataaaacaatacagataaaaatatatcttttaataaagttaaagtaattttgaattgataaatgatgattacccatcacaaatagtacattataattattttgatgtagtttttttaaagcatatagttattgttttaaaataatatccggaataaaaatattttataataaagattgtttttttcttattgtttgtcttttccaatatatttttttaaataataaaattattttgtaaatacccgtaatgataccatataaattcataacttagctccaattctaccaaatatttcatgctatcatacaatagccttaattattcactatcagaatataaattttaaaattcataaaatttcaaaaaatcataagccagaattttttgtccaaaaaattttggaaacacaataaaatttcctgaaattttaaaggcaaatacagaattcttagagctatctaacttataaataattttggataaattgcattttaaagactaaattttaaatgtttataattatatatgcattaccattgcaaaaagcatagcatattcaatgctttataacttttttgtaattaagcaaaaaataaagaaaattatattcaaaaaaaaaacaattaattctatgaaatgatactacgaaatattaatttggttgaatttgagccaagttatgaatttatatatattacccattttttttcttcaaacccattggcggatttaggaaaagcgcatgcgtggcggtttttaggaaatgcaccagcaccacatatttgtacataaatttgacatcactgataatgaccttttttgcttttcaaatcggaattttgattcaaaagtttttgctcataagaaagttacaattttgtataaagcatgtgccaaattgatatatgaagggcgttcaaatgataccagatcgttagatttggttgaaaattaaaaaagttacagcccaatgggctggcgccaaaacgaccaagtcctctttgaacaatgacattttgtaaaatattaataaatgtttcaaatttgacacatttcactggtaaaattatattgaatttttccatccctttttaagacacttcgccaaaaataacgattaaaaattaatacaggaaatacaggcttttaaggcctgtacctgtacctgtattccaaaaatggcctgcacctgtattttctgtacaaaagtacaggaaaatacaggtacaggaaaaatccaggttgccgaaaaatggcctgtaacaaggttttattaataaattaaattaaatttataataaagtaaatcttttaaataaagttttttaatatttctccaaaacaacttttaaaaaaccataagcaaacctttccgccatttaatcaaatgcacttttatttttgtaattatgcttcttaatttataaagaaaatgggcattttaatttaagttgttctttgaatccggttgttttctctgaaatcaataaccaattatcgtgaatttaagaaaaactttttaacaaagaatcaaataaacggagtcttacattaatataaaataatggagaatcaaatatataaattatgcatgtcatattttgaaataaaagaaaaaataaaagttatcataaaataccgtacaattaaattgaaatttatattttaaagagacaaaaaatataaataattatgctattaaaattaaatgagtaattacaaaatagtaataaatgagaaaattcaaataataaattaatgattgcaaatccagctttataaataatcccatgcatcaatcacataatgaaacgagaaaaatcaggttgagaaaaaaaacttatactagtaaattgaatgttaaaaaaatttgaacaaatttggtatcattacgggtatttacaaaataattttattatttaaagaaataaaagcaaagtttcattatcattaattaatttttaaaaacctataaaactaacaatcaaaattccaaacaccaaaacaacggacgtcagaaatgcagcagccatttattcggaatttaaatctacaaaaattttgagagaaggaaaagccaaaaagatgaaaaatgacgaaaaagttggatgaacaaaaatgacggttcgctgctgcacatctgtcccaaaatcttccaatcttttcttattcattattcttcactaaattgcattttcaatttacgcaccattttccacaacatttaaatataattgaattgaacgccgggggcggcgttaagcagagagcagagaatattatgcggcgattttcgactctctttcctctccattctctctctcgctcgctcgttcatttctctttctctagtgcttccgccaccaatgttgccattttcctcacccccgcccattaactcaactgctctgatcagatttaaggngagagatttgggatttgagtcagttgttgatcacttcacctttttgatcactcaccaatttcccttggcttttctttaacttctggtcaataaagtgtagaaaaaggggggcagccttttgggggagggatgcgcctttccgcatctcaggctctgcctg

SEQ ID NO: 3963 - DNA, 856 bp, Heterodera glycines
aagaaatgggatataccaaataaatcgattggatttgttgaaaatgagacaggataaagtgattgtaatagattattcgatatgtgtagtaattgatcggagcatattatggcacatctttttatactgttcaattttaccataaatatataaagatacggtaaccttcaatatcccaaggcctgaattggtccttgaaggcaaagacattctttatggcattatttggtgcaaaatctattaataaatcgcacaaaaaatccattttttttccagcggcgcctatagacggcaccggggtggttaacgatttcgtcagtaaacgatttcgttagtgaacaatttcgtcagtgaatttcgtcagtgaacgaattcgtcagcgaatgatttcgtcagtgatgtgtttgggaataatatatcatgcagtattttaatatcagtattattaataaaggaccaataaataataatatataatttcctacgtatatataccatgcagttattcttatgaaggcattttttaaaagggcaagaactaataattttggagtatgtgttcccttgtccggggttgtccacgataattgtatcgctatctcataacaaatttcatgccttctctaaatggagatgtcagcatagtttgcattagcatatcatctatctatattacttataaacataaatgtaatatgtagagtcaatcatttgaagcactctcaacaataacgtctctggattgatttaagaagtcaaatgtagcagaggaaaaatatgcaatctctccgttggcatagagtattcattggaaaacttttcccgtctcgaggaaggaagcgagtacggaaatgcc

SEQ ID NO: 3964 - DNA, 2295 bp, Heterodera glycines
cggataatagccctaaaattgagttaacaaacaaatttaaatttgaggtgacatctgatggctctgtaccatttgcattcggacccctcggcctgttccaagtgcaaaacgccctcccatcactcctccgcccattggcattctgctcccgcggggccttccccgagttgaagtcgtaccgcgcagagattggcccgcggtgactgctccgccgcggctgccccgtccgcggcccctcggctggtgcagttcgcctcggccccgtcgacccccgcgagacggcaattccggataatcttcatcgttcgggtcgtccaacagcacacggtcatcctggtgcaaaattttgtcctcttcttcatcatcgcttggttcttctgcgtttgccattggttcgtctgcgaattgctggtgtttctccatctctttctaaacaatgatttggtcgttgtgccttttaacttttatttttcctccgatttgcctcgatcagttgcaattgtcctttgtctttggcaggttgaggctgaggccataaatttgttgtcgaaagcgaagttgcggccatctttctgttcacaataatgcgctgaattcccctttgggttggcagatgatcatcagttttttcatccatttgttcctttactatttcggtaggaaattctgtttccattttggcattgtcttcgagtggcgacgtaaatgacgaagatggcgtttttcgttttagtgatgggcgcccaacttttggtgctaaaatgaattatttttacagaaaatttcgggagggaattcgaagacttagtttttttaaatcttttttgtttataaggaattggttccttcagtgccgaaaacacctcaagaattcaaggaattgctatttgttaaacgtctaaaatatttagattaaaaaaaaattttgtttttcaaccatcaaaaagtattcatttgctcacccgtcgtcggcgcttcgttcggctccgtctccccttcggcgtgcatcttcgcccccggtttcaacacgtcccacactttgtgcgatttcattgccgccgttctgcgctgccgactcgcaatgttcaactccggcgcctgttgctcctcttgccccgaatcctcctcatccgacccttcggaagtgctcgtctttcgctttttaatattctcacgactaatccccggaggcattttctcttaatagtaatagctgaactgaaatagttaaatgataaaacattcaaatccttcaagataaagcagtgaaaagataaacttggactttgggaaaggacaaacaataaaattcaccagttttatcgaaaataaaaagcatggcaaagaaagaaacgtagtataaaataaaccattataatgtgcgctataaagcatatgctgcaaatatgtggacaacatcttataaggcggttatgcccgtaagtgtttggttggggtttctaacaaaataaaattctttcttctcaactaaaccatttgagggtatcattttgtttgtcggttgaaacggaatgagaattatcgagcagttcggtgcctggagtttgctgtttggcgctaaattgtgacatgaggggaaacccctccccagtgaaggtcgacctttgttttgggtattctgtctgcttctccttgatcctgtaaaataattttccgcaagataaaattaaaagtttgaaagtataagttttttgaactcagggaggtcgtccggggcgggtcgttcccagaattttggcttggacggtacacagccacagaagactaatatatatatatatatatccactcgaactgtaagtcggaaaatgcatgtgttatataccattggatagagcaagatcgatttctattatgaatttataatttatagaatattatacattaataaaaatttatttagttgtatggcggatgggaagcccacctacaataatggaggggtgaccgcataacacaagttacgagaagaaaatgacccaagaaatgcgtgaggaacagtataaacattgttgaatagccttatggttgtaccgatggctgattcggagctgtaatagaaaaactcgtataagcgcttgtaaagcgaaaacttttctcaggggcgttcaagtttttgtaaaaaggcattttctattgttatttcgtcgactgaggagaaaaatctaaaaatgtctgctctttcctatttgaggcgcttaaacaaaagtgcaaaaatcagaaatatgatatttcctatgatatttaaaaaaatattaggtttatatattttaa

SEQ ID NO: 3965 - DNA, 5041 bp, Heterodera glycines
atttagtaatattatacattaattaaaatttattcatttttatgttggatttgaaccccacctccaaaaatgcgaatttaaccaactgacaccaattttaagtgaaaatacagccaaaatttcgatttttgaggccctatagctttttggtttctttctatatgcccgtaaaattaaaaattcataatagaaatcgaccttgctctatccaatggtatataacaccaggtggttcccttgtcagtcttaattatttcaaacaaaaattacggataaaagagggcgggggagctgtccccggggagggtacgacatttttacctttaccttcaccctaaacaccaattaccaggctaattagtgttcttttatttatgatgttctatggcaaatgttctaattatatttcattagaatcaatgataaataaaagcaacactaattgttttacgattttgtatcccccaaatgtgtttttgtttccgttcacctgtggtatctgtagcgatgaggcgcatcgcactgtaattagagcgggacttgattactcattttgacaagtgtttagaaaggtgacccacgtcgagtggggaagggtggtggagtgacaaacaaaccataactccctgctggcagcatcccctgttgaactcttcacaaggctccatgccgtccgtgtgcttcacatgaagataagcgcattggtccttgcctttgctgcaacacatcctcaagtagtagtcgcaaacgggcatttggtgtgcttttaacgtggagtggggcccatgtgagcagttgtcatcgatgttccgacattgtccgcgcatcaaacttcaacatggaaaaagtttaaaaatagttagccaacacccgtcgcttacaatggacagacttttttagccgaatgttccgtcgactcctcgtgctcatattcacagaaaaccccattaagacaattccctgtttccaaaaattggaagcaatctttggagccctgatagacacgttgtccagttttaagaatgattagactccgattgtggtgtaaacgctttcgagtgccgggatgtcgagcgtcgacagtttctctcgtgttcggttggaggttattcttgtcgtgtacaatcggagggggaggaatggaattatcactcgccgcagaacttttcgtcgtaaatgaaacggtttgctgctgctgtatcattttggccatcaaatcagtgctgacccacacattgcttgtgcgcatgccatatcctagcctgctgctactcgaagccggcacaacttcatggtttgtgtccagtggaagtttaagtgacatcagtttcaaaagtttgtgttgttcatgctgttccttttgctccacaccattttgtgtgaacactttcttctgaatgtcagggtaagttcgtccatcttctgcctgaggccgttcgcaattcggggccaaatcctcatccctgacgagcccattgaacagcatcaatatccgccagttgcggcccatttcggggtgttcgccgtcgctgtcattgtccgtgggcaccaaacggagactttcctgtgaattttcactgcaacccgactctttgctgtttggtgattcgtcggctgcagatgaatttaggtttatcctacaatgtgttacaacaaccggcttcctggtcgacttcagtagaactttgtcccgaaagtggacgatttctgggcgctgtgtccaattcaattcgaagttctcccgaggtgctgaatctttcaaacatgtatttaattaaaattaaatccacccttcttcgttggtaatttgttcaagaaatcgctttcttgacctgctgagcggcgctccattgcctttcgatgtgaaaccattcgcatgcccagtatggaacgttttgctgaacctttccgatgtggttatttgatgtgtgccattgagcggatgacgagttggatctgacaaaacaaaagggaaatagaagtgaataggatcatgaccaataatgactacctaattttaaattgaaaaacaagacaacaaagactaatattaataggaataatcagttacagttgttaatatttgctgcgatcaaactgctgatattttgcgtaattggaggaggcggaacgcttaaattgaagaactgagggttcatatgaggatgtgcatgttgaggttgaaggtagtaagccggatgatggtgatgaggaaccggcggaaagaaaactcgctaaagaacagggatcacaaaaatcaacaccaaatgaatttacagccgaattcaaaggttgaggaagttgtggtggcggaggtgggggaatgcaaaaattcggcatgaagtggttggcgtgattgttgaacattttaaactaaccaactaaacttagattaacaaaattaggcaataacggctaaaatcaaccgcaaaattttaataataagacacaaaaacaaggcatcttttatttgttaacaatgggaagctgtgcaacttttcttgtttctcggtattcgcttcccggcactttcattatttcggaattctccggtaaaagccgttcgccgttttggctccggccaatcactactcccaattcagcttcagcgattgtgagcaaataagaagtgtgcgcctcgccatagcccaaaacacgagccaaaatgatgtcaccaggttgaacaaatttgtgcagttccacctgataatgagagtaattggagtgtgcctttgccccccgagggggtggtattaataccttatcgcgctctttatcacgtatgtcctccttgcgcaaagtcgagttaaattcgttggcgaggggtgtgtcttctacacagataattgcacattttgcaaatgttgtcgtaatacgctcaaccttttacgacatgtattcaatagaattcagagtcggaccacagaaccagtgagtttcttgtaaaaaaaactaaagtcccctcctcatatttttgttggtaaatcgatatgctaagtaatacaaaatcgaaattagaactatgtatattaaaatttcaaattcacccttgcagtgactatctttccctgtgacggcagcacattgcttctctcgtcaatgttgcgtctcacttcgacaatgtttgtctcggtgtcttgctttgaaaaaataattggaaaaatgctttacattaataggtagtaccgaatctctaagtgaataaacgtgcaaaaatcctgcaagagaagcacatattgaaccatgaaattcataacagccatttcccgcatgatatccacttgagactgaaaataattgttcacctaaagaaaagcgaatcacaactttttaaattttttacactaaccaggaacacaagttcttttctcatgacttccattaaaatctacaacagaaaatccaggcaaagagtcaagaaatgaagtcgacatttccattttgggtgggtatcgcttcctttaattgtcccataaaaaataaataagtttttaagggcccaaactcaaaattgctcagatttaaaacggcttaaaacgatgagaaaaatgcaaattaggagcgcaaaagatactattctttttagaataaatttaggccatttaagacttttttcatggttattaaagtaacgattcagtccccatcgaaggtggacacttcagtacaaatttttattgcatttttttctttattttaggccattcaaatcgattccgaacatttttgagttggaccctatgactagggctgggatttttatgtgctaaaaatcctgaaatatgtaataaaatatgtgctaaaaaaccccaaaatatgtgctaaaaaccaaaaaaaaggcctaaatatgtgttaaaaaatgcaaaaatttgtgctaaaaattgaaaaaaccaagtgtatttacgcaaaaaaaatcatatttaatatcagtctttatcaattttcgcccgaccgccagtcaaaattttggcgatatcaatcaatttgtaaagtcccggattaatttttccatcagttgaataagttccttccgggaactttgaaatccagtgacgatttaacacagcgtttgatttgcctgctttaggcatttaaatatataaagaaattttctaaatgcttaagaaacgtaaagtagtcaatttttagggtgcattttcagattttcttgtatttttcttacgatttttttcaaaaatgccaaaatatgtgctaaaaaatccaaaatagcccaaatatgtgctatatgtttttatgtgccaaaacgccaaaatatgtgtttttatgtttttataagtcgctctaaaacaaaaattgttcggagaaaatgctatttttgggcttctctcgccataactaagccgcaaaaaaaatatgttaaaacataaaaatcccagccctacctatgaccaatattttccaaaaataaaagatatggaagtttaaactttaaagtgaaaattttcagtttttaattacgcaatccgcgaccgtgggatttttctgtcctccccgctccaaactgattttttttagtttaagttttaatttttatttgaaatgacttcaataataaaattagaagcattgtccggtgttcaagatgatggtcctttgtgttacctattgcaggtatttttgcattgctttgtttttgtcgtcatttacgcatacacaagttgctttcattttgggtcgaccaagtgtattttttgctcgattgtggctgggatgagcaattcgatttggcgtacattgaagctataaaaatgcggataccgcaaataaatgctgtgcttctcagttacggagatgttccccacatcggtgctttgccttatctgttcaaaaatgggctgaattgtcccgtttatgcgacggttggtggtcatctccatatttaattcctttttagtatataaaaatcccgtatgttctcaggttcctgtttacaaaatgggccaactttttctctacgattggataaatggccatatgactggaaaggatttctcgctgttcaatttcgacgacatcgatt

SEQ ID NO: 3966 - DNA, 742 bp, Heterodera glycines
tttatgccacctgtctgacttcttttcatgatttaattgaattttaaatatttttctataatcatagatattttgtcaaatttatgattaaaagtcatcagatgttaaaataaatatcatattcgtgatcagcgaagttggaaaccccaaatacgtattttagaattttttgagggggggcgacataacccgggaagtaccggtaagtattagtaaatgataagctaattgtaaggtcattgacacggctggacgagtgcttgagattgctcatttgttggaccaactttggcaaaagtttgttttgttttgtggtactatacagtgacattcgttttggtgttaagcaaagaagcggggctgatgacctacaatttggtcatgatgagtgcagttgcatcgtccgtcattgaatcggccaagtcacaagtcgaatggatgtccgacaaaattttacgcattttcgagactggacgacacaacccttttcagtttaaacatgtcaaattctgccatacattaaccgacctgaatagagttcgctcacctaaggtacataatcagagacatcccttttatctttgatattatccatttcattaaggttgttttggtcagtgggttggacatggagagcggtttttcgagagaactctttttggagtggtgcaccgacaccaaaaacatggtaattgtctcagagtgtggcttacgagaaattttgtggttaattattactttt

SEQ ID NO: 3967 - DNA, 1365 bp, Heterodera glycines
  unsure (1)..(1365): unsure at all n locations
aaaaggagagacatttaaaacgggtgcacttttgacggtctgtttttgattttaaatatgcattattaaaacgaaacncaatcaattcgttattagttatataaaatcacgatgtttacaaaagttaaatttcacaaaagaatgtttttacaaatatgggactcatataaaaaaaatgtacttaaccgaaaaatttgaaattttgctggctgttaagtcttatcttaaggtaattttatctgcaaaattaagcatttgttaattacgaactaaagaaaattgatttttcaaacttacaaatagaggatgttatatgacttcttagaaattagtgcatttttgttaaaaataatacttatttaggaattggaaggccaaatttgcttatcaccgacgcatttaactcactctatacgcaaccgaagcaaaagcagcgggacgaaaatttggtgtccaaacttctcgccacagttcgggacgggggcgacgtaatgatagtgagttggagggggtgaggggcagaaatgggacataaagtgattggaatcacattttgttaacaaggcaacattccgagctctgactaagaaattacatataaacgatataccattggatagagcagggtcgacttctagtgtgaatttttaattttagcggtgcattttgcctgcttcaaaagttagaaggcctcaaaaattgaaattttggctgtgtttttacataaaattggtggctcagttggttaaattcctaattttgggagtccgtgttcgaatccaacgtaaaaataaataaatttaattacatttttagcaaataaaaaatttagaaaatacattacagtggtggaaaaaagtcttgacccaagatgataaaatttgtagaattttaaatttcgactggaaatttagctggttattttttgtttatgtatatttatttaccccgatatatgggcctttcatataccacaaaatcatttcattccgctttatcattctcgtgaataagtctcctaatcagaccttgctcaaaaaaggggcggaaaaaagtcttgactcaaacttgaaaaactatttaatagtttacccaaaaatctgaaaaaattcctatttatataacttttgatattgatcaaaaaaggcttttacaccaacttgatcagatcactccttcatggtgatcaggaaagtcaaaaatggcttgaaattgggaaaattttagaaaaaaattcctagggggctggaaaaatttttctgaaattttttgattgggctaccagaaagagcacaaaattctctaccgaattgccttttgaatggtgggtctacgacttgtagatagaaagttatacttggattg

SEQ ID NO: 3968 - DNA, 516 bp, Heterodera glycines
ctctctgctctctctcattatctctgaaaccggtttaatcttagaatgcctttaaaccaataaatttttttagtttaccgcccaacgtaaaagagaaacttcgcgacttcaattttattccaatgacgccagcacctccaccgatggggttggtggtggggggaggcgtcaaaaattttgtagttttgggtgcacacaaattccgctgcccgttagctcggatcgggcaacctctctttccaaagacgggtataccagtttacaaggacataaggggaaagttccattaaattcaaggacatttaaaaattttgtcatatgcaatgaaaatgattaaattttacccaaatggtttatatttttcgccggaatgaagttttgattaattttgatgaccatattttacttttcacaacacttcttgcgggcgcttttcgaagactttctgggaatggggggggggggggggaaagctgtaataggtttttcataatagaaaatttttaacgctatttg

SEQ ID NO: 3969 - DNA, 1782 bp, Heterodera glycines
  unsure (1)..(1782): unsure at all n locations
tgaaataaaaanaatgaatttgaagaggtaaaatcaataatgatcttatcaattagcaattaaattttaaaaaattaaaaaattatttcagaaaaataaatctttttatattcaaatcggaaacggagtgcccaaaaaagacaaaaatgatgatgaatgtgcctgagaaacatttcggaaaatgaaagatgcacatactcatgaccttgattgttaattaaatgatttttctgttctttctcgtcaatttcatagtcagatttaatggaaggggcaattaaaaataacattaaaacttttatttatttattatgcataagtaatttaatgcagaaatttatgtaaatttattatttgctaaaaatgagaattgcttaactatcattcgatcagtaattattattcaaaaagtggatgtatagtcaacaagaataattatttttattaaatataataatacaattttaatttatattaatttataatgaaaattatttaaaaagtaaaacatatttccttgattttttataaatttgtagaattaaaaaatgcaaacttattattattttttaatttgtttgtcgtgcttcttggccaacaaaattgaacggaacaattcagacgacgaagaagattattggcctaacgaaactgtagaaagctacatagacgacactgacagtgtggtaaagtaagttaattttttcgtagcaggacggttcagtgccaggacggagagaggagagagagagagtgagaatgaaagataatagtaaaaaaagagagagacaaagtgataaggagaaagagcgagagggtgaaataaggaaagagagagagagggaaagagaaaagagagagtagggaaaaaagagagagagataaaatggaaagagagagagagagaaaaagtgaaagagagagtgagaaagtcaaaaagaaaaagagagaggagagagagagaatgaaagagagtatttaaaaaagagagagacaaagtgagagggagagagataaccgaaagagagagagagagagatagaaagaatgaaagggcgaatgcgacaaaagagagagaaagagagagataaaatgaaaaaagagagagagagggaaaaagtgaaagagagagtgagaaaaaaagagagagagataaagagcgacaaaaacaaaagcgtgagagagatacagaaaaattgagggaaagagcgaatgagagcgttagagtgagacaaagtgagaggaagatcgaattcagcaaaactagactgactgttgagacaatgcgatgaaaactttcttttttggggtaattgggggatgggttaaaagcgggcacatcaggggaattaagaaaacaaaagaaaatgaatgagaaaaaatacgcgaaaaatgatgaattttgggttttctcattccaatctttttcttaatataaatatttgttcttttcttgtgtttataaattccctaatctctaagctttctagtgataccaataattgatggtcatttttttatattggactaattaaaagtgaatttttagattatgaattttcgacttttttcgagtccagatacgacaaatcgaaacgcatgttatattcgtgatcatcaacccagaaaatcccacaagacattaaaggcgtgataacaccttactatgaccgaagtttcatataatttagcacaaattttggttgaaaagcaccaaattggggggaggcaattaaaaggaaggaaaaaggcgaaatggaaggaagatgattatgatgaatt

SEQ ID NO: 3970 - DNA, 5441 bp, Heterodera glycines
gggtaaaattaaaattattatttaataattgataacaattgaagggaaatgagagggatataatattagatataaatttattaaattattatgagtgaaaaaataaaataatagaaaaaattgttattttaaattcaaaattggttaacaggaaaaaagctaaattcatataacaatgtaaatgcataaacaaacaaatgaagttccataaaaaacaacttaattaggtaattaagaagataaaattttaaaaattggacagtattaaaaaactatatcataatttctgcttcactgaacaaaaaataccttcttattaattgaaaatttggatatttttaaactaaaacctcaaagcaaaaatttcaacatatctcttaagattttgctcaaattttccgcttccgtttataaaataaccaacaaaactctcatggagagacgatatctgtcccatatgccgccgcacccataaaacattgagtcagttggctctagaaatattcaaataaagacaaaatgccgaaaattatggacatcacgatatttggtgcctcccatccggtgagcctctacatttgcgccccgaactaattttgggatttcattgaaataaaaaatgaatttgaagaggtaaaatcaataatgatcttatcaattagcaattaaattttaaaaaatttaaaattaatttcagaaaaagaaatctttttatattcaaatcggaaacggagtgcccaaaaaagacaaaaatgatgatgaatgtgcctgagaaacatttcggaacaaaagggataggttgtggcacagatgaacggcataaatgtgaaaaatgtgacggacgacggaaagagcaacagaatggaaatggtcggtggacacgacacttttgaattggaaaacccgaccgtgtgtcagtctgctcatcagcagggaaaggtttcgctagcatatataaatccgttctctgctcatcactcataaagcaaatgcacataatggcgccagagggacaaaagagaaaagaaaaaaaatatgagatttttaggaagggatgaagagagaaaatttcatggatttttaaaaaatttagtaatttataaagaaacaaacagttttataacagatttaattgttcgtcatctcgattctcgctgttccttattttgcgttgtgtcagttcctctccacacctccaaatagttgtttttttttctaatttgcaaaattattttcttttttacttgtaaattttgaaatttataaggtaaatggcatttctaaaaagaattaatttaaatttgatgaaaaagttgatcatttttgaacgaaaatgaaagatgcacatactcatgaccttgattgttaattaaatgatttttctgttctttctcgtcaatttcatagtcagatttaatggaaggggcaattaaaaataacattaaaacttttatttatttattatgcataagtaatttaatgcagaaatttatgtaaatttattatttgctaaaaatgagaattgcttaactatcattcgatcagtaattattattcaaaaagtggatgtatagtcaacaagaataattatttttattaaatataataatacaattttaatttatattaatttataatgaaaattatttaaaaagtaaaacatatttccttgattttttataaatttgtagaattaaaaaatgcaaacttattattattttttaatttgtttgtcgtgcttcttggccaacaaaattgaacggaacaattcagacgacgaagaagattattggcctaacgaaactgtagaaagctacatagacgacactgacagtgtggtaaagtgagttaattttttcgtagcaggacggttcagtgccagaaaggagagaggagagagagagtgagaatgaaagataatagtaaaaaaagagagagacaaagtgataaggagaaagagcgagagggtgaaataaggaaagagagagagagggaaagagaaaagagagagtagggaaaaaagagagagagataaaatggaaagagagagagagagaaaaagtgaaagagagagtgagaaagtcagaaagaaaaagagagaggagagagagagaatgaaagaatgaaagggcgaatgcgacaaaagagagagaaagagagagataaaatgaaaaaagagagagagggaaaaagtgaaagagagagtgagaaaaaaaagagagagagagataaagagcgacaaaaacaaaagcgtgagagagatacagaaaaattgagggaaagagcgaatgagagagttagacaaagagagaggaagagatagagaaaggagaagagataacagagagatagaaagagagcgggataaaaacgaaatagagagggaaagagtgaaagagcgacagggtgagataaggaaagagagagagagggaaagagaaaagatagaatagaaaaactctctgatctttctcattatctctgaaaccggtttaatcttagaatgcctttaaaccaataaatttttttagtttaccgccaaacgtaaaagagaaacttcgcgacttcaattttattccaatgacgccagcacctccaccgatggggttggtagtggggggggcgtcaaaaattttgtagttttgggtgcacacaaattccgctgcccgttagctcggatcgtgcaacctctctttccaaggacgggtataccagtttacaaggacataaggggaaagttccattaaattcaaggacatttaaaaattttgtcatatgcaatgaaaatgattaaattttacccaaatggtttatatttttcgccggaatgaagttttgattaattttgatgaccatattttacttttcacaacacttcttgcgggcgcttttcgacgactttctgggaatggggggggggggaaactgtaataggtttttcataattgataatttttaacgctttttgggtgtctttggaatcaaatcattgcccaaaagcgattagagaattttgtatttatattttgcaatttaagaagaatttttttcaccgttggagttatggttgccatttccattctctttggaattattatttttctgatatacaaaaaaaggaacaccaacggcacgcataccgaagcgccagcagatgaatttgaaatggaaactttagtctgatatcaatttttcgagatattttacttgatgaaattgctttgtctttttcagcattaatattcaaataaagcgaaacaaaatagaaaaaatcaggatgaagaaagcacagtaccaggcttttcacggtttctacttcaagcaaatttctcgtatcagtccattgcgcaccgctaagcgaaaaaacccgttctacaaatgcattggagactgggatggcgaacactttgctaatgagcacatacaaattcggaagttgagcctaaaaaaatttaaaaaaataattctaactaaaaattgccattcaccctaaaaattcgcttccatttctcttcaattgaaattccaagaaaagaactgtatcgaaatatggccaaaaaattgaaaaaaaacaaaaaatcaatttggccgagattaatcaggatgaagaaagcagtgaccgaacatagtgagcaccttgtcttccgcgttgtgttcgtctcccgccttgggttcaaccacagaaaaatcggtgagtgcagagcagcaataggcgctgaagagacggagcagtgcggacacaatgcaggaagtggcattggccaacgactcggcacaatttgccgagaagagcatgtcaatggcagcgaccaaatccaacggttgggtattgttgatgaaggtggtgatcattcttgaacaaaataaatttgtttcatttaacaatgaaagtaagaaaattaaaaaaccccgaagggtacggcgattttttcaatgtttcgcaaaaagtgccaattatttcggcattcattgtcggataggccggaaacgatcttaaaatggcaaaaattattcaatttaaagttcgatctgttgatatttgcagccataatttctttcaaaaggaatccttgtcgagtattttgaaaaaatagtgaaattttaaacaaattgtatagccaaaacccgaaatattcatagataccgaagtgagtcccgtctgaaccatttccgtcttaataattaagagccgattttgtctcaaatattattggaccatttttagagttcaagtgccaaggcggggggtcaatgtaattactattttgactttatttaaaatatttttcattaatcattcgctgatggggtggacgggattcaaaaaaacaatttgaattttataggagcaaaaattaatttaaaagcgattaattctgggccaaaaaacgcgcaccaattggcacatcgcggacgcgaaatcgtcgcagccgtacattttcagcgcgaagtcccacgagggtattttgccctcattatgcgcaattgcttcgggcgtcagcagatcaaggaacactttctgcagaatctcttcgctggtgttgtgcgctacgcaagtgaactccaaccggcgcggctcttccggagtgccgcgcgaccaactgaacgtgaaaattgaacaaatcattggccggtggaataaatgccaatttatgatcacttttgacactgatcagttaaaacagtggaaggatatatagacactaatggaaatttggacgctggaaaattggacaatattggatataaaaattaaaaataaataaacaaaaattttggtttggctaaaatatttttattttaatctgcacatacttatgtttttataagcgtattattaatccatttatcctacacaaatttatttttcaacttaattccaggatttattttaggaatttggtgtccgattttccggtgtccaattttcctttggtgtccaaaattccggctgtgtccaattttctagtgtccaatttaccgatccccagcagctcaatttgctcgaagccttcatatcatagcagctcagaattctgtgcgcggctgttctgtttgctctccgtttcttcaaaaattgaaatgctaataagcagcccaaattaatgattatattaaagtgtcaactgagtgattttgttgagcctaagtgatcgcaatcatttttgaaggatgggataacagaaaagtgtttctttggaccatggtccaatccagacactttttcgtagtgttaaattttagaaaatatgagtttcctcaaatatttaattctcagctcgggaatgcttaattggctatgcattatatttactaaaatttgcataatcgccacgtggatttttgtctctattcacactatcattatgttttcaaatttttttatggaaaaacattgacaaaagcttactagcctgcctgtatgaaaaaaataatcattt

SEQ ID NO: 3971 - DNA, 1190 bp, Heterodera glycines
gaacgacaaaaaagtatcttagaaattttgaatttagtagcacgaataaaaattctacaaatttactattaataaatattaataaaaaataattctaaattcattaaacatgatctagtccagtagctgcgagttaattaaaaataatatttctatttatacaataaattgacaaaaaaatatttaaaataataatttttcaaaaaaaaataaaaatgagaaatttaataaaataatttaataaaaatataacatcatgttttaaaggttacacgctgataattacttacaaatttgtagaaatttaatactttggcaaatattaaaagaagaaaataaaatatttatctgaaaatttaagagggattttaattttgcataaaagaaaagttacataattattaagtgccttaaagataaaacaagatcccagcgatcaggacttacttgtcatgtgtaagaaggtttacgacgtgaaatgaaaatgcgctttagaaaataaaaggtttacaaattctcggaaagcaaaaataatatattatttgaatgatattaattatgtaaaaaaaaatactgagaatatttgaaaaattgtatctataaacagcagacgtataaacgaattaaaagataattaaaataaaattacaaaatgtgaagatatatttgatattataataaatactccagacggatacacgagtctattttattgattggcaaggcaaggaaaaaaattcaatttattttgttttaccaaacaatcggttttcatatattaataaatattaataaaaaataattctaaattcattaaacatgatctagtccagtagctgcgagttgctttaaaataatatttctatttatacaataaattgacaaaaaaatatttaaaataataattaaaaaaaaataaaaatgagaaatttaataaaataatttaataaaaatataacatcatgttttaaaggttacacgctgattaaataacataaatcttcaaataaatatacacaccaatcagcatatatcgccttacactaatatagccatttaattaatttatcaaaacaaaaattttgtccccccaacatggaacagtaaaaaataatttgaataactggaatacaatgactgaagaggaataaaaaagttatgtgtgaaaataattttattcttgaaataat

SEQ ID NO: 3972 - DNA, 1937 bp, Heterodera glycines
ttccgtgcctacctggtgcctatcgatatctgcgagaaattttatgaaatttaatgcgatttggtaacagattttgtctaaaattgaccaaatgacgcagtttttgactcaatttctacaggattattaagaaaagccgcgccgccgggaaaatttcacaaattttgaatgaaatttgcgatgaaaaatgagttaactttaatttaatttatttaaaaatatttggcattctgtcttagaaaaattttcaaaaaaatcaataaaatcccgcataatcccgcacaaaaaatcaaatttgcggatcccgctgcgggattggaactcaaaattctttgcgggacgggatcccgcgggattaatcccgcaaatcccgcattttccaaaaaatgcgggattgcggactgggatcccgcaaaatcccgcgcgggatcccgtcccgcgccgggctctattttggtcacttcgtgggtttttactcttttggacatttcgtggcttggacaattcgtggcttggatatttcgtgggggcgccggtgcagagaaaagcctagtactatctcgtcgtttctctttttctttgtaatttctcccactttggcgtactatctctcatttaatggcttttttgcagtgttaattttgatcagtgttcggtctttgaaccggctatatgacatttcgccaactgacatttcgccaactcagccaaaatcagacattttgccaactgacatctcaccaactttacatctcgccaactgacatctcgccaacctgacgttttgccaactcagccaaaaacattcatttcgccaactcagccaaaatctgacgtttcgccaactaatttcgccaactagtcgaaaattgaattttaactatataatgatattaaatttattataaaagtgcttcaagcaaagaaatcttcataaaatatataaaatatcaataaaaaaacaataatatgaaaatgtttaaaatcaattttcatcggcctcagtttcttcaccactctctgaatttccacggacgtgaagtccctccgcaaagccttgcatcacgatcccgagcaggtgcaaggcgtttgtcaatccttcttccgattcaaagtcggcctcgtcaaggatccgcaccacattttgttctttgatgacgtaccgttgtcgtcgtttagtgcttttctggagctgttctgcgcgtccgatgtccaactgtttgttgatgtccttcgtgaatgcagcaatgaagtcgctcaatgatggatgatggttgagctcacgctgaaaataccaaaaaataatgttttccgatgaaattttttactgcaaattgtccatgcgcggcttccatgccgttgttcgttcgctcaattgccatttgagccctggtgtatacattccaaaacgagatcgggaaacgtggaggacagacgatgtcttgttcccagcgtggaataagctgcaagctgctttcttctgacaatggaatggttggagttgaaggttgtggcgaatgcagtccgaattgtattggtccactgcctgtcattatggatgcctgggaaatactgaacgctaaaattgaaaaatttcataaatttcatgacagaataggtgcatttacgagttgtgcttcgagtgcacgcagaagaaagtgtccgacatcagcatgcggttcaaatgcctccgccccgcgatcaatctcgaattgagtggtgccaatgtaggttttggcaaaatacgccagccatccttgaactccaagcggtgccacgctgacaatagttgaaaaagcgcgccgaacgtaaagtggcggaatgagtgccaaagagagaacagatctgattttgaaaaaacaaataaatacacataagctaatgaaagacacctgaatgttttgtgaacggatttcctttgaaccggtgcttcgttg

SEQ ID NO: 3973 - DNA, 2839 bp, Heterodera glycines
  unsure (1)..(2839): unsure at all n locations
ttttaaaattattttatttttatttaatttatttgcaaagctcatctttgtctgtgtcccaacgctgcaagttgccggtgattgatcatctgttgacgagtcttcgtcaatcacaacgcgcaccagcttaaaaaaaattttttttaatttcaaaaaaatttaaaaaaaaattgtgcatttcattcgtatttttcacttctgacttccccccccctcccgatcgatccgttaaatttatacttacacgtttgttttcggtggacgtgaaattggaatgcgactcgcgcaaaacggacgaaggtagacttgccttgctatggctgaaaatcaggacgacatcagattgtccagtcctcatattacggctgtcataaatgaggacggactcatcattcttcattaaaagacctgacggaatttgtatgttcagtgggtcggcacagttgacaccaccaacgatttgttctttgttctaaatattgtatcattattttctctgaattttttctacctgttcgtcatttggtcgagcgcttcattggtgccgagcaattctaagacttcatcgtcaatgtcagtccgaatttgtgcacggagttgacatggtttcgtttttggcttctccttgatcaggcgcttcatctgatttcgtttcgtctctgcatcaaaacgcgatggtgcacaaccatggtgatgttcttttgggcccaaaatgcctgtcaccaaaccgttgtcttccaattttgctgtcgcaggacaattacgctgttcgcacctaaaccagctgccatcttttctgattttcagaaagcgaaagcctgaaaaataaataaataaataatcaaaaaactattaacaccttggtgccaaagacaaagcgctccccggattgtttcgccacgttggaattgaacaggctcacagttttcttcatcatcgcttgcagcgacgtccaaatcattcctggttgaagtgtcttccatttgttgttctgcgtctgtcctctcagcattcagtacgctgtcttcatttgttggaattcggggtcttttaattggcttttgcagactctcaagtatttcgcgtacagttggcatttcttgctagaatctgaattacgctagaaacgaaattataaaaaagtgaaaggaattcttaagctttgattgatccaaaaatggttggaatgaacaaatatgaaaaaagttagtacataagaaatgatgatggtcactgattggacgtgtaaactggaatagggctgtatttgatattaacacagcattttttttactctttttactttttttctttaatttttttaactatttggcgaaatgtcagttggcgaaatgtcagattttggcttagtaggcgaaatgaatgtttttggctgagttggcgaaatgaatgtttttggttgagttggcgaaatgaatgtttttggctgagttggcaaaatgtcagttggcgagatgtcagttggcgagatgtcaagttggcgaaatgtcggtacacctttcgtcactaaacttttcgtcactgaaataaaataaataatttttaaaggaaaaaattagaattttaaagttatatacctacatatctaattatttgaaaaaatatcagtctaataggtatttaactttctgattcgtaggccgattaatttattttagaaatgggaataacctttaaccctcccccgttgtttttatggttatttgtgggttacttcaaaactagggttgggcccccaccccgaaccccgacatttttggccatttttcggggttaaccccgacccgaactccgacgcttccaaccattctttgcataatttgttaacaaattaaacccaaattttcaaaaacttttcctttcgttgaaatttaaaaccaattttgcatgactaaataaatcatgaaaattaataatatttcaagaaatttttgacaaaatatcgaagtaaaacaaaaatttatcggaaattcataaattttttagtaaaaatatcttagaaaatagagcttaaatttcaaaattcacccggcggcgcctatcggcatcgccggcctcccaaaaacccaaaatttttcctaaaaattagctccaaaatcacaaaatgtggacaatttttggacaaaattcttttaacaaatttactcatttcaaaaattttcccggcggcacctatcggcaccgccggactacatcccccacccctcttgtaaaatttttgagcctcggttttcgttttccgaattctgaaaatttttggggcctcggaatgcatgttataaaatgccaaagtggatgcactttttttaaaagagttagttgttaaaaaaattaaattttttttattacttcaaatgctcatattttaaaaaattatattcaaataggctgtatttcatgcggttttagatttcgattaaattatattattcttaaattgtatgtttattatatttatataaaattttttattttagcttttttattagttatttaaaattcattaaataatttattttgtaataataatatattttctcgtttctttgacggagcgctttcgtctaccatttgcaagtttttacaaattattttaaatgctatttaaataattgttattttctcagttagaatttgcatcaaataagcggtactttctgcgcttgattaaattttgttatttcttttacatgattatgcttataattttctatttaaattatttcttatttatgggttttagtgtatttatgnttgaaattaattattttactctcatgttccgtagcccctgtgatgaaaaaagaattttcgattt

SEQ ID NO: 3974 - DNA, 3580 bp, Heterodera glycines
ataataaatcaatagggtcttacataaataaaggaagacacaataattagagagtggggaaaatggagaggaaaagaaatagacacatgcaaagggaaaatgaatgcatttgtgtacttttatctcggggttgaccacccgaacaatcagccataacttgcttcattccccactaaactgaacaaatttggtatctaaaaaagtttttgaaaaccagaattttatcaaaatggatgcctcccgattcgagatcaaccttaaatattaccaataaaaagatcgatttggaatgtcatttttcttttgaaaccttatcgtaatggtccaatcgattaatttctccctttttgctcagataataaatcctattgttgcatttttgcttataaaaaggaagaaactgacccgaataaatttaccaagtgtatgacattgtgctcaaactcaaagaaaagcgacacgaagtcaactcgctgttttatggttgattgtcttagaggttttaatgtttagttttccttaatacactaactcaaaaatgaattcaggaagactgtcgagaaaaaggaagaaactgaagttcaacagtccgattgagcccaatctggaagtgattgtatgcacattagttgagcggactactagtggaagcgaaaatccaagcgagaaatttatcaagtcgagcagcagcgtaagaaaaagtgaaaactcatttgtgtaattcttttactgtttagaactgaatcaatatggcgaaaaacaatatcaacattaaccgtggcgttcaagaccctttttatcgttacaaaatgcctcgcattttggcaaaagttgaaggcaagggcaacggaataaagactgttattgcgaacatgcccgaaattgcaaaggcactgtcccgtccaccgacctgtatgttaaagaaactggttcccctgtatagtatgagtcgtgttgctttcccttgaccacaatttttctgaccaatttaagcctctcgatctaaaccaataatataggcattacaaacaaacaaaaaaagttcgggtcaaaagcgttagttgaataaactcccaaggagtgaagttaagactatgcatttaatgcgtttagatccgacaaaatattttggctgtgagctgggagcgcagactaactttgacctgaagaatgagcgttatattgtcaatggggaacacgatgccaacaaactccaggatattttagacggatttatcagaaaatttgtgctttgtccgagctgtgacaacccggagactgtgctggtatgtatatttactaggcaaaacatataatttttgtttagaccgtaaagcgtcaagtgatcaatggaaagtgtaaggcttgtggacacgcttttattgtggatccaaaacagaagctgtcgacattcattctgaaaaatccaccgcctcctgacaacatagagagcgaaaaggaagtgaaaagcgacggcggattgccagctgaggagagtaacgatgtaccagtagtcgacaactcgggtggctgtgatgccgggtcgaacggcgaagatgacgaggattgggcgcctgaacccgttgaagacgaggaaaaactttcgggacaaatcggcaaattggtcattgacaaggacttggacaaatctgtggatgagcgccttgacttgttgcatcagttcttcctcaaggcggtcaagaacaacacgattcaggtatagtctaccataattatacaaataaataaaattgtataactttcttaattaactatttaataataaaattcgtttaggacagcaagatgatgttaaacgaagctgaacgtctggaacttaaatcgaaggcaccgctgttgctggccgatgttttgttcgacaccaatgtcatcactcagatcaaacaacatcgcaatctgctgctccgcttttgcttgaaggacgagaaggctagttcttgttcaaaggagcttaattaaaccatttctccaattttaggcgcagcgcatccttttgggaggcattgaacaacttgtgcaaaacaacaaggacattctcatgtcgaagactgcccacatcataaaagcgctttatgacaacgacatttgcgaggaggacgtcattttagcttgggggagcaaggcgagtcttttctttgttgggctatattttttagtaattgttaattgagtgtaaaaatgatcttcgtatttagccgagcaagaaatttgcggataaggaagtggtgaaagagatgatcaaagttgcccagcccgtgcttaaatggctcaaggaggcggaagaagggtcggacgagtcggaggacgacgatttggacgttgcatttgacgatcgaagccgcaacattgggatgacagtggaggtggaaaagggagcaaaggatggggtcacccgtgtacagaacggccaaattgcaaccaatggcaaaatggacgatgggaatgcagacgacattgacattgacaatatctgattgtgagtggcatggcgcggtggacggtaattcagtgatgttgcaagaatttgtgatcgtatgccgaagactttcacccaccccttttgttcattgcgataccaccacatttttgttcgcttttatcgtaaatgtttttttttaatttactcgcatcggattttttcgaaattagatggggttttttcttgatttgatgataatttcatgacaaatatttttgctagtgatttaatttatttactttaatttgctttcataaatttgtttgtgctataagcatccattaaagtgatgcctttgtcgacattcgttcaaatgcttcgcaaatactgctgctgcaaggggacttcttcgatggattacgcaagattagttaccgacggcggacaaacggacgaatacacagcggcgaataggtgatttggtggcaatggtaaaggcgtgatagattgaattggtttatattttcatgaagcaatggcgcaactgcctttagtggaagtttacggcccgggatttcagagagcggctcagttggccattcccggagcagggaggaggaagaggaggagttgatgaacaaaatcctggacagaacccagcaagtgggtgtttttttaaatttgtctattaaaatttgggtcaaacttcggctcaagtacagtttatgcgtccaatcgacttttatgcgtccaatcaatttttatgcgtccaatcaatttttttgtctaatttcagtgcatttacaattttccgtcattgactaatctatttttacaaaatttctcaatagttcaaactatacggggtaatttaatctcatttcttccaaaatatgctgaaatatttttgcgtttccgtggtatcttctgaacatgtactgaaacaaatatgtcggcagcatttcctcatttgaaccacgtaagtgtcggtcagcagtaatatagctagtcgaaacatagcaaccggagtttgaagaatggagaaaaaatgccggctggctgctttttgccaacgaacggagagaaaaagcggctagtattggtttttgccgacaaatgggagagagaaaggccggctgt

SEQ ID NO: 3975 - DNA, 2030 bp, Heterodera glycines
aaatgtgatcacggaatagtcattgtaactgaagaaatattaaaatgctttaatataaacaaaaaatgtttgaaattactaaatctgaaggtccttaaatcggattttgttgggcagcggacggtcggggaacggaaattccacaaaagtgccgtcgatccgcacagataatttcggctttgggtcctttgtccttgtcaattctgatcattctccaaattgccaattcgctttttccatcaaaatgtttgtccaccaaaacatcgaaacggtcggaaagcaatgccattttgaggccgagttgaggacggtcaaaagatgggagaatgtccatccacacgtcgctacaaagccaactgaaacatggaaaaaattgcatggaaaatgaaaatttgtaatttttaaaaattttccttaccgtctgttcattttttgctgcaattttagagcacacttttcctttcaataagtactgaattaggtaataattgtcctgcaaataaaaaagtcacaaaaaaagacacaaaaagcacgaaaaatatacgcgtagatggagtgaaaaactccatatttttcgcgttacattataaaaagcgtctgtctctctgcttttaaggttgaatcggcccatttatgcatggggttatataaaacgaggaacgaaatgtgcaatgatatataaaattagtactgaaatatcgaattcaattaattattatacaaaattgctggtcattacgcttcataattctcgagcttccgtctcatcgatttcctaaaaaagaagagaagcgatttcagaatacgcgcagatggagtgaaaaactccatatttttcgcgttacattataaaaagcgtctgtctctctgcttttaaggttgaatcggcccatttatgcatggggttatataaaacgaggaacgaaatgtgcaatgatatataaaattagtactgaaatatcgaattcaattaattattatacaaaattgctggtcattacgcttcataattctcgagcttccgtctcatcgatttcctaaaaaagaagagaagcgatttcagaatacgcgcagatggagtgaaaaactccatatttttcgcgttacattataaaaagcgtctgtctctctgcttttaaggttgaatcggcccatttatgcatggggttatataaaacgaggaacgaaatgtgcaatgatatataaaattagtactgaaatatcgaattcaattaattattatacaaaattgctggtcattacgcttcataattctcgagcttccctctcatcgatttcctaaaaaagaagagaagcgatttcagaatacgcgcagatggagtgaaaaactccatatttttcgcgttacattataaaaagcgtctgtctctctgcttttaaggttgaatcggcccatttatgcatggggttatataaaacgaggaacgaaatgtgcaatgatatataaaattagtactgaaatatcgaattcaattaattattatacaaaattgctggtcattacgcttcataattctcgagcttccctctcatcgatttcctaaaaaagaagagaagcgatttcagaatacgcgcagatggagtgaaaaactccatatttttcgcgttacattataaaaagcgtctgtctctctgcttttaaggttgaatcggcccatttatgcatggggttatataaaacgaggaacgaaatgtgcaatgatatataaaattagtactgaaatatcgaattcaattaattattatacaaaattgctggtcattacgcttcataattctcgagcttccctctcatcgatttcctaaaaaagaagagaagcgatttcagaatacgcgcagatggagtgaaaaactccatattcttcgcgttacattataaaaagcgtctgtctctctgcttttaaggttgaatcggcccatttatgcatggggttatataaacgaggaacgaaatgtgcaatgatatataaaattagtactgaaatatcgaattcaatttaatattatac

SEQ ID NO: 3976 - DNA, 1354 bp, Heterodera glycines
cggcccatttatgcatggggttatataaaacgaggaccgaaatgtgcaatgatatataaaattagtactgaaatatcgaattcaattaattattatacaaaattgctggtcattacgcttcataattctcgagcttccctctcatcgatttcctaaaaaagaagagaagcgatttcagaatacgcgcagatggagtgaaaaactccatatttttcgcgttacattataaaaagcgtctgtctctctgcttttaaggttgaatcggcccatttatgcatggggttatataaaacgaggaacgaaatgtgcaatgatatataaaattagtactgaaatatcgaattcaattaattattatacaaaattgctggtcattacgcttcataattctcgagcttccctctcatcgatttcctaaaaaagaagagaagcgatttcagaatacgcgcagatggagtgaaaaactccatattcttcgcgttacattataaaaagcgtctgtctctctgcttttaaggttgaatcggcccatttatgcatggggttatataaaacgaggaacgaaatgtgcaatgatatataaaattagtactgaaatatcgaattcaattaattattatacaaaattgctggtcattacgcttcataattctcgagcttccctctcatcgatttcctaaaaaagaagagaagcgatttcagaatacgcgcagatggagtgaaaaactccatattcttcgcgttacattataaaaagcgtctgtctctctgcttttaaggttgaatcggcccatttatgcatggggttatataaaacgaggaacgaaatgtgcaatgatatataaaattagtactgaaatatcgaattcaattaattattatacaaaattgctggtcattacgctttataattctcgagcttccctctcatcgatttcctaaaaaagaagagaagcgatttcagaatacgcgcagatggagtgaaaaactccatatttttcgcgttacattataaaaagcgtctgtctctctgcttttaaggttgaatcggcccatttatgcatggggttatataaaacgaggaacgaaatgtgcaatgatatataaaattagtactgaaataaaaattagtactgaaatatcgaattcaattaattattatacaaaattgctggtcattacgcttcataattctcgagcttccctctcatcgatttcctaaaaaagaagagaagtgatttcagaatacgcgcagatggaatgaaaaactccatattcttcgcgttacattataaaaagcgtctgtctctctaatgttaaggttgaatcggcccatttatgcatggggttatat

SEQ ID NO: 3977 - DNA, 2528 bp, Heterodera glycines
  unsure (1)..(2528): unsure at all n locations
gacctttccaaaaacataatgaaaataaacaagcctatgattttttaaatgctttgcaatcatagaaaaatgttngattattattgtttacttaataaagtacatagaaattgaaaaactcaccatagaagagttaatctgttatagaaaaaaattgagaaattattagtgaaattaagatttctcttaacagggtaggcgaaaaggactgcaatttgttaaaaatattaatacagtttagttccccgtttttagcatagtcgtttagatgtgatcccagtgcaattaagaaagtaggtatgaaagcttgggaaaattttgttgtttaaaacagagcaaatagagcggtgtgcgaggaaatgcttatcgtttaaagtgggtattgaagaaaaatcgacaaaaaatttaatgagctccaattgcatgggcgcctgtaaattcgaaaccagcacaaaaaataagcctcatggcaaaattccagcgcaattggtcggggctatagccatggaattaccacaaatttcgacgacattcaagactgctttttgttaaaatatgaacacatatttaaccggaaataatgaaaggtgtgtgcttgatcagactttatcttctctatttgttactatcgattgcttatagaaaattgcataagatttatacaattaataaaattacaaaaaaaaattgtttatttaattgaccttttccaaaacataatgaaaataaacaagcctatgattttttaaatgctttgcaatcatagaaaaatgtttgattattattgtttacttaataaagtacatagaaattgaaaaactcaccatagaagagttaatctgttatagaagaaaattgagaaattattagtgaaattaagatttctcttaacagggtaggcgaaaagggcggcaatttgttaaaaatattaatacagtttagttccccgtttttagcatagtcgtttagatgtgatcccagtgcaattaagaaagtaggtatgaatgcttgggaaaattttgttgtttaaaacagagcaaatagagcggtgtgcgaggaaatgcttatcgtttaaagtgggtattgaagaaaaatcgacaaaaaatttaatgagctccaattgcatgggcgcctgtaaattcgaaaccagcacaaaaaataagcctcatggcaaaattccagcgcaattggtcggggctatagccatggaattaccacaaatttcgacgacattcaagactgctttttgttaaaatatgaacacatatttaaccggaaataatgaaaggtgtgtgtttgatcagcacttatcttctctatttgttacactatcgattgcttatagaaaattgcataagatttatacaattaataaaattacaaaaaaaaattgtttatttaattgaccttttccaaaacataatgaaaataaacaagcctatgattttttaaatgctttgcaatcatagaaaaatgtttgattattattgtttacttaataaagtacatagaaattgaaaaactcaccatagaagagttaatctgttatagaagaaaattgagaaattattagtgaaattaagatttctcttaacagggtaggcgaaaagggcggcaatttgttaaaaatattaatacagtttagttccccgtttttagcatagtcgtttagatgtgatcccagtgcaattaagaaagtaggtatgaatgcttgggaaaattttgttgtttaaaacagagcaaatagagcggtgtgcgaggaaatgcttatcgtttaaagtgggtattgaagaaaaatcgacaaaaaatttaatgagctccaattgcatgggcgcctgtaaattcgaaaccagcacaaaaaataagcctcatggcaaaattccagcgcaattggtcggggctatagccatggaattaccacaaatttcgacgacattcaagactgctttttgttaaaatatgaacacatatttaaccggaaataatgaaaggtgtgtgcttgatcagactttatcttctctatttgttactatcgattgcttatagaaaattgcataagatttatacaattaataaaattacaaaaaaaaattgtttatttaattgaccttttccaaaacataatgaaaataaacaagcctatgattttttaaatgctttgcaatcatagaaaaatgtttgataattattgtttacttaataaagtacatagaaattgaaaaactcaccatagaagagataatctgttatagaagaaaattgagaaattattagtgaaattaagatttctcttaacagggtaggcgaaaaggactgcaatttgttaaaaatattaatacagtttagttccccgtttttagcatagtcgtttagatgtgatcccagtgcaattaagaaagtaggtattaatgcttgggaaaattttgttgtttaaaacagagcaaatagagcggtgtgcgaggaaatgcttatcgtttaaagtgggtattgaagaaaatcgacaaaaaatttaatgcgctccaattgca

SEQ ID NO: 3978 - DNA, 5455 bp, Heterodera glycines
agaggtacaacagtgattagaagaggtacaacagtgattagaagaggtacaacagtgattagaagaggtacaacagtgaatgaaagaggtacaacagttattagagaggtacaacagtgattagaagaggtacatcagtgattaaaagtggtacaaaagtaaatggaagaggtacaacagtgattagaagaggtacaacagtgattagaagaggtacaacagtgatagaagaggtacaacagtgaattgaagaggtacaacagttattagagaggtacaacagtgattagaagaggtacaacagtgattagaagaggtacaacagtgattagaagaggtacaacagtgaattgaagaggtacaacagttattagagaggtacaacagtgattagaagaggtacatcagtgattaaaagtggtacaacagtgattagaagaggtacaaaattgttagaagaggtacaaaagtgattagaagaggtacaactgtgagtagaagtggtacaacattgttaggagaggtacaatattgtttaaaattaaataaataaggaaacgtttttattaaaagttaaaaatagagtgcattttaatttaaaaattttttaataataaaatactcttttattaattaaaaacaaccttggaaattattaattgaatatttatttaatttgaaattaaatgaatttttttttacaaattcaaaaataaataatgaaattctttaatttaaaaaaaataaatttaaataatttaaaagaaatcttcaaaaattaattaaaaacattgtaaaataagccaaaaatacaaagaaaaataatgttacaccgtccggattcgaacctgctgccccccccctcagaacatgtcccagaatccccaatcacacagggattctgagggcttaacgatgtcaaacgtaaaatctgatcacgtattcgtgatcagcggcccaaatattttgaacattataaaaccaaataaacctcataaaattctcccgattttttgctatttttaaagctttaattcacttaaattgagcagtccttcattgagttatgaattttcaaattttaacccaaatttccaaggaccaaaaaaattaaaaatattttcgaatttttaaaaaattccaaaaaatctgaaacttaaaataaacatcatatttgtgctcaggaccctaatttaccccagaaaaatatttttgacccccattttcaacccaaaaaaaaatttcgaaaatttctagggggcctagctcgaaaatttttgaaaatttccggcaatatggcacaccattcgatagagcttaaaaaactctacaattttgccctaaggagttttttcgataaaaccaacccctaacgagttatggacccgggactcaaatgtcccgctcaggccaaaaattttttctatttccgggaaaaaatcgaaatttttccgaaaaaaataccagtcgatagagctcgaaaaactatgttttggaagtggtctccgtttctctgggaaaaatcgttaaaaaatcctaaaattcaaaaacccgaaaaccgttttttaggcctagctcgaaaaattttcaaaattttcgaaattttaaaacttggttggatagcctttcaaatactacacatttttgctcagaaacaatttttcggtcaaagcaacccctggcgagttattcgcctggtactgaagtgtacattttgagcacacttcagttagccaagcgtgcaggccagggggtggctctaataaaaaaataaaaaataccagcatgtagaggacagttgtggggagtgccctcacagcgggcactttttgattcgggttttagaaaaaaagttaggggccctaaactgcaagaaaaagtgagaaatcggtccccgggactcagtcgtccgcgctgaatttttctctatagttttcccggatgctcctcaaaaagttgtaagacccttccactactttcagacccgtcccattagccgttaagctcaaattagtttttgaaacgaaactccttgtcaatataacgtatatattaactccgccgccacgccatggagttcgaatgtgcgaactttcttcatgacaaacgcctgctccacacaggagtatctttccccctcataaacgaacggcgaaaagaagaagttactaaatggatcgttcgatccttgaaatgccattaggtaatggccatcagttagcgaaatcttcttcatatctcccagatcaaaattaacgaacgccgcagcgtatgacatttgtgcttagtaaaagaaacgattaattagaaaaatatgttcacttttttttttttaaccataaaaatagtatctgagctgacacaggagtgaggtaagtgatcagtttcaagagtatgattataatatttattagataatgattgatgagttcctcagaactgataaaagagagataagcaataaacagtcccgcgggacttattgtttaacaaatttaaaaattacgaaagcctgtccaatttctgttggcattttcaagctgaaacgacttctcgagaccggtccacatacttaaaatacagtatgattaaaagaaaagaaaaatgattgaatttggctatcccaggtgattagtcctcagaaaagttaccaaaatgcttctttttcctgggattttcacggagattatgttttgagcaaagatttctatttagttctttttcttttacctgattattggactgtgaagagggtgagggattaggggtgagtgcaggtgcgttttctattaatactgtgttatcagagatattttgataggaatcatgagaatagccaggtacattggtctgttctcttgattctaattcctttagtgcttgttcttcatctttttgaagatttttcgtggtgcaagggggtcctgagtactcaaaatactttttaatttgattaatgtgtacaattcttgggtttgtttgaggagatgtgcagctgacgattgtgataaggacaccattaatctcaatgactcgataaagtcccttccagggtaattgaaatttcttggatgttttgacttttcctgcgtaattgcgtaataggaccctatctcctatttggacggtctgatttcgtactaacttgtcatattgtacttttgaccgtaactgagcttctttaatgaccgccgcagcggattcccaagcttttctaagagacttaactaatttctgctttacattgtcaacctcagtgatattttcgggttcggtgttgggattcaaaatttgctcaatgcaaaatattgggtctcgcccaaagaccaaaaagaagggggtctcctttgtggaagagtgaattgatgtgttatagcagaagttggcacattcaagaaattcatcaaaatctggttcttcacttgaaatatatttcgcaagtatattgtgaaatgtcctaaaagatcgctcaactactgcattgccttggctccaatggggaatagcataacatttattaatatagagaagcgaacagaaggacttaaaaaaatcagaggtaaatgccgtggcattatcagttaaaagactcgtacagcctccaaactttaaatagcagtgtttaaaaaatgctagtgctattgtttgagatttagcatcagggacaggtacagagattacatatttggtaaatgtgcaaattatgttaaggatatgtttgttacctttctgcgtgaggggaagaggacctgccaaatcaagtgcaatttgagcgaagagagtattttttggtggcatttgcatttctgcacgatatgaaggattgggtgaatgtcttagttgacatgtgatgcattgtctggtccaattggttatatcacggtgcatcatcggccaataaaactttctacatttccctaatgtctttttgatattcatgtgaccaccatttatttgtgaagtatgaaaagcttcaaaaattagtggtcgaagagaaagcggaatgtacattcgagcattttgatctggtaagtgttggtataatatgcctgaggaaagactcaaattttccgctcttgatgcaatatcttccttttcaacttctgtggtcccctcagggaatgaaccaaaatttacaaattcaattaatttcctaacctcagaatcgtcattttgttctttccgaacatcaatggcgaatgtttttccttctatatcacgagcagtgatggttaaaagagaatgctcatgaaccattcttggcttcatattcagcgcaagacagacgggaaaatttgctatgtcttccaattcagccaaatctctaatggcaatctcttgggttctttcatgtgggtaccgtgacaaaccgtcagctaaaagattctgcttccccgctacatgaattattttaatattgtaattctgtaactcaattaaccaacgcgcaaggtgtggatgcgcttctgcctttttaagtaggaaggcgaggggtttatgatcacaatgtaattcaatttctgtcagaaaaatatagggtttgaaatttcgcagagcaaaaattattgctcccaattccgcttgtacagcaggccatttgcgttcagatgctgacagcgttctgctgcaataagcaataacttcatatgcttccgccaactcattccactgcatgagtgccccaccttggccaacattagaggcatctgtgaatatgtgaaagggtttatcataattgggaaacaccaatattggtttctcactcaaaattctttttacttcattgaaggccgcagcctgttctgtaccccactcgaaattgctctcctttttagttagtctggtcaatggttctacgattgtagaaaaattagggacatgtttacgaaagaatgaagccattcctactacgtgtttcacttctcgaatggtttttgggtctggaagatttttaattatttccactttgcttagactaggagtgtagccaacagcattgactaagtatccgagaaaattcatggtcgccgcagcgaatgtgcatttcttagggcttaattttaagttgaatctcctaaatctttcaaagacacttctcaaagcattgagatgctcaccaaaattatcatcccttgtgtataccaatatatcatcgacatatgcgattacacaatcgtccaaacctgtgaggacatgcgccatgcatctggcaaacgcactggttgcatttcttagaccaaaaggaagattaaccatctggaaaattttattttcagtaattaagccacattttctggaagccctttctgttagtcttatttggaggtatccacttgacaggtccaaacttgaatagtaacggcaattacctattcgttccataattgtttccaatctaggaagtggataatggtcccggacagtcacttcggtaagtttacggaagtcgatacat

SEQ ID NO: 3979 - DNA, 3230 bp, Heterodera glycines
  unsure (1)..(3230): unsure at all n locations
ctcgactctcgtgctggacncaaaagggatgctttcgtcggtccgccggtccgtggggggaagtgaactcccgccgttctcgcatgcttctgccaccgtccatcagatcaaaattgccataaaacatcaaagaaattggggaaatgatctgtaaaaatccaaatttatgggacgaatggacgtgaaagagagaaggggttgatgcgcgtggattgatctcccccgagtagccgaatggaaataatgattcgtttggctgggaggggcgacttaaatgtccggggggggggaggctcgcctcctcctgctccgccccctcccctgtcgctcgcttttgacttccccgcgagcgattggctgtcttttttgtgtctgcccaccagggacgtagggaaattgtctccctctctccatttcggctctctggcccccgttaatgaattagcagcgcagatcgcccccaaaatgacaacggtcaatgggggaggggcaaacaaaggtgagatgcgatgtcggggtgtccaaagcaggcggcaaaaaaggctaatgatggtgaagtacaagtaaatggcacaaatgatgagggagaatgctccctctgaaaaattgttcggatctcctttggcagtcgtttgtggcgtttcagtcagtcgttgaggcccaagtgccacgaaatctgtcccggttgtaacgcttattttttctccattagtccatcgatcaaacgtggcgggggagatctctcccctcgaatcttttgcttcagtctttccgatcagtattacaagcagaattgtggccatcagagcccggtagagacgaaaatgggggttaaatttgataaaaaggaaaagtgccacaaatccgatcgctgctgctcccgctgccattagcatccattgccaactgctgagaaggtttagcagcgggaatgggtcaatctgccagtcgggaaaattaaaggtgatcccgggctcaattttccctccgctcgaatcccgccgatgaaatccaaattgctgctccttagggaggaagatcagctctccctttaaccgaaaagtcgtggtgccagcggggcacttcactttgcattccgtgaatatttctgcacggtcgaagggaatcgcctcccttgttgagtcatttccgccgcagtgaagggcaaacagtgtcccatcagcgcacttgactttggccaaagcagtgccgtgatccgtgcggcatgttgcgttgaatgttgcgcccgatgtgcatctgtagcacccactgagtgtgggtgaggacacccaacattttgtattgctgtactcgctgatcagctccaggccattgagttggatatgtacctgaacgggtgaatactgaaattcagctcggatcgaagagccgtgattgtgaaggtgcaatcgtgccacgtccaatggcaatcgttgttccgggttgttcaacacccgtccaatgtcgaggtctctgcagtgacagtgtaccgtgccattgtcgtgatcgggggcgcatttttggcacgccccaatggagagttggcatttgtcgaaaccccgtgctgtctcttcgtcggggcagtgcaggtctgacggcatgggtctccccatggccacagctcgtccatcggtgacgaaatgtgctgaaagtgccggcattggcgggagagaggtgggtatgactgagatggtcatgtttccccacggctccgatactcccgggtgtagtgtcagtcgttgtgagtcaatttggccgttgttggtttccaattccacccaagcgctgatctgcatgtcccattcgagacacgtgaactcctcgaagactgtggtcgttgttggcaccgcagcccatcggtagaagaggcatgaagccgagggcagcccacacgaattctgccaaaaactggtgctgcgcatacagaatgaatgccccggccgatgattgagggcaataagttcgggaatcgtctcccggttgcgaatggcactgcatgtgtttccgcgacacgatcctgccgatgggcatcgcttcacggctgtcgttgagatggagtaggaacgcagccaactttccgtttttggcacacacatcatcgtgattgaggcgaggcgaagtcggacggctccgagcagctcgtcctgttgggttcgaatgacgaatgagttcgtctgatccgatggcagtagtgctagcactgtcgccgctgttcccgcgcatttcagtccttccgccgatcttgagcagtcctccgatcgaaccattacggagatgggcttggtagccattgtggtgccgaagacgatcagaagagggagaagtgaagccgccgctactcccgtcctggccccatggccccgttcgggatgctgccatgcctgggccattgctcgagctcttctgccgagttgtagtcgccgctgtaactcccgtatttctgcccgcgcaacttttgctccctttcgcattttgccctcgattcattccgctgttggttgtgggagccgtcgtccggttgcccaattgatgaatttgacggggtagctgactcccaaggcaattgctcgggagaaaagcgttgctcccgaccagaatcgggagaccaatgagcaacagcagccgaaaacggctagcacaagtgccgccccaaaaccgaagagggtggatgcccaccgcgggtggcacgttgggttggcgagctgctcccaacagaaggagcagttgatgagttcacattcctctctcgctgggcaccgctgagtgacattgaaaggggggcccaacccccaccaacactgaccgctgcatgagtagccatgaatcagtatctcagccggtagttcgtagctgatcattgtcgctgttggcacagttgcccagcatccgtccgggcagcaaatttcgactttctctagccgctgaccgctgctggtcttcacgccgcgtttcgtgcattccatgtggcacggcagcatcgtcgtgcgcatgtccgggtccgattgttccgacggtggtagcgatgggggtgggttgacacccccatgccaaagttgggcagataagtgccatcattaccgccaaggtgaccagggggaatttgctctcccttttttcgaccttccgatgctcaggtgaccaaattctccgtggcttgcgattccgctgtgattttcgtcgttcacctccctgccctgctcaacccctccgacaatttgttcgttccgctg

SEQ ID NO: 3980 - DNA, 3667 bp, Heterodera glycines
gagtctggcaaacgctgccagtcgaacgcttaaaacgaggcccatcagctccattctggggattgtgaacgtccccgaagccttctttggcttaagtcgggatttggccatgatgagacgggagagaatgctcccgtccactccttctgatcggagatatgctgcagcggcatatgcgttttccgatgcgtcggtgaacacgtgcagctggcaagattcggccccgtccgctcgggcgactctggggatagtgatgaattccccgtcccaacttgccataattctgttccattctcgcgcatcgtccgcgtccagcggggcatcccagctgtgtgtggactcccacaatcgttggaagaattgcttggctgggagagttgccggcgcaagcagtcccagtgggtcaaacagtcgggcaatagtcttcagcaccgcccgccttgaactgtggcctccggcaccggcgggagtcactcccggaaagaccatccgaattgagtctttctccgcgtcccattcgagtcccagcatcttcgccgtcgttttgcccagggcgtccgcctctgaaaagctgctgttcaggttttgatcatttgtcaggaactcgcgcaggttcattttcgcttccgtgaacattcgtttggcttcccgagccttttgcgatgcttcttcgactgtgtccgccggtatgagcacattgtcgacgtatgtgtccctgatgagctgctccgcaaaatccgagccgtacttgcgtaggtggtgccgcaccaccgcagccaagcagaacgggctgggcgttaagccgaacgccaatcgccgaaatcggtagggcaccaaatttgccgtcgttagcggcccgagtgggtcgcgcacccacaaaaacttgcacacttctcgatcggcttcttcgattccaaccatcagaaatgctttctccacatcggcaatcacgggcacttggcatgcccgaaaacggataagcattccggccaggtccggcagccaaaccggccctctcaacaaacaatcgttgagggaagggactcccttggcgtgtgcactcgcatcgtagacgactctcagcttcttcggcgtgatcaccgcttgatgagggatgaaatattcgcattttcccgtgccgatcgttgcttcctcaatcacgcccattcgggactgctcttcgatcacttgctggtactgcttgaggatttccggtgtcctctgaagccgttgcagcagcccgatcagccttcgataggccacagcgtagttgttagggagttcggggtgctcctccctccatggtaaacgaatattgtaccgcccgtcgtcttgctgtcgcactgactgctcaaattggatgatcgccgcactgtccgcgtcctgtgttgggtcgtctcgaattccgatcgcttcgactgaccaaaattgctcgatcgccttgaccgatggcatttgatcccgttcgtcttccccgcatggcggaattgcgaagactgatgagtcgggaggaactcccgtggacacttgaaattgttctccgcagatcactgtgccgaatactgtgtcgatcagataagtgccttcgtcggtcttccggaatgctcgcacgaaatcccaaaaacgtcgaattccgatcagcagctgcggttgaactgtgtccgttgtcgttctaatctgctcgggagccactcccgggagcacaaattccgtcttgatgggagtacagatggtcgggacttccgacaactcgatgctctcccattcgccatccgtccgcttgattttggctttgtatctccccgatggcactttcactttcttcccgccaaagacttgaatggtgagcgtttcgctttcggacttctcaagacccagctgtctgatgagttccgtgtccacataatccccgtgactggcggggtcgagcagcagggtggtctgacattcacccttttcatcatccgccgctaccaccacctggcaaatcatcaaatatgccgggagttgctgaccgactgtcgtgaaggtccttggttcttggtgcggggagggactctcccctctgccttccattcctgaattggcggcgaatgttcgctcctctgtcggctccattctttgaatgaccatggtcctgtttgcccgcggctcttccgctttcgcctgaatttgaggttcatcctttttccctccttcccaacaaatcagccaatgatggtctggtcgctggcactttcggcaaggatgcgctcgggtgcactgcgaagccgtgtggtccgaccccaagcacttcaggcaccggcgttgctcgatcagtctccgccgtttggcttgggccgacccatatttgatgcagcggctcggctggtggcctgcttgtccacacagcgagcaaccactcccgccttgtcccattcgtcgtgattccgtttggcgggagttgctcccgggcggtagaaaacccgatcgcggaggtgtgtgcacactcccatgatttccggcccccaccgtaccatgtcgttcgggagggttctcccttatcatgaatgctcgattgaatccttgtcccgtccgtgcatttcgtccgcctcggtctgcctctgatcgctgctcatgtcggcgttcgggttccttcattgctgcgagcgccgattgggcggccctcatgcatttgacttgtgccgcgactgcttttcggaactccctcaccgtccatttcgctcccatcatgctctcccgaatcctcagctcagtcaggatgctcactgggagtttggcttccaacagcggaccgaatgactcgtcgtccacgttggctcccagctgctcgagttggcacactcccctctcgaactcgtcgatcattgccgtcagactggccacgttgtctttagctggtggcaaatgcagcagctgagcacgaattgctcgttgcaaatcgttggtgtcgccgaatcgctccttcagcagttgtaccacaactgggtaatttccatccgacggtgggtacacctccaccgctcttcgcgccggcgatccttcttttaggcaccgcagcagatgaagctgcttttcgaatcccgggattggtttgtcgtccaccgcccgttggaagtaggcccaaaaggtggtccaatcctccggtttcccggaaaacgtcggtggctgcaatcgaaccgtttcgaaagtcgtcaatgtgtctgctcgagtttccgaacgatggtgatgtgagggagctgctccctgagttcggaggcgttcccgactgggatgctcctcccttcgaatacgggcatgatgggatgcccgagggaatgcttgtccctggtcattgagcgtaagtcgctcaaatcgttgctgctcggcttgcagcggttgctgagcttgtggctgctgttgcgccgggggttcgttctctccccctcggttccttgccatccattccctgaccgggttgttcacccgaacactggccactgatggggtatttgagcggcgttggatgagcgcagccatgtttggcatgacgggtgcggccacccggttggcttgttcgaatctttgtggcgcttggacaacttgtccagcctggaaccgcgcctaggcatccctgaacgatgtctcccactctggcatgcttcgtcttgccatggtgcgtgggagc

SEQ ID NO: 3981 - DNA, 2051 bp, Heterodera glycines
  unsure (1)..(2051): unsure at all n locations
cctcggtgtcgactgatctgcttcgatcgggagatgctctgctccctttcttcgtctcaaaatgtttgcctcatcgcctgcagatcacggaaaaggctcagcgcaaattggagcagtcggcaggagttggatgctcccgcagtgncagatacttcgtcgaaggctggcaagggggcggccacgaaatcatacaaganatcctgccgctcctcgggtgccgcacccgctttctgctattcccttatcgaaatgcccttcaaaaatccgagtgacctgtccaagtccccgttccattgccatcagccgcgcggcgtgctcgggcgcttcgcccctcgtgaaatccgagtccatcagctcccgcgcttctgcgattcgcgacgagagtgtgtcagccgctctctcaatccgatctcgggccgacctcaccgtcattgctccgctgcgcaaattcttcgatgccgcgggtgtaacacccgtttggcttgtccccaggccttgcgcgtccatccctttctttgttttggtctgctgcgccgcattcgctcgttccccgtcctgtcggtcggaggggagatccccctgatttccgttcccgtttgccgcttcctcatcgagcggttcgttgttccgttccattttcgtttcgctctggttagtccgaggtgtagcgggaggtgctcccggttgctggtccttgttcgtggcagaaggccccctgctaacggcaccaactttgtttgccgttagcacaattcgtttgttgtgttggtcctcgtcgaccgattgtgttgttggtcctcggcgaccgaagtgttgttgcttggttccccctgctaacggcaccaactttgtttgccgttagcacaaatcgatgtgcttgttggtcctcggcgaccacaactcgttgctgttccttgatgtgcagtgggaggtgccccctgctaacggcaccaactttgtttgtggcaaaaactctctgccgatttggccgggagtttctcccttccttctgctccaatccactcctcaaaattcggtctcttttctctctctctctctctcttcgctgccgttcggtcccttcccaagggggtggaatggagagaagggtgggaggcaaacaagaagtgggctgttgtttgaataacggcaccaccgactcaatttgggggagaagccggtgctcccaggttcaactgcctaagtccgagcactcctgtcagcacttccggcgtgccaactcctgtccgatcgttgcgctcgggagtttcactcccgttttccctctcgctgtccgattcgctgtccaatcactgggggtgattggaaaaggagagaggtggggttcgagtgggcactcctgagagttggagtcccgtttgacttgctgaatcgctccgaaatgcccaggcaaaggggccggagaagaaggtgagttgcgaatcgggagtcggctcccttttgaccacccgcccaaattgatgaacacaaatgacagaaaaatagtttattaacggagcgctcaaacttgggtaattaaaccgtgggaggggggtgggcaaaaaagtgacaaacggcaaaaatgaggagtaaaagtggatgccgtgattgagtggtgaggtgagagattaagaccaaaaggaacaattttttctccctggaggggagtgagacataaaaatgaacgaatgaatgatgtgacggacaaattagtgatgaaaaaggggggggatggtgattggtaaatattttcagtagtgacccctgtacttttgtcgccccttttggcgctaaattcaaatttgaattttcgcgtcgatactcggtgggtggagggacgcttgctggggacgtggattgtgccatagggagaggagggattgtaaatcaattaaattgagtaaagacagaaacgggtttattcctcggcatataaaaatattaacatttaattaattaaatttttatttagcattagaatgattatgttttttcactttgtcctcttagaaggctactcggcaaaaacgcattgtgtcaaacaggtttat

SEQ ID NO: 3982 - DNA, 4696 bp, Heterodera glycines
  unsure (1)..(4696): unsure at all n locations
caaaataattaaattntgtttttataataaatatacataattgattttccttttattattttttggacaaactctgttacagatctatccaaattttcaaaaaaatgtttaaaatagtgagaaaacgccaaaatagtgaaatacagtttcatatgcatattgtattttcgtaaaaatgatgacctaaaatcttaaaattcagttttgccactttttgacagtcaaataaattttcgtttttcatacatccgtaggccctaagaatttctgaaaaaaataattatcatactttttaccattttatcatatcaaagcataacaccaattacataattgatagtgaatttgtgggcaagaaaaaagtaaaataagtacaacatacaaccgcatatacatacatatacaataatagtgaaatggcaatatttcgggatcacaaacactttgcatcaattaattaattaattccatcattcactttattctgattccgagccctcggcgcatgggaatcgtcgagaagtctgaaaaaaggacaaaaaattgaaacgaaaatctgnggcgctatttgcaaagagcaaaccttttgaaattttttttcactttttttggtcaattttttttttgtttttttatgcagaatttgtttttttaacatggaacgtattgcatactatttaataaactgaaaaaaacattttaaaagaaaatttagcgctagttaaaaattcacaaattttgagttttatcaaaaaccaaaggggggaccctattgttttgcaaaatttttttgagataaaaaatcgtgatattttttattcgccataattatgctgttaatacttaatattcatcattatgagtcaaaaaaacaaaaattatgcaaaagtaaaaaaaatttcaaaaacggccacttttaaagtagcgccaaaatgtcgatctctaatctgtagcagttaaaaaatggcatcaactcacttcgcattcggtctgttcagatgttgtatttacacaatcggatgatgagttcagttcaaagagcgcatgtttcacaaagcgtccaaccgttttgttctcatatttgggacgtttgtcggcgtcttcgaattttttcaattttcccatatattctttaattcgcttctaaagtactttcaattttcttcatgaaaataataaagacaatatagaaaacttgccagttctgctgacagatcggcatcttcatttgggtcaagacctttgcatcgcaagagaacccaataaagtgaatttattgaaaataatgaagccaactcaattcgtgctttttctaacagagaaagctgaaaaaatacaaatggaggatagcagaccgaagtttattataattagcagggctgcaaaaaacatgcaaatgcatatttttttcctggcttctccatgctctaaatagcagaaaaacactttcttttttatgtttgagtataaaaatcgggacttttatttgcatatttttgcatatttcgggatttttgtgcatatttgcatatttaggggttttcctgcatatttcatgcatattttgacattttttgtacatattttcagattttttgcatattttgccattttttggaaaatttgttaaaaaaaatcaataaaacggaaacccctaagaatcggccctaaaaaattcagaaaaatacacccctaagaatcgaccgaaaatttttaaaaacaccactaagcattggaaattttctcaaaaattcttcccccaaatttttttttttcatgagaaaatgtttgatttaaaaaatgtcaatatttgctaaagaggattttataaaagaaatgtagcagctcattggcaagtgcactatttcacgaagcgggtcaactccgtcccgccaactccgtcccgccaactccgtcccagccaactccgtcccgccaactccgtcccaggccaactccgtcccgagccaactccgtcccaggccaactccgtcccgagccaactccgtcccagccaactccgtcccgccaactccgtcccaatacaaaaaaggccaactccgtcccaagcaaaaattcaagaatttttttaaaaataaatttgagtttaacaaaattttatgaatgggaaacaaaaaatgataaattttggctttattagttcttaagtttttctatttgaatctgacgcttgtacaagaactcgtacgaaaaatattttgtcgcttttaggtggaggcgggatttatcgtttttggctgagacgggattttgtcgggacgggattttgtcgtttttaggtggaggcgggattttgtcgggacgggattttgtcgtttttaggtggaggcgggattttgtcgtttttggctgaggcgggattttgtcggggcgggattttgtccgcgcgcaaattttgcattttttattttcaaatcccaaaataagcacgtaatgctgaaataagcacaaatcttagaaataagcatattttaggtttctaagatccggcccctcaaagtaagcacaaatcttagaaataagcacacttgggagccctgaaaataaaagttgtcattgtttaaaagtttttctttcacaaattaggaacttgcataaatcaaaaactaaatcggtcattgaaatcaagacttatgaattgttcataaactcaaatttattttaaaaaaattcttgaatttttgcttgggacgcatttttcgtgcatattttttgcagccctgccaattatcaattatgtagcttttctcattttttttctcgccaaattattggcattttcattttcaccaccggtactcaaacatacgctaatgttttcatataaaaatataaaactgcacttttttaaagattatgtacatataattttttggtaatttcaaatttttaatgagaaattgctgtttacaatttaccttctctaaaataagcaaattttttgctctctcattttttctaattgttctctctgttttaagttaacaacaaattttttgccttttgtgacacacaaattaattaattggaaaaagggaaaagcgtgctaattgaaccacaaaatgaatcgacggtaatgaattttaaaaattataaaattttcattttcccccatccatttttttcatgtttcagttggatttgtggcgacgtgtggatggacattctcccatcttttgaccgtcctcaactcggcctcaaaatggcattgctttccgaccgtttcgatgttttggtggacaaacatttcgacagaaaaagcgaattgacaatttggaaagcaatcgaaattcgcaaggacaaaggaccaaaagcgaaactgtctgtacagatcgatgacaaatttgtggattttcctctgccggaccattcgctgccaaacaaaatccgttttcgtttccttcggattgagtaaatcaaaaaatatacagaaaaccaattaatatggttggtcgtcgtcttcatttttcccccttttcagctacattgaccattctgtgctcacatttctccgttccaacaagccaatttgggacagaatgggcaccaccaaattggaagtgtttgtggatgcaattgatacggatgtccaaccgatttgggatgtttttatccgtcaaatttggcctatttttgcaaaaagcattcgccatttgagcttcgaagatggcaatcatttggacaatttgcgtcgccgcatttcaccgacacttctcactgatcttgatcaattgatttcaatcgattccggttatctgtgccccgatggaattgctgatgatgggccaaatggaattgctggtcaagcgttgaccaaatggcttcacactccgacaaaaaatgggcaaccgaagcaattacatcgctataattgttttggtccacagaatctcgaatgggtcaacaacttcaaagaggtggccggccatattttttttaatctctttgtttgggtcaatatggcaactcgtacaaaaaaaaattttctaagaattttcaactaaaacttagtatttatgaaaaacatgaaaattgcgaaaaggtcgaaattatgaagttttttcttaataaaattttttccaggctagaaaatcatttcattttttgtaaggctaatagagcatatgaagagctttcgaatgataccaacaatcttggatttggatgccaaagaaaaaagttatagcgaaaaacataaaaatttttaaaatctgcccacagataacacacaagtacctttttttgtacgagttgccatgaaaccttttgttttacaaattttgtttagacatttcgccgtgccaccacttcggtcagttaccatattcaactgttttttcttgtggaaccaatgccaattgaaccatttgaattggtgaatgaacggacgaatgaaaagctgacactgaaacaggagatcgacgaattcgacttaaatgcgtataattggctgttgcaacggtgcccaattggggagacggcgacggcgccagcaattaaatggaaagacagcgtaaatccgagtgccaatttgaacaatgtcacttttgatctgtggagtttcgataaatccattgggtgagcagcagccgatagcgtttgattttgccgaaaaataaaatatttaattaattttaggcctttgtcgccaccaacggaagaagaaaaagaagaa

SEQ ID NO: 3983 - DNA, 2575 bp, Heterodera glycines
agtttcgataaatccattgggggaccaccagcaataccatttgattttccgaaaaaataaatatttaattaatttaggcccatgtcgccaccaacggaagaagaaaagaagaaacggatcaaagcaacggaaatgtcgtctgattaagtgtacgggaatgaataattaaataattctatttgagaaatgaatgatctcaatttgttgtgcttattttctctcagaaatgcttttgttaattcttttgtttcaattatataaaccattgttgatttttttgttgggaaatttctttagtatcaatagaaacgattgtctagagattcagttatagtaacattgaaaagtctaccacaaaagtgatatgagttcaaagagcaaacaattagcatcaatcaacccaattatcaaaaatcaataatgatcggccatttctcaagtgatcactttttcttccgctgatcaatgtgcccgggagtcgagaaaatggcatcataaagacagaagtagactccgttcaaacggtccaatttctcgtctttcttctgctgtttctgaaccaccgccgccgtctccccaacaattgggcaccgtttcaacagccaacgaaaagttccacccttaatcagtgtcagcttctcatttgtcacttcgttcatcaattcaaatggcgcaattggcattggtttcacacgaaaaataattcgaacagtgtaactggccgaagaggtggcacggtgaaatgtctaaacaaaattgggaaaaacaaaaaaatttgagaaaaatggcgagacacctctttgaaattgttgatccaatcaatttttggtggatccaaataatcactgcaaacaatctcttcggttgaccatcagttgtcggagtgtgcaaccatttggtcaatgattggccagaagtttgattttgaattggtcgcaatcagtgagaattgtaggggaaaccaaacgacgcaaattatccaaatcatcgccatcggcaaagctcaaatggcgaatgcttgtcgcaaaaattggccaaatgtgacgggcaaaaacatcccaagtttcggtcatatataaaggcacatacaaatccaatttggtaatttgaaggatgatcagaattggcaaggacgaagtaccaaaagcaaacgataatggaccagaacagaaaatgtctttactaatcgatggcaatgtatcgattggtggcaattttgtggattttccacccttaatcagtgtctgctcgtcaaaatcaagcgttcatcaattcaaatggcgcaattggtcgtcgtttaacgaaaaataattcgaacagtgtaactggccgaagaggtggcacggtgaaatgtctaaacaaaattgggaaaaacaaaaacaatttgagaaaaatggcgagacacctctttgaagttattgatccaatcaatcaaggacgaagtaccaaaagcaaacgataatggaccagaacagaaaatgtctttactaatcgatggcaatgtatcgattggtggcaattttgtggattttccgttgtctgctcgtcaaaatcaaggacaattaaatcaattagtcgtcgtttaatgaaaatatggctgatcagtgatcacctctcggaaattgttgagccattcgagatttggtgggcccacataagcacggaaacgcaatcgctttggttgaccatctttgctcggcgtgtgcaaccatttggacagaatttgattgtcaatcgtgccggagcacataagagcgaaatcgatcgaatacaactgatcaagatcagtgagaattgtcggtgaagtgcggcgacgcaaattgtccaaagcatcgccactggtaaagcccagtgcacacttcagatttttgttgtttttttaatatgggttcaatcccatatgcccacactttattttaccgtttttttcatttaatttactattttaattactaaatctgttaacaaattacactaaaattttcaaaattttccccagcggcgcctatcggcaccgccgggcccacccaagttccccaagttttctgaaaaaatgcgccgcaaaaaaattgtttaaaatctgatttatttaaccctataaatgatgggagaatgtccttgatcattttggttttcattgggaccatgtgcgataacaagccttcgtattgcctgatcattaagcggcggattgactacactgtgctcgcatttctccgttccaacaagccaatttgggacagaatgggcaccaaattggaattgtggccatacagaaccgagaaagatcagtcaatttgggatgtttttgtccgtgaaatttggaaggaattgccgatgccaccacttctgtcactgaaacaggagaaaccgcgaaaattcggatgccattttgaacaatatccaatttattttttggggcggcagtaattgtatttggtgagcagatcaattggtaccaagaaattctcacttaaaaaagaagcaaataaatttacataaattttgtatattcgaattagggaacggattaaaaggtttttgcttattttttctgcggctttaactcgacgag

SEQ ID NO: 3984 - DNA, 1992 bp, Heterodera glycines
cttatcaaaatgtacggtttgccttccgaccatcgttcagcgtggtaccaaggcttatagtccaattcattgaaccttaatatttaaacaattttaaaaataatagagatcgacattttgaaaaaagcctggacctggattccatgttggagctggaccttgatttcctggacaaaatccaggaaaatccaggtccaggaaaaatccaggctccttgagatctggatccaggcctggacctggattttttgaaattattttaaaaatcaaaaaaaaaatgtttgaaaaaattaattatttgcttagaagcatctaaaaatatctaattaataataataataataatgtgtttttaaatttatttaatctgtttttgaaaacttgaaaaaacatcggtcacttgaaaaaataaattctaaaattttgtccaggaaaatccaggttttttcctgttttgcctggacctggatttttttcacatttgacttggaccttgatttcctggacaaaaatccaggaaaatccaggtccaggaaaaatccaggttgccgaaaaatggcctgtacctggatcctggaaaaatccaggcctggatccaagtccaggtcgatctctaaaaaataaaaactcaaaatcaacaaatccataataaaattgccttaggcatgttcgccgatgaatttgttcaaaagccgaacggataagttccttctcacggtcatccaaactaaaattccaaagttcgttgaaatttatttttgtcaaaatctgttgcaaaactatgccataatttcaaattttctctcaatgacagcagaaaataaaaagaaaaaaaactcaccttggccataagtaaacatcatggttggaggcacgtacagttgcattatcaccaaacggaacatctcgttcaattctaagttgcaccaaaattcattttatttttgaggattcacaccgaaaacttcaaaaaataaacattgaaaaaatgaatttcgatgtaaaaagacaaaaaaaaaaacgaataaatgtttaaaaacatcatttatttaataaattttcagtgacaaatttgtacttttcagtatttatttatgtcgggcctacctgattatatttctgtcgtgtcggacaaatgttggcttttgctcaaaaatatgagcatctttcaccttttttgtgtaattttagatttttttaaataccaaaattttttacttctaacggtcgcttcacaaatccgctctcaacattcgcaacaaaggcacaactgaagaaaaaaatggcaaaaaagaagaacataaatttggattttatttggagcattaaaactgtaagaaaataattatttgtattttcatataaaataatattataaaataataaatttggaattaattagtcaccactgatcagattcgatttactcggataaacgaataaaacatgtttcgatcatttcattcaaccgcttctgatcaataattatccactattaattaatctattaggtgacgtacccggaaaagcagcgcaattaattgaagcttcatagccaaaataaaacataaatatatttttcagacattggaaaaaataacactttcaaaacttttaaatgaaccctttgtattagatattaatataatttgtataagaagtataattatttgtgtgaaaaagaggatgaaaagtttctaattttcttaacaatctcacattagaaatccattttttccagcggcgtttctcggcatcgccggatccaaaattacccgagaattttataaaagattgaagtgtcaaacccagccgggactgaactgagcgccctattaaagtgctcaaagacaatttatgattttttattgcttttatatttatatatccttctagataaaaggaatttcaatctaaagttattttatgtaagaaatcctctcggaaaaaatccaaaattctaatattatgcccgggttaagcagcggaaag

SEQ ID NO: 3985 - DNA, 4780 bp, Heterodera glycines
aagaaaaaaaactcaccttggccataagtaaacatcatggttggaggcacgtacagttgcattatcaccaaacggaacatctcgttcaattctaagttgcaccaaaattcattttatttttgaggattcacaccgaaaacttcaaaaaataaacattgaaaaaatgaatttcgatgtaaaaagacaaaaaaaaaaaacgaataaatgtttaaaaacatcatttatttaataaattttcagtgacaaatttgtacttttcagtatttatttatgtcgggcctacctgattatatttctgtcgtgtcggacaaatgttggcttttgctcaaaaatatgagcatctttcaccttttttgtgtaattttagatttttttaaataccaaaattttttacttctaacggtcgcttcacaaatccgctctcaacattcgcaacaaaggcacaactgaagaaaaaaatggcaaaaaagaagaacataaatttggattttatttggagcattaaaactgtaagaaaataattatttgtattttcatataaaataataaatttggaattaattagtcaccactgatcagattcgatttactcggataaacgaataaaacatgtttcgatcatttcattcaaccgcttctgatcaataattatccacaattaatttatctattaggtgacgtacccggaaaagcagcgcaattaattgaagcttcatagccaaaataaaacataattatatttttcagacattggaaaaaataacactttcaaaacttttaaatgaaccctttgtattagatattaatataatttgtataagaagtataattatttgtgtgaaaaagaggatgaaaagtttctaattttcttaacaatctcacattagaaatccattttttccagcggcgtttatcggcatcgccggagccaaaattacccgagaattttataaaagattgaagtgccaaacccagccgggactgaactgatcgccctattaaagtgctcaaagacaatttatgatttttattgcttttatatttatatatccttctagataaaaggaatttcaatctaaagtttttttatgtaagaaatcctctgaaaaaatccaaaattctaatattatgccgggtttatgcagcggaaaggcctcagtttttgaaaatgatagaaatgcgttttttgtttttaaaaaaaagctccacatggatcgacacccatcagaaaattggccattgtttactgaatgaaaaataaaattctattttattttttctgaaaatgaaatgccaaaaatgatattttgtgtcatttgtcccgttttgttccgtttgccatttgtccaattagttggccatcagagtgccatttggctgtccatctccgtctcctcccccatgccttcccattcgtccgcctcgccgtccatggcgtcgtcctcgagcagttcgtcctctgccaattggtcaaagtccgactcttccgcccccaagtcgtcgaccgcctcagtgtccaagttgttttcctccgccaccacttccgcactcgacggtcccttctgagcattctccgccgcctttggcacggctttcactgctgccattggtttggcttcaaattggcaattttggcacaatattaaatataattaattatttacttgggctctttttgtcagttgcttttgccgctggggattttttgtctaaatttattcaattttcattattattatttgtttaataatattatttaccatttttaggcactcctttccctttggctggcttagcttttttgtctaaaattcaaaaattaactttttaaatttctttttatattaaaattcttaccctttttgcctttggcgtccttttttccttttccctttgattttgcgtcttttttaattccttaattaattaattagttaattaattaatttgtattaattagtccctctcttttttctgctttacctcctttcgctgctcctttcggcgccgcttttccttttgctggcgttgtaattgctcctttaaaagcatattccaattaatatttattatcaatttatttatacctttcttattgtcttttttcactgcctttgagttggctaaaataataaaatatttttaaatttttaattaatttggccacctgtctcaagaataacagccatcaccaagcaaaccatggccaggaagagaacggcgcgcattttgaatgtttgggaaagggaattaattaatttaattaaaataatttcgaatatgattttcgcttggctttcttttggcttttatattcctccaaaaaacgtctattttctttgaaattggaaatgtttttccaaaattttttgccggaaattatgccaatgccaaccatttttccattgatttgtctatgccatttttatgttcggtttctttcctgtgatttcaacattttttatttcttcatcaatatgttttgttgaaatattcttttattggtaaatatcggtttgaggtcccaaactcagaattgcttacggtcagaattaatgtaaaaaggtttgaaaaaaagcatttgtgaagaattcaaaacggtcaaaaaaatcataaattaatttatataaattaatcattttttacagagcaatggcattggcaccattctcaaagacattgcgccgcaaatgttcaacggcactttggcaaaaaatgattcattttgtgccgccatgggatgatgacaaaatgcacgcgtttttccaaattgaaaggccaatattttcaaaacgcataatcaacgacgcggatttattgccctataaaaatgatccaaacagattcagtcagtaaaaaataaattgaatttttaaaaaaattaatttcggcactttttaagacagtctagacccatgtgatgaatacggcgcagattgtgtgccgatcagaaatttgttgttgaaaattgaggcattggcaacctgtggaaagaacgaaagcaaaacaaatgcggtaaaaaatagaaaaaacagtttaaaaatatttaaaaatatttttagatttctaaaatgccaccatgggccccaccacttccgccaccgatgccatggaaaaagccatccgaaacaatgctatgcgatggggatatgttttgtgataaacgaaagctgcgagaacagtacaaccgattgagggagagtgagtcattttacaaatattaattaattaagtaatgaaattaattaaattaaaattcagtttgtgggcttaagcccgaaaaagtggaaaccagcgcaaaaaacgacaataccatccaaaagagacattcatttatatttctcattgataattcattcataaaatttggcacaatttatttatttatttttattaattttacctatttttgtagcctgtggcgcatccccgttgggccgtgacagcggatggcaatcccttatgctgggaatgactaacgactggtgcatcgatgtaatttttgcatcatttattcattgcttattttcaaatccggcctcagtcgggattgaaaagtcgggactgggtataagagctatttgaaagactgtgatcggttttagaaaagcctggattatagggatccggaaactttggttttaatttgaaactgattaagaattttaacatgtccgtcgctgctggccatgaattgatgcacgcgattggctttcatcatgagcaaagccgaagtgatgtccgaaattacgtgattttacgggaagatgacggagtaattaacacaaataatttaaatataattttccatgtgctaattttaaagcaatcggaaattgacccatacacaaaaaactttgacttcccttacgatttcgggtcggtgatgcattatcaatctgggggcgatcatgaacagtaagaaaaagttggatttaataacgtaaaattggaattaaaggggcttatacaatctgatcactttgccacgcttttaccaacaaacgattggccaaagcgaacgaatctctttcaaagacgcggccataattaaccgaatttattgcgaaggcaaatcaattaaatataattaagtgatttcccatttgttcagactcatgcaaaggccatgaggacaagtgccaaaacgggggctatttgaatccgaatgattgcacaaaatgccattgtccggacggatacggtggcaaatactgtaaagaactcgaagagagtgagcaattaattaattcaattaaattcaaattaaattttgtaaatttttagatttgaattgcgaggatttgagtggaattccgagagaattggtggccaatcagtcagcagtgttactgaagacgaaggccaaatgtggggggaatgggccgtgccgatgccattggcgaattaaggcaataaataatatttttgaatttttagtttttttaattaatgcaaattttaattgctttcagcctgaagcggggaaaaaggtacgaattcagttcaaaagtttgagcaatttgtttgaatgcacatacaactgctcatcggcgtatgtcgaggtcaaataccgagacgacaaaagggcccaaggcaaaaagacaaataattaattactgattaattagcaaaaggatcgtttataaggtgccaaactttgctgtccccgtgcactcactgatctgaacgccaatgaatacaaaatattggattgatgcggaaaagccggacatggacatagtcatttctgcgctcctttcaacaaaatggaccatac

SEQ ID NO: 3986 - DNA, 2960 bp, Heterodera glycines
agcctggactcacctgaccacacaataaaaagtgcttaaaggtcatttaaataattttttatgtttttttactgctttttgttaggacatatgtaaaatcatagtcatatttgtaatatgcttttaggtaaaagttaaattttaatataataacgttttttattttattattttagcgtttttcgtagaatttttgggctttccaattgaaacatttaaccatcgcaaaaaggagcatgcgaaaacggagcaagtaacccttggctccggggggggggggggcggctgaagtcaaaaattcgatttttaggggtgtatttcatttttttaaaatttattttaaattgcctttgttttcaatgctttacaaaccattacaaaatgcaaattgttcaaaaatgttaaggcaacgtcaaactcataaattcaagcaaatgccgttacgccttcaatttgtatgccgaaaaaaggaaccccggcagcggcaatttgagctgttatgacggtgtaaaaaaccaatattatcaatgcccatgtaaagttggtaatgaaaaatgccgcactgaagaaaaatgggcacacgaagaatttctttgcccaataataaaggtaattaattaatcaattaatgtcaaaaggcaccgccacaaaaaaatatttgagttaaatttttaggcactaaaaaaatttgaatttgaaaaacaaaaaaaaataaggccgaaataagtgcaaattttagaaataaggacaaattagaagataaatgataaaaactccatctacatataattttacttataaattcaaggtcaatggaattcaaatccaaggaaaaaggcaaacggtgtttactgacccaaataatgaaaaatacaattggactaaaattgatgttgattgttatgtgagttgtgtcttctaatttcgaaaagcctatttaattgacttaattcacagaaagccgaagggggtaccgtaaacttttggggctacagtaagccggagactaacgaaatcattcgggtggacgaaatccactgcttgatggatgatgcagttgctgaagtgccaaaacagtccaaaagcttacaaaccgatgaacagccgccgatgaaattgagtccaagtccattcttggccaataatgtttcatcacttatccatgtgttcgtgccatttgttggcaatccatgagagaaaatggggagaccagtgatcagttggggatctgtcttctactgcgatcagttggccaatttccaatcagcaaatttttatttttttttaaatttgacaaaatttgatttatatacgtcgaaaaaattaataaaaataattaaaaatttaattaatgcatgtcgagatgtctttttgtttattttttccaattgtaaattttgtattccttatatgatacaccaattatttttattcgtttaattatttattattttgttctttgtaaatccgtgccaaaacccttcaagacaaaaaagttcaataaaaaatttacgtacaaaaaataaatttcaataaaattaaattaaaagaacaaaagaatttataaatattttttaatttttgggagtgtttgaaaatttattaaaaatgtttccatatttttttattattcactttttgtgttgtttaattgctgttcaatcttaaaaattaaataaacatgcaaagctttggaataaagccatcagtataaatatgagaagcaggctgatcaatggatttttttttaattttcaatgaaaaaattggaattttcaaaaaatggttcttttctttggccagcggggaaggatcccaaaaagctcttaaatgaaagagagattgcttaattaagtagaaatttaagccaataatgaaaatatataaaatacgaaaattcaaaaaccacgaaaaaatttcaacaaaattttttctgttcaattttttcaaattgaatcaaaaagagcaacaaacattttaaatgcttttggttcaaaattctcaaacttcacacaggaagcacagcgggacaaattcaaggtttatattttctgtttattttttgttttattgcacgttgttgggttgaccttccccctacccaacttttcagttgtccctaactgaatttggcccaaatttttccttttccaaacacacttcatcggcttttcgtttggcacgcccactttcacttgaaccgaattcaatcgctgtttgtttgccgcactttctccaaaactttcagaatttttgatcggaatttctttggttttcagttggggcacaaatgttttgttgaataatggcctccttttattgtccacagcatttcgatttgatttcttctccaccactttacctttcttggtaccagtgtcattttttgggtccgacctatgtttattcccctttttctgcccttctctgttggtactggtgttgccatggcacacgaaggctttgaaagtgatcagaggcgaattttcgggcttcgaagctggcgaaaagtctacaatgcggcagttcactgcgtcaagcattttgaaacctaattggtccatggcatttgtgccgaaaagcaaatcatagccaaatgtagattgggccacaaaaacacggattttcgtttctaatggtcctctctgaattggcaaagcaacaattcaaaaacatttcacttcctttccatttatgtcgatgatccggctttcagagcgggtgacgatgtccttttggcttactttgtccatgatttctaagaagaatttgaccgaaatcaaagaaatttgggagccgccgtcgagcattgcatccaatttacgtccaaacaccgaaacactggtcgccaaaattttaccaaccgccgggctttcttcccaaatctacccttttccgacaaattcgttgtttttccgaagaatcgatttcagacaggtgttcccaatttacggctccta

SEQ ID NO: 3987 - DNA, 2061 bp, Heterodera glycines
  unsure (1)..(2061): unsure at all n locations
atcatgctatcgaataccagcccagggtggggaccggttgctgattgcactcaagacgatnttgttgatngctcttnataggtaggtttttttgaaatttgggtgttgctgtccttggtgaaactcaaatccttcgtcttgggaccggcggtgtccttgtgtataggcatgtgcgggagaattcgccgaacgtgtgattgttggtcctcaacaaccggttgctgtgtgagccttatctgctgttctctctgccgctcaaaattaccgncagcattttcgtacaactgaccattgggtcggcaagcaatcggattgactgcttgtgggtgattcaatgcagggaaattatgcgcgactgggtttggcatttgattttgcatgaaattcataaccctaatttggttttggatgacgctcaaattttctggaagttgcattcggtctcgctgcagggcgcttaggttttgttcgttaagcggtgttgaaaaggctcgcaatccatgtgcgtccaacgcatcgtttccaaaactccctctatccccagcttcaactccattttccaaattttgttgcaccataccgttgacattttgttcgtcgccgttttccatttcgtcgtactccaattgttcgtccggcgcgctttgatccattcctccgtaaagcaggcgacgacgaatctcagtctctgctaaaacattttcatgattgtcgtccagtcgctgattttcgttgttcgctaagggcgagatcggtctgccccccaaaactccaaaattttcagccctaaatgcgtttccatcgcggtcaacaatgattccctggttgagtgccctcgtccgggttaatggtggagaccgaagcacaggcattttgtttgagttaccgcagaggtactactaaacaacaaagaaacggcgaatccttgaaaaacggcacgatttgtcggtggtttgtcgatatccacacttatcgcagtaatgcgtttgcagtggtacgaaaattggtgaaattcgcagcaatgcgttaaaacaacagaaccgcagcaatgcgtttgttctggtcgcttctccaaatcagcttctcctcagcagccaaaaatccacaataccggcacagctaactcttcgccaggagcgccacgtgctaaataatgctgtttgggtcggggcctattaattgctttcctcaacaaatatttccaaagtcggggacaattaattttatttaaatcagcaacaataaaaatgggggaaagtccgaggaaaataactgacgacaacaatataaaaagtgcactgccaacagaatgaattgaagggaagacgggggaacattttctgctgggaagggatggcaaaatatagattaggcgagagactacaatgacagacaatgagacaaaaattaagaagggacaacataattactaaataaaatgccaataatcaaacattaacacacaaattcaaggtttatattttctgtttattttttgttttattgcaccagcggtaacgccggaaaaaagatgaaaattcaagaaaatccaataaaaatttaaaatgtttttccttttgtgtcggttcacaaatgctctgaattcctcgtcttccagtttggatgctctcaggcaatcatatctgtcaatccaaatggattgaagcctggcaaacaaacgcttcagctgctccacagtctccgcaaagtcgaactctgtcacatttttcggcatgcaggactttttgtattcggcaaacgcttccttgctgagcttcgtcatgagaaccttcactttcagcacgtcctgcaaattcggtgcggcaaagtctagagcagagtcgatttgctgcagctagtcctcgatgtcggtgctttgctctccgaattcgaagtattccacattcggtttcgacggcacattggagggttgctggcctgcttgcggcgcattttactgtgcttcaagcagttgcttaaccatgtccatcaattgctgaaccgtagggtttccattttttattttgtcgttcaccactctattgataatatcgccaagat

SEQ ID NO: 3988 - DNA, 4819 bp, Heterodera glycines
  unsure (1)..(4819): unsure at all n locations
agtcttcngggtgtaataaagtgcaccccaattcaaatccattatcgtaacttctcacaatctccacataaattccgaaactggcagaaaaaaaaattgtgtttggttaacacaaattacaaatcacacactttttcacccatccctttcaagcagtaacagcagcagcatgatgatggcgttggacgccgccggcggggcgacggcagcggccgccgactcggcccaactgatctccaccgactcgttggacatggaacagttgcgggtccgctgcgagtgcaccaagcacaacgccaactacaagctgacctttgacgaggacagcggccagtggaccaccagcggcattggcggctcgttcaccaccacggcgactgcgagtccgccggcggcgcaacaacagaaacaacagcaccagagacggttgaagcaacaccagcagttgaagcagttgctggcgatgaacaccaccgccactgccatgaataacaacaacaatagccatgaggaggaggacagggatggtcatggagatgaggtacggtgcctactatactaatattcgctacagagcaccaattttatttcgggagggacacccgaagagttttgtttttttgctccccatcctaaaatttttgtacaatataatttcttaaaaattttttggcgccctggaaaaaacgaggaattttggcctttttgagaccaaattttggcaaaaaatacatatatttttttatcccaacaattttcaccaccaaaaacaatattaacagtaaaaaatctttattccattgcagcatcaacaacagcagcagcagttgtacaccgccatcatggacaacaacggtgcactggggctgcaactgttggagcagttgaacaacgctgatgacgacgaccaagacaacgacaccagcgcgtacagcggcggcgtgttcaatgccaccgccgagaaacgaagcggcgtacgtcgtcgtccggcaacgagtgttggccatggcacaacgacgacggcaacggatggttggcgaaagaacagtttcatggacgcgctgttgaacaacaacccaaaccacaacgccaacacgtcttcttccgcatcgtcgactttccatggcaataatttccgtggcgacgcggcgacgaaaaaaggggacggcggaggcatgggaatgatgaccacttggggacgactgcaccagcagagcgacgacatgggtggaggacagcagccgcccttcaattccgagaaggttcacaggtcagtatttcggaaggngagggggcgagggtgaacgggttggatgcattacgttcccccccatttttcaaaaaaaaaaaatttaaagcggattataaaggaaaatggcaaagtttaaaatttctataagttttaacaaattcgctaaaatgcatggctgggcaattgagtacccaagattttctcaaaattttaccaaaaatttcctcaaaaatggnagataaaaaaggcactcgaatttttcgctccaaaatttttttggtgacaggcctaaaaactcaaacctttaatccaatgaactcacggcttttcagtcttcccgagctgaacagcaccaaagcaaccgcagcagcgcnggaggtggcggcattggcactgatttgtcatccgtcgacggcgcccaccaccaaccacaatcacaacgtttgccaaaggtgcgtcaacgccggcaatggccacatatcaacagcagcaacctcaacaacaccgtcatgttcaaccagtacacggctcagtttcgtcgtcatcgtcgtcggctggactcagacggccgacctcctcaagtttgctggacaatttcatcgccacgcaacgccaacaacaacagcaatggaacggcggcccgcaaatggtggactacgcctactcggagacgtatctgggcaacggacgctacattgacatgaacgaaaatggtagggattttgtttttacggggttttctcggtttctgtcctcacaaatcaagggtatccgagtcttaaaggatgcctaactcggactattattacttattttccaaatactaaaatggattttccgtcatttggcctgacggccctgacttttcttaaatcacaatgaaaaattctggaaaataccaatttctcaaaacaaaaaaaaaaaaatccaagcaaattttccgttttcgtaatataattcttttccgttttcgtaatataattcaattgcatgaaaaccggaggggcaagcaacagcaaaaaaaacggatttttttctccgaaaactttaatttcaaataatcacgcgttttgattaaatttgacaactttaatgatacaagaaatgttttgagaagtttttcagttttcaaagccacaaagtccgtccatttttgtcagtttcagagtcccctccattcattattgactaattgcacaattaacgaatgtgccatttgtttgttttttcactcatttttattgacacttttttccccgaaaatgggatgggatggtgtgaactatgaattcatcctcaaactgtgatgatttatcacacatttggcgtgtgatggaacgacggggacataaaaaacaaaaaatcgtttctgttttttcaacgccaaacttttggtgggggctcatcaatcacaactttcgtcatcatcatcgtcgtttcgttccacattacctaattttatttgtgcattttttatattaattatataacaaataatccaaaatccgatcgaattgaatcggatcggaaaattccccggcgccctttcccatcgcccatttcaatctttcccgcccccctcccgccgtcgttctgttcgtcattctttttcatcatttactccctctcccctcttccccgcgcagagattggctatgttccgtcctgcaccgcatccatccaacgtagcggtggcgatctccatcatcatcaacagttggcgctgtttgatttggatttacggcgtcgccaattgctgctcggcgttggcggcagcaaagacagcgacgacgacggtgggccgtttgttggagcagtaccagtaacagcagaaaatgatccgcaaccgcagcaacaacgacagctgatgcggacaatgataatgaagatgaacaccaacagcaacaacatgacggagacggcaccgctggggcacaaattgggcaacgacaaccaactgcaacacaatgccaacgccaaccagcaacgacaacagcaacagcaaaggcggcagagccaccaccaaatgggtgcaaccaaaacaaaggcagcggcgacaatggcaatgccaacaacggcgaccatgccgcaacagcaacggcgcacgtttgccgacctgtccgccagtcggacagtgcccgacctgaagttcatcgcgttggcacacaatgtaagttgggacaggcaatagtgacggactttcgttggcaccggaagttggtcttacaatgggggactgattcaaaattgaaaaaagaaagttcgtgaggaaaaccatcggtcaaaaattatattgttttattttctttctttttcatttcacaaaatgagggatttcattcctcccatttcgttaggtcctccaataatctgacaatgaacaattttttttaatggattttactataaaaataaggcattcgtaatggcccaatttttcgagagtcactctcgaaaatactcaaaataattcgctctgtttgctttccgattactaaaaaattacattttcccgtctttcaggtgccaacaatttgtcccccctcctccgtgtcgttggacaatttgttgtgccgcgtgcgaaacagtgccaccgccgctgacggcaacggcggcattggtggtgccaatgccgcggccattgacgagctgatcgactgctgtgccagttcaatgcgcatcctttcggagccggacggcggcggggccagcgacgggcccgactcgggcctcggctcgtcccattccgacggtgagccaaaaaagcgaagaaaaaaatggaaaccgtcgtcaaaattttaatatgttaaatttttctggggattggctcttccgacgggataaactgcacggagaagggaaatgaagcacatcccattttttcatgttacatttatttacaaatattcaggcccctcgcacatcgaagattggtcttcactgtccgtgttgttgccaaggttggattcatttttatttttcaattttgagtgttgaaccaattgcactttttttgcgtgtcgtcaaaattagccggacccggtggaattccgggttctggggaaggatttggttcctatcctctcatcctttttcctggtgctctgttccccgttttcgacatttcctttccattccttcacccccccccccttaaatgggactcaattgtaccggacccaagtattttttctacaccggcggggctcagatgaccgctcctaaaactgtcaacaacgaggaggcaatgtgttttgtagtccaaaaaagttttgatttgaaaatgtgacaggatggcattagtgtcggcagctgacgcatttccgtcggtccgtctccccccccccccctcaaattgtccccgtccatgtggcgctaaattcgtccaacttcaaaagccccaatacttaaacgccgctgttttttaagtgcaagtgccgctcattaaaatgcgtgttgggaaaaccgcgagcggcggaagtcaggaaattttcacgaatggtgtctgtctctttgtttatttctctccctcacactcacactcattctccctctttctctctgtct

SEQ ID NO: 3989 - DNA, 2567 bp, Heterodera glycines
ttttattctgtcgtcttctttttcaccttttctctctcacactcctctctctctcgctctcttttccccactctttccccaatattttccctcaatttctctcttcatcctccctgctgtcccccttttccacaacaccaaatgaatgaccacagcaaatgcggcggcttcttttaatgctggccacagccacacacacacagctctttcatcgttttatgtttgtttgtctcctctctctcacatattgtggggctgcttttaaatgtgtgtgggaaagcgacgatttgtcgtaaaatggacaaataaacaaatgcaataaacaaaaatttaatctgttgggaaaatgcactaatgcaaagtgggggaggaaactcatcaatttgcaaaaatgaataaatgggaattgtatatgcatagtagaaggtgccggaattttgtaagggtcgggatttggaatcaggccgggatggggggggggggtaaatgtccggatcagaatcccgggggaaatcccgacgggatcccgttcccctcctgtctctaatgtacagtttggtggtattgcaaaaccaaaaggatcttttttcccaaaaatgggccgtctaaaccaaaaaaagtgccaaaaaaatatacaaaatttgaagtggacacaaattgtacaaagccgccatcataatttacaaacgattgcagaaatgtgctcgaggcgtgctccttcttcaagaccaacagcttcctgctcaccggctcctccaataacattgaggggcgacggccggcggtgccgccgccgcggtcgttcacttcggccacgctttggcgattgaaggaaaaggtcgttgttgggaagatgaaaaaatcagcgattttttgaaattttataatgaattactaatttttttcaaaacttctaaaaaattgctagaaaaattttcaaaaaacatttttttttttgaattttcttagaaaaaattttctaagcctttttcttcaacgattttttacaattaatttgaattttgtaaaaatagaattttggcggcgagattttgtctcgtctccttgtaaaattataagtggatttagacttttttgagcctacctatcccatattttttcatgtttaagttagtcaataggttccacaaaaaataaaaattccgatggctcggaaatccgaaaaaaaacattttttgccagctacccctaaaacattttccactgttgcctttcgggttcaggccaatttttgagcaaattagcttaaaatttttttgaaaaatagggaaaatcttggtataatttgaacaacttgctttttatttgtaaaataaaacattcttttgcaattagcctacgtaattacgtatttaactgtctccctcttcccgttttgtagggcaattgttgcctgaggcattggggcggtgccaacaccgatccgtcaacgccaacagtaaatgatgcggcgctctgtggctgttcgtcttcgtcctgttgttgctgttgcacttcgtttggcaccaccgccggtttgccgggcgcggcggcacacggcgaacagtgcaccaaaagtgccgtcttcgcgcgccaacaaatgtcgtcccgcagccgtgccgtgctgtcgcaaaagctgcgcttacatgcccgcgaattggcattgattgggtgggaatttgcaatttttgactccgattaatttaattgatttattttttggatcgtaagaaaattaggaaaaattttggtgccagcgcagctcaaaatttaaaatttacgcttatgtctctaattttttgtgttgaatttcttgttcttttggctaaatctcaaaatttaccattttaaattaaaaaaaactttttttcctcagcaaaatctcacaaattcgtcaattttaatctttgatatcattttgaattgttctttccccggtcgagagtcgcttcgagaattttctctctacaaatttcatttgagtcatcgagtgccaatgtgtgcgtgtgcttcgtcccctccccgttagattgcgtttttcaagtgccaacttttgtccctttttgagtgtttttattacgcacatttgattgcttttaatatttgtacacttcaaaagaacataatgagaaaatcaggaatttaagtgaaaaagaaattaatagaaattgaaaaaatgtgagggaccgaattttaatttatgcccattagacaattaaatcgctgaatttttgaattttgttcaaaaaatgggtgtgcaaaatgttctttgccagaagtttcagacacggggttcccagtcccggtttttttttgaaagcaccggtgtcttccggcaccgttcaccccgttccgtgttagtcccggccccgttcaaccaaaatggcacaaattggttgttttttggcgcaaaaccgctacaaatgcatgctttttcgccggcactgattttggaaataatattgtaggaaaaaaaattggctccaagagcaaaagaagcaaagtcttcgggtttcgcaaagacctcggctgcttgttttggctatcttccacgaataaaatttttt

SEQ ID NO: 3990 - DNA, 2524 bp, Heterodera glycines
  unsure (1)..(2524): unsure at all n locations
tttttaatttattagcttttgatatttttttaagaatttctttggtggagcacgatttgttccgatgaaatggtctccaaattttcttctcgaaatttnttctggttacgttctgacctcaaataccccgaaaatacaccaagtcaacatcctggaaaacgagatgtttatttgcgttcgactttgtctaatttttgaatcgttgaagctaaaaggggctcgcatttcctcgtaaatccaaaattgtatcccatttaaaacaatttgtcgtttgttgttcattgcattgttattgtcctcctcccccttcacagtttgtactgtcgtctgatcgaatgtgttgagctgctgtccgtgctcaaccaatgcggcgaggcggacaaacggtgggagcggcgacaacggcagcagcaacgggtggcgaccaccgccgacgaccgtgtcgccgcacgggtcggagtcgccgtcgccaacgacgctcaccatttggatcaacgccaagtgcagcaacagcacatggcaactaggacgatgatggcatggtgcggcggcagtgccgcccgtcttcccaaggattcgcgagtgccgaagagttcttcaatgccgaccaaactggtggcagcagcagcatcatcaacaaaattgtcaacggattgcattgaggaggaggagcaagaagttgaagttgttcactgccagcaggacaaacaacaacaccacaatagcatcaaattggagggtgagaaacaaaatgatgagtggtggaaggctaaatttaccagaatgacccggaaactttttttggatgctctcggcccatttttcgagtgtaacaggatcaggttcgggtttttcaaaatcccggtctctcgctctttaacattcatttgttagcagactcaatttccatttttcagatgtcaaatgggtcgaagtgcagcagcgcgagcaggaggaggacaaaacggcggaaaatgagcgaccaaactcaatggcggacaacgacaacgtcgttcagtcaaggaacactgatgctgttggtggtgctgctgacactgttgtgcacgccggtttgagaccgtccagttccaggatcccaatactacggtaaggttgattttaaaaaattaatccaaaattatgagccaaaaaaggcattcggtagaagtactgcttgaacatgctggacaaaacaacaacaatttgttgtttttccgtttagcacgcgaagtcgttcgtcaataatgcacagcgacgggggcagtccaattgcagcgcaacaacgccactctccgacgacgctttcccgtcgttcgtccagtgctcgccctacaccgtcgttgtcgcccgtttacatttgtccggtccgcgaggcgatcactggcgagcacacagaccaacagtcggcatcgctaccacatgggagcgccgctggcggtggcacgctgctgtacccgttgcgcaagggcgagcgcgtgcgagtgttggccatccgtggcgagtacacgcgttgcagtcgcttgcctgctgctgaacatcgccagcaacaactacaacaacagcggttggcgttgcagaacggcctggtgccgaccaggacgctccagtttggcgccaataatggcactacggcattaaacgacgagcggatgacggaactgtgactgatgattgacttgctgatcagtgtggtgatcggagtttgctgtgtgccatgaacggacaaagaaaagtgaacgaaacgatggaaacgtacaaaaaaggacaattaaataaagagacacaaaacaacaacacttttcatatgattaattattaaattgatatgaatctctagccaatctcgctgctccatttttctgtttcgtcattatttaattctgtgcaaaaacaaacaaaacagtgtgcaagcaatccgaatgtgttgattttgtcgagcttttcatatgaaaacgattagttattatttagacagttgatcagtgatcagattatgggtggctctctctttttgccggatttctttttcagaactgttatctggcattttggactgcacaattccaaaatttctgccatcttaattattttggtaaaacgaaataatttcttcaaagcgatgtccattatgaattcattgggactaattcccgtgaaaaaaccatccccttaattagaaacgcttaattgaaggaaaaataatttatagatcactttgcaaaagtatcaaaataaaaagatcaatgtcaatggatcattcggtcgaccgacagtcagtccgtcttcacttccgccgtccttttctactgctgcttctcctcctccttctgctggtccacggccgccttcttcttcatttcaatgggaatggttcgtccgcctttgtcagccgttttcattccgctgatgaacaggcgaccgccgtccaactcgcacttgatgctctccttttggatgccctccgggatgagcacacggcgcgagaactgacggtggaccgattcgcctgaggggaggggggcaa

SEQ ID NO: 3991 - DNA, 1569 bp, Heterodera glycines
tgtttcatggtttttgactggatttagcttgttttgttcaatttggaacaaaagtgagaattttgaaattttttaattttcgactttttgttcgaattcgggtccgggattcgaaattattcgtgatcagcgacccagaaaaccccaaggaaatgtgttttacacggcttttttaaaacttattttttcgaaaaatgggggggggataaacttcagtattacctctaattcttactgacaatgagcagttccgactcagcgaaataaaagggaatttctaacatttccaaagttttttgcaatcattttaatttgtttatactttttgcatttggatataaatgtttcccttaaaagcgcaaccttagccttgtaccaaatactgtcacttatgaagagttggttatgttaaagcgcataaaaccccgaaattaacacacaacccatgcgaattcgactcttgatccgctagctgctttatcccacaacctcccaccacctcagcattttaacaatttaatgactttttccaaaaagattatctcaaaatagaaaatgaaaagggtataaatttaagcactgtgtgtatatgtgtgaaaagcatatattgaagaaaaagcttgcaaatatcgatgatagggaaatgtcgaaaatgaatcaaaattccttttttttgttatcctttccatagtcaaaataactcctctctttctctccctgtgcttaataacgtcttcctcctccaccaccgcccgagtacagtgaaccgcccgatcggcctcctgctccaccgtaggacatcgattgctgctgatggtagcgaccgccggatgacgaggaagcaccggtcatcttcgacggcgagccgtacatgttccattctgaaagcacaacaaaaaataaatatataactatgattgacatggcataaatttttcatagtttaaatcttgattgatccgaagcaggtcgtttcctccccggaaaataaaaatgtttgaaaattttccagcaattttttcaaaatattatggtgaatttctaatcttgtgaaaaaaatcaggggtttgaaaggagggggagaaaaattgaagtgcaccctgacccatttaccggatttcaaattcataaaaaaatccgccaagctcaagcagctattaccagagagaatgtcatcagtttgtctgctccaaccaccgttgccactggctgaagttccaccggcgctcgtgccaaatgcgcgcgaattgaccatttccgtggcacggctattagcagggtttgcccatgccgacgactgactgttgtaataggaggagggctggccaccaccaccaccgccggaggattggccacgggaagaagcgaactgagccctaaagtaattaattaccataaattaatgtgtacttcattttcattaatcatttccccccaaattatgtttttttttttaattttcaagcgtttttcgatatttaagataaattgttattgttttttaatcgaaaaaagtaaagatttctaatgggattttaacattaattattcccacaaatacataaatta

SEQ ID NO: 3992 - DNA, 698 bp, Heterodera glycines
ctcaaattgttattgaatttacatttccaaataaaaaaggtagtatttttctcagaattctttacataaaagtgcacaaccgtaaatgactcgccactattctcctttcgctgttccaagccaattaactcagtcccggggacaccgccaattattttggcgctttggcaaacattgactcactttgacctcattaaaatgtttttttcctgtaatagtgtgaataacaacatttttctgtgctttaggagattcagtttctgttgccaatgcttatggcacttttataattgccactaatttgggtgataaaagggcctttgattggatttgccattgctttcggttttcgcatggttcattaaactcttccccaattgttttgccatcgaattgccaaaattaaattggcacaatttcttcctttctccgcctttcttcctttgcccggagattcccttttctccccctttctctcataataatgttcggccatttttaatctctgtttttggcacggattactcacgcgcgaccgcctgggccctttcttcggttgtccgatgcctttccttataaatattggattatccccggagggggcggggggcgtcggtcggcgggtgttaagcggcggcagtgccattggcgctgtcccctcccccgcgtcaaatgcattcattcgttctgtccccccc

SEQ ID NO: 3993 - DNA, 4793 bp, Heterodera glycines
  unsure (1)..(4793): unsure at all n locations
gggggtgccgaaaaagtagggagaatcggcgagagatgtaaacgcggtacccaaaaaggtggggcgggcgggggtacgctataaacaaaatgaaagagtaaatgaaaataaaaggaatgttttcagactaacgccgaacttggccaactacgaccccgtgctgaatgagtagacggacacttaacacaataaatctgtgtgttctcttaattggctgaaggtacttcttcgaccggcaccctggtgtgtttggccaagtgctcaattactacagaaccggcaaattgcactatccgctcgacgtgtgcggaccgttgtatgaggaggaattgaaagtgagcgaagaatggccaacaaaaaaaagcaatatttgacattttaagtattggggcattgacccgaacgaatgcgaaccatgttgttggtaaacagaagcaattgagtaattaatgatcatcagcaaaaccaaacaggatgacattcacgcaacatcgggacacacaagaagtgttgcaaacgctggacaaattggagttggacgacgaagcgatgcgtaacgaagtgggacaaaataagggggaggcgaggggggaagtgatcgaattgatcagacaaatgcagggggcagacatcggtcatcaacaacaacagatggctcgataatgattagaccggtcgggccaattcaccattttcgaaaagggttgggtagtcagcatgaccgcccatcggcaggggggagagggtgattgattgaactgattggtaccagggccggagggacggtcggactgatcagccaattcaggaagaactttacaagcgcttcggtttcgaggaacagtacaaaaacaaagagttgaactgttggcagaggacgaagccgaaactgtggcgaatgtttgacgagccgagctcatcgacaggggcaaaagtgaggccaaccgctaaactcgggagcaattgttggcattggctcagattgtggccgtcatttcggtgttctttctgatctgtgccattctcgtgttttgcctcaaaacgcaccccggcttaagaggtgggcggagggggggggctgaaaataattaattattttaaatgtttattatttaagattatatgtcattcattaattttctttgcagtggccgacttggaagagattggccctctgctgaaccattcgctgtttatgaatcattccgccgccaaaaggccggccgaccctccgccccctcccacaaaacccttcttcaaatatcgcacggagtccatcggagtggacaaacgcaactcaaaaccgcacccgagcttcttggcaagtcaaaacattatttacgaaatgccaatgtgacaatggatcgttggaatcctttttttagataattgaaacgatttgcaatgtttggttcaccatcgagattataatcaggtggggttgggttgggatcgactcgagactgaaccgttactcttgggcattggccaatcgctcgttttgccatttctgtccgtccttctcccttaggttcgtcgcgtgtccgtcaaaggtcgactatttcaaggcccccgtgaacatcatcgacttggtcgccactctcaccttttacatcgatttgcttctcacaacgcgtttcggtgccaccgccgacctcgagttcttctccatcattcgcattgttttgcctccatccctttcttaaactgctcatcgtcaccctttcccttaagcttcgtctgttcaaactcacccaacactctcaaggcctcaaaatccttctctacacgttcaggtgacaatggcattgtgggaactgtcgtcttcttctccccttttggcattccttccaaattggccaatttcctttccctgcagggcatcggccaaagaattaatgctgctggtctttttccttctgctcggaattgttgtattcgcttccttaatttattacgccgaacggatggaagacaatccggagaatcaggtgaagaagcacaacaaccgaatcgaccatgtcggatgaatttccggcttacagaaacctcgaaaaccctaaatcgacattttcatgacccgaaatcattcagagtaccaatccattaacaaatttacagttccattccattcccctcggcctatggtacgccattgtcacgatgaccacgataggatacggtaagagcaagagagtcttggtactgtatacaaacataatttctttgacttccctaggcgatatgacaccacacacgtggatgggacggctgatcggtctttggtctttgttttaatttacaattttggtttaattaggctcaatttgtgcattggccggagtgctgacaattgctcttcctgtgccggtcattgtctcaaactttgccatgtaaattttcacggcatttttttttaaatttcaattatgatttttcctccaaatatcataaggtattattcacacactcaagccagaagtaaaatgccgagaagacggcgcggagtgttaagcatggaccaagtaaggccaaatgagcggtaattggcagtaattagtgttaattaatcggggactatcccgccagataaacaagcaacagccccccgggggccatcccaaccggcgttttttgctttcgaacttcaattcgaacgcgacttccaatttgtgtgccgacggttcttctctactgaccatggccaataacatcgcggctgccgcgcattctaaccacgacacaattggaggagggggagagtccaagaaatgtgccggggcaccgaacgccggtggccatggccatcgaataccctcgccgattccaaaaaagggtcggaacaattaccgactaatcgctattaattgctattttaaaaaacatctcaaatttgttacagatggttcttttcgtatgcgatcactttcccctaaaatgaatggcccacaaaaaagtgccgaaaccgtcgaggaagagaatttagcaagatcaaacaaaaggacaacaattgttgacccgactttcattggtggacgggcaacgacagcgcaaatttgaattgaaaacgaacggtttaagaaatcaaattggacattcatttaagtgctaacaaattgtgaatacaataacaattattgtgatttcgtatctttgaaatgataagatttttatgctcttactgttaaagtaatttgtcaattttcactgtataaaaatgacggtcagggtcgttttcgtaccgccgttttcgtacggggacgttttcgtacgagttcttgtacaagcaagcgtcagattcaaatagaaaaacttaagaactaataaaaccaaaatttatcattttttgtttcccattcataaaattttgtagaaaattcataactttaacaaaaataacaaaatccgggacaaactaggtcgcatctcataattttggaaaataccagcgaggaaattgttaaggttttcgggattgacattggcataattttgatcattttgggggacaatattgttattgatatcgttatagcgttggacgagacgaagaatccgtgcgtcggcatcgagatacttctttttctgtgcaccaatttatcattatttagttttgttttaattacttgctgctggttcattttgtagttaataaaagcttaactgtcaaaacattaaaagtaattaaaaaaaattaacaaattatttgaatgcaatttttttttgcatatccactcgtacgaaaatggcggtacgaaaatggcggtacgaaaacggcggtacgaaaacggcggtacgaaaacgtcctggcccgtaaaaatgaattttcttcttttttaatttttaaaataaaattttaattgaatttggcgtttctttaaattataaatagagaccggatttttatgtgctaaaaatcctgaaatatgtaataaaatatgtgctaaaaaatgctgaaatatgtgctaaaaacccccaaaaatgccaaaatatgtgctaaaatatgtgttaaaaattgaaaaaataagtgtgtttttgcataaaaattcccaaaaatctcattctttatcatttttagcccatacaacgcaaatcaaatacatttcgaagtgtttggggtaaaattgtctttttttgataaatcatttctataaattgaaagttccagcagagaacttcgaaatccaatgacgaattaatgaattcgagatttcattagtttctacaatcgaagaaaaattttttaatttgaaaattatgttaataattaggaaaaaagtcgatttttaggggtgtatttttcaattttcttgtatttttattgcaatttttctcaaaaatgccaaaatatgtgccaaaccccaaaatatgtgctaacatattttatgtgacaaaacgccaaaatatgtgtttttataagtcgctctaaatcaaaaattgttcggagataatgctatttttgggcttctctcgccataactaagccgcaaaaaaaatatgtaaaaacataaaaatccggtctctaattataaaagtaaacggcgtttacgtttatctaacggttgattaggcaaatttaggtacttcacttcatttgatttgactaatttcctttatttgttttgacaatttacttaggtatttgttttatttgattttaccaataatttgctattttcggcacctcaactntatccatggcactgttttcgccttcatcgtctgacaatttttcttcacacgtccctttgctaacattcgtccaaaattacnntcattctgttcattttggc

SEQ ID NO: 3994 - DNA, 1336 bp, Heterodera glycines
  unsure (1)..(1336): unsure at all n locations
atgaaaagcgatntatgacggcttctgactntattcgaaagttattactgttgacctcgctttttgttagtttaattcgaacgtttagatatcttggactttacacggaagaaaattataatagagaaacggttcgtcttttggcgagtgcggctgacacggcaaaggacggattgatttcatacgaggaattcagtgcttttgaaggtggttttgccggaacgactcaatttccatatttttaattgaaatcggttttaattgttcgttttagccagtctctgtgccccagatgctttgtaccttactgcctttgaaatttttgacaataatgcgtccgaatcaattactgccgatgaatttgagaaggtggaatttgttttgtttgtatttgcaattgaattctcaggtcatccgccacacaacccctctggtcgaattggattttgattttaacagcgaatttatcaagaaatatttcggcgcgttagttcttatgtttttcccaattcattaattaatttctttttgatttagcaaaaagcagcgctccattggttaccacgctttctgtcaattgcttcacgacttttacgaagaacaaggattacaagcatttaaaaagtaagacttgcagaatttaatttctgagttaatttcatattcagatttgacacgcaaaatgatgggagtattacagccactgacttttttcaacttatgacaacggtcaaaggccatttgctgacggatttttcgagaaacaatttgattgccgttgctggaggcacttcaagtgcgcataaagtgagaacctccgaaaaccgtgcatttgtactcatgcatattccattttctgtgcctttaattgagtgtctttttaggtgcgttttcccttttaccaagcattcaattcgctgttggccaaaatggaactgatcaaacgcgtttatcagagcattgcccgcgggaacattgacctgaaagtgactcgtgaagagtttttgcaggtgttttagcactccatttggtcatttatttataattagtaaaacaatccttttttgaaccatttttaggctacgcaatcctacgctcaaataacgccttatgaggtgagctattgcaattcaaatttgatgctaatcacaagtaaaccttattgtttgcaggtcgaaatactcttccacttggccgagctcaatcacccgggccatcggacagtcgatttgaccgacttggacaaaattgaccctgaacggctgaagcgcgtttcgcatatgatccggtaagagcaacagagaacgcaactaaacaaaccaattctgttgttgcc

SEQ ID NO: 3995 - DNA, 1216 bp, Heterodera glycines
ttttagatttcgatcgttccgctcagtccgaatgccgtcgttattttgatcggcccgaaaattcacagatcaatttgatcggtcgtagtaaagggtagggtactaatagtttggttttgttcttttgactggccattctcccctttcagaaagtccactcatcgttcgctgataaaccccgactgggacttccaacagatgggcattggcgggttggacaaggaattctcttccatttttcgacgcgccttcgcttctcgcgtttttccgcccgaattcatcgaacaattgggtgatttgtccttttgctgtttcgtatgtaactgtgctgcttccagcgatgaagcatgtccgtggcattcttctctacggacccccggggacgggcaaaacgctaatcgcgcgacagatcggcaaaatgctcaacgcacgcgaaccgaaaattgtcaatggccctgaaattctgaacaagtccgaccgaaactgatggcatttgtaaatgtttttcttgaagatatgtcggcgaatcggaggcgaacatgcgcaaattgttctccgacgctgaggaggaatggcgccggtgcgggcccaactcgggactgcacataatcatttttgacgaaattgacgccatctgcaaacagagagggtccatggtaaataatgcagggctattcggttgtaacgttcattcaatgatttttggtgtaaatttcttaggctggatcatcgactggagtccatgatacggtggtcaaccaactgctgaccaaaatggacggggtggagcagctgaacaacatcctcgtcattggaatgaccaatcggaaagacatgatcgacgaagcgttgctgagaccgggacggatggaagtgcaattggaaatatcattgccagatgagtacgggcgcgtccaaattctgaagatacacacggcacggatgaggtgagaagagaaagcatagagaaaacgagagagagaaaaggggagaagttgtagacagagagagagagaggaagggaagagggaaaaagaagagaatgccaacaatccattcccattaaattaagagaatataacaaattggacaccggcgtgaacgttgaggacatcgcaaagaggaccaagaacttctcgggtgccgagttggaagggttagtccgtgccgcccaatcgtccgcaatgaaccgattggttaaacccgggggcaaagt

SEQ ID NO: 3996 - DNA, 5581 bp, Heterodera glycines
  unsure (1)..(5581): unsure at all n locations
gatacacgattgattatcgatttaatgagcttaaacattactannataanttaacaatattaataattcnaaaggaaaatatcgcgcatttttcaaaataaaaacgtctaacattattttgaaaacatggaatagtggtcataggtaatttaaaaatcatcaaaaatattgtaattgtgataaaaactgcataaggaaataaaaagtcatgttcatacaaaataaaaataaaacagagaaactaagccaaattttttattattctctgtgtttattgtggagctttacaaatataaaaatacagaaagctactttaatataaataagtgaatggccttctatctgaagattgattcggcttagaacccatttttataaattaaaaatagttattacaaaaattctaaaaaacatacaaatggaaataaaaaataaatatatattatatgaaattgaaattaaacgactacatttgtcttggatatcacatcagttgtaaataaaacagccgatgccttgcaagataaaaacctaataaaacaagttaattaattctaaatgcctctggatacgtgtgtaaaactaaaacatcaaaaaattcttataggaatataatcgccatttgagataacttaaactatttctaaaagtgactaccgactaaataatattatgccaagcagcgacttgatttcctaatgagaaaatttggaaaattccaaaattcgaaaacataattctaaataaaaaagttaaaatttaaattaattatactgtcagaatttgccgaaaagtgctaatctatttatttagcaaaaattgtaaaatttagaataaaaataataaattaattcaaatataaatgagaatataaaatttggttcctacgaaccggcgcacaaagcttctcgcgtaaaatgatcgtcgcgacttggccgtgtaaatactataattattaatttatatacaaaagaaaactttattctacagttttcgtttaatccataaaaagataaaagttattaaatttaaaagtcataaatttaacaataattttttttaaggttaaatcttatttttttttattttagctgacggtttcggccaataactaataaaataataacctgatcgattgtgttttttaattaatattctagatgaaaaccatgaaaataaaaagaaaaaactgaaatttattttgaacaaaattaataaaataaaaaattcataaatataaataacaaagctttgtataaaaatttattggctctacttcagtttatgcgtccaatcgacttttatgcgtccaatcacgttttatgcgtccaatctcattttatgcgtccaatcaaagttttatgcgtccaatcattttttatgcatccaataacatttaccatgtgaaaattattatcccttgccagtttttgtaaaaaaaatcttttacactacacgggataattgcgtctcatttcttccaaaatatgctgatatattttggaatttccgtgaaatcgtctgaacatatactgatacaaatatgtcggcaacatatcctcatttgagccacgcaaatggcgaagagatgtcttcagagacccccacgtagcctcaatgccttgggtatgcacttgtctgtcatgagggtcgacaataccgactaatggaaaaaggcagcggctgcccataaaaagtgtggcaaaatttttgactcatgaaagcataaaacctttattttggcaaaaaaacataatttgatacataaaaaatgattggacgcataaaaagcgattggacgcatgaaatgagattggacgcataaaactttgattggacgcacaaaactttgattggacgcataaaaagcgattggacgcataaaagtcgattggacgcataaaaaacgattggacgcataaactgagattggacgcataaaacgtgattggacgcataaaagtcgattggacgcataaaaaacgattggacacataaactgaagtagagccaaaagttatagcccaaaaaaacgacacggcgcccaactgacatagaccgcttcctcacttttcattttaaatgtatgttagaagttgcctgtaaactagagagtacccaactttttaagtagcgccaaaattcattatttaaactctggctgaaaaaatcgaacgttacgacgacatgtcaaaggcgatgaagaaggtgggcgaacagaggtcgaaggcacgacttaattgctgccaaaatgtgtttacgttttgtttttttcagctggtcgaaatggacgccaagttggacgaagaagagctcaatttgttgttcactggatacagaaaggcgattaaaattcttcagaaccagttgctcaaaaagtaaaagtgaagtcatcaaattggccaagaagatcgtcaaaaacgattttgaaaagaagtgccgcgagatgttggtcggtgccattttccaagcatttattcgtcagcttaaaatgacggtaaaaaacgatcaaacaaatttttggattgtaaagtcttcccattttagatctccagaaggcaaagcagtcgtacgaggaggcgtgggacattgctcagcagaagatccggccatcgcatccgattcgcgttggagtggcgctcaattttgccgttttcctccacgaattcatgaaagggtcgcaaattggctcaaaaggtggtggacggagccgaacaaaactcattttaatcaccaatttattaacatatcccaattttttgcaggctcatgacgacggaaatgctgatctgctggcggagacgacctgcgattcgttcgaagtgtcaatggaaatcctcgagaaaattaacgcgaaattgaacgaatgggcccgtaaacagtaggataattgcgtcccatgtcacatatgtacaaatattgtaaatattaggcatttgtatcccatgtctgtgtatattgtattgttgtggaatcacgctgatatgtaaatgtttgcctattatatatgtatgtacagattcgttgttcattaattcgttcagttgttaataaatgaaaaagaaaattgggtattttacggttatctgtacccagattttgagaaaaaaaatttagaataaacttgttttagggatttttaagaccgacaaaaccgattctggcacctattttggcccgattcgaactccgaacccggattcgaacaaaaaagtcaaaaaccattttccagaaaaatcacatttgatgcacaaaatttttaaacaaagactatgacaggaatagaataaattattcattagaacatattaaaagaatcggtaattctgtcgatggtactaccccacctcccttatgaaagtttttttttcaaaagtcatgagaacaagtttccaagggttttcgggctcgctggacatgaatccggcatcaatttcgaccaattcgggatccctgaaccgaaatggagattgaactgaaattttatttctgtctttgacacttttctggaaaatttgtgacaaaagtgcccttatttatcacaatcacaacaatatacaatttatatatatttacaatggttgtgacatacataattggaatatacaattgtaatattatccatctgatcggtcggtcttcttctcaacatctccttgctttgctgccctatttcgtctcggcatgtttggggttcaccggcttccacagctccaagttcttcttcatttgaatgataatgttcttgctgtcgatgtgcgtcgcagggattgccttcgcgctcttaagagcctgaacaaaggaaatttcactgtgaataaattaagttgtgagcccaaaactcactcgttccgtcatttgaatcgcttggtccacgtctttcaggagctggtggtagaacacggacatgttgagtgcgacagcaagacgagtcgggtcggacggggtcagctgcgctgcgtgttctgccgcttggttgtaggactgcttcgcctcttcgatggcggctgaaatgaaaaaatggcgaattatttgttagcaacatcaaaacaaattccctactcgttctgtcctcgcccagcgcaatttcggaaatgtagcggttgtagtcgcccttcatcttgaggtagaacaccttggcctccaggttggtcgtcgcatttggaatcagagttgagtcgaggaactcctgaaaagcgatggtatttggattgatatcaaaaatgaaggcacgaaacggaccaaaactccacggcaattgacaagcagctcagattccaactcctcgcgatacgtctctatgacctggaaaatgaaaacagttaaaacactaaaaaaagaatggttgagaagcaccagcagatgcgaattgctccgttgcgcctccgttatgtccgaaaaagagcgttgttcgatggcgcagagggcacgccacggctgacgaatcgacgacatcgcgcctttgaaagccacccacagcaaatagcgctcctcgtaggacaattcggggcaaatgctgaccaactgaaaaggaaggaaaagcattagaagctgctgaatgtatccaaaattgtcacctttttcactgcgtcgaccatttcgttgaagcactccgacgtgtcgcacagattgatgagaaacaacagctcttccttcgtctcggccgccatttgagaattgagttgcgaatgtttcgttttgtcggaagcatcgccttttatatcccatttttcttctaaaacacaattttttctcaccgtgttttgtcggtgcgaattgtgtttatataaaaagcaaattttgtgtaccgccaaagcatttttactgttcattttactctttattttttgaattaattgttttcatgtttattaacagttaaatatttaatacatttccaatatttttttagcatttccaacagcaaatattgagccttgtttgtatgacaaaatgaacttttaccaaaattttcaaaatgtaagtaaaaaacgtttcaaattcagtaatgggattttagtaattttctccgttttcatgggtgggatttggtcaaatttttatgtcgaatggttcgggtttgttcgcctttgtccaatgccattatttttctctatacttttttcaaatttaagcgccatttgaccaacagtgagctgatcgaccaatcgttgatgcaaattctggacattgcgacgccacagagcaacttcaacgacccgttagttttgagaaatttttggacggtcaaaataaaaatgaaaattttccaactaatttgttttcccatgactgaagccgtttatgcttttcctccccctttccaggctctacaaacgctttcgcattgtctattcgcgcgactttctcattcgctgctcgtcgtctccgtacgctttgcttccgccgaaagacattcgcaaaattgtcactgaaatgggggacattgtcgcgcactttcctcgccgtcgtccgtgcatcagatattagacgaattggcccttcatcagttgaaatgatcagtcagcggaacagttggaaaggaatgacccattcaatcattgtgttttaagtgatcttt

SEQ ID NO: 3997 - DNA, 3640 bp, Heterodera glycines
ttgaatcgcttgtccacgtctttcaggagctgtggtagaacacggacatgttgagtgcgacagcaagacgagtcgggtcggacggggtcagctgcgctgcgtgttctgccgcttggttgtaggactgcttcgcctcttcgatggcggctgaaatgaaaaaatggcgaattatttgttagcaacatcaaaacaaattccctactcgttctgtcctcgcccagcgcaatttcggaaatgtagcggctgtagtcgcccttcatcttgaggtagaacaccttggcctccaggttggtcgtcgcatttggaatcagagttgagtcgaggaactcctgaaaagcgatggtatttggattgatatctaaaatgaaggcacgaaacggaccaaaactccacggcaattgacaagcagctcagattccaactcctcgcgataggacttgaacccctgaaaatgaaaagataaaacactaaaaaaaatgtgttgcgcaccagccgttgcccctcagtatccgaatagaagcgttgttcgatggcgcagagggcacgccacggctgacgaaatcgcacctttgaaagccacccacagcaactcttttgttataagacaattcggagcaaatgctgaccaactgaaaaggaaggaaaagcattagaagctgctgaatgtatccaaaatcaaattgtcacctttttcactgcgtcgaccatgtcgttgaagcgttccaatttttcataagcatagatttaatttaatttatcgagcaaaccaaaggcacatgagtgctcttatatggtgccaaaaaagaaaacaacaaataaatttgatcaaaataaaaatacaaaatgaataccgtactaaaaatgaataaaaataattcaatcaaatgttaaaaattcacaggtgataaaaatatagtgtaaatatggcaacatggaaaatcctactcagaactcattgcttttagtaaacccctgaattcctttgccttattaatttgcaccgctaccactggaagattattccagctttttactattctattgaaaaaattattttgagttttggccgtgtggcgggcgctttacccgtaaaagtaaaggcctcctgggcctttctgagaaaaagaaacttttcccagcatcgaggctggtgaaccctttgattattttaaaagctgttgttaaatcattgatttttcttctttcttctaatttgtgtaaacccgtgatttttagtctttttgttagttatgagtagggcagcaacttttagtgatttaactattttttttgctcgattgttttgaagaaaggagctcaaaaaacgcatttctgcgttgaaatttttcgatttggatctcactatcgatcactagaaatcactattttcacgcttcgtcactaaaatagtgaaaattcactattttggcgttttgtcactattttttaactatttcgacatttttcagagattttattagcaaaaatgcaataaaatcaaaaaatacacccctaagaatcgatctaaaaaaatttcaaaaaaatacacccctaagaatcgaccaaaaattttttttaaatacaccactaagaattggaaaattttttcaaaaattctccccaaaaatttttttcttgacaaaatttttgatttaaaaaatgtcaatatttgctaagagaattttataaaggaaatgtagctcatttgcaactgcaaccagtgaataaaaattatttttgctcaatttttggctgaaaattatgtcactattcgtcactatttcggactttttgtcactattttgggatttttactcactattttagttaactatttcgggatttttcgtcactaaaagttgctgccctagttatgagctcgcaaaagtgtattttaagatgtgattccttgtattagcaagtaaaaaaatgtccgagaatttccgaatttttaaccaaaaaaatgtcgtaaatcggaattattattttttttgttgtaaagctgagcccataaaatattatattaattagcaataaatgtgtgaaatgaaacaacaataagcggaataaattttatgaacaaattggtataaagaaaagcacccaatgcgccaataataaacggacgaacaaattggacgctttctctgttgtcgctgcagaagtggcagaggataaagctgccgccggtggcaaacccccgagcaaatcgatcacgcggatttgcttaatggtggacagcaacagctggtaacggtcggcacgctccaaaagaaaggtgagctccaactcgtgcacaaagggagcacataactaagaaaaaatgagacggcgatgactttttgctagagtcaagaaagttggcatattaagctaaaaaatttcttttctgccccctcctctctctctcctactctcttgtcgcccccgctctctcttctctctatgtgtcaatctgtggcgcttcgacttctcctctctcctcctctctcactctttgtctcctcctctgtctctatctcttcactcggaacccgtcagttgggcccccatacgtttgggccccagcatgtttttccactatagctttttttctttggcatccaaatccaacaatcttggtatcattcgaaagcccttcacatgctctattagcttacaaaaagcgaaaagattttcaagcctggaaaaaatttattagaaaaaatttcaaaaattttgacttatttgcaattttcatgtataacctttttggtaattgtctaaccgcgaagcaataccttagaaaaagcttctaaacatgttaagcttttgaatgataccaagtttataggatttggatgacaaaggaaaaagttatagaaagttatagtggaaaaatatgctggggcccaaacgtgggggcccaactgacgtagaccgatctcttttcactccatatgtctacttatcttttgctcttccattttctcctctctctctcttctctctatctgtctaatctcttgctctcccactttccctcgtcctcctcgtttctctctttctctgcctccctctctacactctactctctcaccttttcccatttgcccgagtgccattttggccttttgttcccattgtcattttgttgctttgaattcgttatcattttctccgccggctccatgccaaaccattgaatttgcattagcagcacttcctccttggcgaaatgttcaaggagaacaactcggcattttttgctctatttaagcaaaaaataagaaataacacaattaatcattgggcacttttctcacctcgggcagcactctctcaagtgcgaattggactcgcgcggccaaatccttcgcgtgcgacgtgctttggctgatcagtccgcttgtttccaacacggcctttggcacatttttgcggatcagatccaattctgggtaccgtacattttttggcctgtattcactttatccagcagaggccccaaaacagaaaaaaacttccggccggaggggtgggaaacccgaagactttttttgttttttataaaaaaaatttccagtttaatttataattcggacagggggaggaatgaattaccgaccccttccctgatttcgggactactgtaccttac

SEQ ID NO: 3998 - DNA, 4348 bp, Heterodera glycines
atgcgaaggcgccaaattcgccaaccaatgggccaatgggaaatgaatgtataaaaagggaaacgttggattaaacagaccttagaaaagatttgatttaccagacaaacttcagaactgatctcaccaattttatgctattatttaaatcttcggattccatttttgacatcattttgaatattgtcagtcgcgctcaattcctgtcagttcgcccaccacatcccatcatacaatatcatatttttttattatatcttttattttttgatcgtacaaatttgtgaaagagagtccattgattagatttaaaaagcgactttttgaattgtgaattcttagttcgaaatagttttttttatcgcagtcgtggaatgtacctaattgtgcctttccttgtattcgctagtgtttgtttttctcaattggccgtcaaaataacagaaataaaagatgattttttctactgttattcaattcattcatcaattttgccattgtatttgtcaaaatgacagaaatttaatttacctctcctttaaatgatattttgattaactgataaattgtttagttattttactgccatgcacaacatactcaaaaggttctttgcgaatgtttcgccttcgcttttaaagaagcccctcaacgacccatttccgattgctgcgtggcgctcgcacccggccaacatggccaaaggtgtgaagttcgatcacgacaacgcgttcgtgcgattctgccgctactatctatggcattactgttggagtgggcgtcagtacggtgggtggactcaacaattgccgaggctgttaacttcaaagcattgagtcaatccgttcacaggtcttcaattctacgaccaggcattcgaaccgcatcccgtagtccaagaggcactgcgccggctccgtcttaaggacccctaccaggtggggatagagaacccaattttatttggtaattcaattcagtacgaccttcgtctgcagcgtattcttttggccagtcaattgggctcaaagaatgagcgactgccgaagaacatgtggacaaaatgggacgacgagacattctatctgaacccgtattttaacgaaattgaggaggaaaagctggagcgtgaagccagcacgggcatgaagccgggataccaactcaaagagcagatttaggggacaggttgcgttttacacatttttaagtgtaatcgttcgtgcaattttgtgtgatgtgaaaagggctgcctttaatactccgaaatttttccgcggggctttttctcatttactaatcgaattaaaattgtatatatttttagacattgtgttgtgaacgattaggcgcggaggaaaagcacattgcgtttgttggtactgtggccggagagaaattgattgatgagtgattgttcacaacttttaggacgacatgtgttatgttcatttaacgtgaagtaataaaaccattattatccgagtcgattaattgttgttaagtaatctttgcttatcaccattttggttctccgtttattcgctttaaatggtttccgttcaccgctaatgtaagaaaacctaaaagtgaaagggtttgttggtttaataattaataaatttttcgtgtttgattaagtctcgattgttgacttgactaaaaacaaaatttcattctttagctatacataaatataattttattgtgtcaatttgaaaaatgtcaaatcgtaaaaggatgggaatgttcgaccatgccaaatattctaagccggttcttcgcagcattactgagcctgtccaaagggcggtcggttcttttcgtttccgtcattttttgtttcctcttgtgacttggtaaaggtcaaacgcgacatcaacaaactgttggactatggcgcggcgtcggtgcgcttccgccagcccgaaaaatttgattcggaagtgagcgtggtggaggacagctttgagcagcagcagcaactggaagaggaggaggaagcggagagagaggcgaagcagcagcagtgccggaagaagttttgtccggaaattatcgacttggacaaggcgagactattggttgacaacgggcggactattctaacagtttgtcataattcacttccttaagccgcccatcgtttgggcctcttccttgcgcccgcccgaaaaatcgttcgccttgggccgtgacccgtcattcgctgcggttcgggacgcgctgctgagagcggcccctgcccgggggagagagtcgccgaaaatgggcgctgaattcgtcaaacggcacggagaaaaagctaacaaccgaacattacacgaattgcagcgtctcgccatgcttctcaaccccggccctgagaacaaacagtgcactcccatccagcggtgcagtgacgttgcggtgtcggcgaggccccagttccccagcaaatgtccgttggatcggctcgccactcgtctgatggattcattccccaccataacgctaaagtagcgagtccttctaaccacattttcaagtgtaaaatctgtttttcccagaaacaatgaaccgcttactctcactgatgccactttttccatggccaaacgggcactgctggcggcgcaggagcgccattcgttgggagtgaataacacacgcggggactctttggcctccgaagctcccatcgaattggtgtgtattgtctattaatacattcaattgctttaccttctcacaatcaacaaaatttcagaacccgcttagatcgatcagtgaccaaaccatgtgctttttccgcgcatcggaggacgaagcggcgaattattcggatgaccaaaacggagaaatttcgatggacgagtcgccaaccgctgacatttatgtgcgtaacacaactcattaatatttataataaattgggtttaattagcaaataatgccgcgatcgtacggcgattattacgacggcatttccgccactgccgccggtcagagcagcgtcactcagtcgtcttacagcacccaaccgtacgcctctcacaacgccactccgtcgcagcccttcttcgacttcttccgtaacagcgtttccaccaccgctggactgacaatgaatgaagtccatgggtcgtacgatgacttcatcccgcgcgtctgtgacgatggaaatcagcagccccttttccgctttagcggcgtttccggcgatcggagtgacactattggctcgcccgaattcgatttctgattttgctaattgttgtattatattggcattaaattttttgagcaaattggttctgtatgtattcggagtgcttcccataggccgagttatcgttaatattttactcgaattcttctccgacggaatgttttgtttgggagaattttgccacccccccccccccccctctggcaaatgtttgtcgcgctttatttggcagcatttgtaacgaaacgatcacagtgaaaaatacaaagtgaaattgggttgaatataagcagtgaaactgattttactttcatttcctattcgctttcacatcacttttcgccgattccttcacaaaactagtcacttttaaagcaaaccaacgtgggtatttgatgtgaaggtcgtgccctccctgggcatgtatttcaatcctaaaaattacattcctgctaattgtaagaaatgaaatggcgaaaacctggcattttccaatttcttgctcatcaagctcgggtcaaggacgaaccggtccatgttaccgttgacgatcaaaacggggatcttcagtgtgtttagaacgcggtcgcatggaaaacttcctccgaggtccttgtacactctaaatgagcagatttaaaaagatttaaccgcttttttgtttcgattattttttcccttttaattcaaaaataaaaaggaatttgataaattaattgactattaggtcgaatttcaaaaattcatgtgcacacactttgctacaacatcgcaaagtccggcccattgttccttgagaaattcgttggaataatgctccaaatagggtgcctttgccgcgggcatccattggtccgtgtttcgcatgcctttcaatgagttaaagaatacgtttcctttaaataggaattccaacacctttgaatgccaagtctccccgcatgtccacttgggagccggacgaaagcagtaccatgtggctgaccaggcccttcccttggcctgccacgtgtatcgatgttctgcccccttcgctccatcccaacacaacaaacggcgtcaatttgagggtctgaaatgagggaattgcagcaaggcgaaagtaccacaataaacggaatttatggattaaacggg

SEQ ID NO: 3999 - DNA, 5334 bp, Heterodera glycines
gaaacgagtttttggatctatgatttttgacattttcttttatttcttaaaatattgctctctttattccaagaatccccttcaaaattctccgtgttttcaaatctcccgttttatttgctcctttttttgcagttacgtggagtattcgctggcccagttcctttactatgccatgaaagagggtgcgaccagtgaacaggcgtcgcggatgaccgcaatggacggggcgagcaaaaacgcaggcaaaaaatcattgattagcttggctaatagccatcccacccgaaaagggcgcttatgcggaatatttcgaacttgatgaaatgcttataaatgctgtgtcattggacctctgtttatagtctgaattcataattttagagatattgtggctaattaaaaagtaaaactctaattttattaagggaatttcagtaacaaaaaatgtaggaattttttcccctttttagaaaatccgcaaattttttattttcagtaacacataaaaataagaatttttacggcaacattatgtccggtgacgttttgagtgcactttgtttcgaaaaaaacttaactaccaaaaaaaaacttccaaaaattgctcttccgaatatttttggtcgtaattattttgaaactaacgaattattcgaaattttttgctatggaaaaagatatcccaaaacaggcccgggtcccagtttatccccagcgacggaatcgactttttaatccaatgatatcgcatttacatgcagttccgaaagttaccattttaggcaacatttgaatttttggcctaatttgcgctgagatttacccacaccggcgcctctttacgcttccctttttcaaaaagaaaaaactgaaatacaaaagaaaatgtatttcataataataaactgatttgaccaatgttaaggcgagatgattgacaaactgacgctgcaattcaatcggacgcgtcaagcggtgatcaccagggaactgatcgaaatcatttccggcgccgctgccgtttaaatgaaatattttcgcaacaaattgtgaacagatgagagaattgaataggaaaatgtcaacaaatttttgtgctggcaaacgcaccgtttttttcgttcgcattgtttaaatatcatttgtttttttgtgttttgtagacagtgagttcaaggaaaataaattgttcagttgctgaggccaggataatcattcgggatgaatttgtggtaatactggggtttgttccccccccccctttttggcaaaaatttaaaattttaaaaagtcaggtaaagcatgttttctggggttttcggggccgctgatcacgaattcggtatccatttcgcccaattccgaaccccgaactcaaattcgaacaaaaagtcgaaatttatttttcatcaaaattcaatttattgcaccaaatctattcaaatgcacgaaatcaacaacggaaagaatagattttacaattactcacgaggatagatttcaattctgagtgtaagacccagtcgcggggtctataaaattctgtgaatgattcacagtaaaatgttgataaccctggggcagcattgagatggaattgtagccccgcccaatgaatgaccatttcgtgcatttgaatagatttggtgcaataaattgaattttgatgaaaaataaattttcgactttttgttcgaatttgagttcggggttcggaattgggcgaaatggatgccggattcgtgatcagagaccccggaaaccccagaaaaaatgttttacgtgacttttaaaaatttgaaatttttgccaaaaaaggggggggaacaaaccccagtattaccaaaaatagtaaaattttaaaaagcattttttctggggtagaaaaatacgctgatcacgaatctgaactcagattttgaaaaatcattgattttgtctatggctttttatcaggtacttgattttttccaaaaaatttaagaaaattaattagcgtaaaaaactcataccagatgttgtagagcttaaaaagagctttcgaatgagctattgaatctttacagatgttaagtatttaaatcccaacttatgattaattaactaaaaataagtcttataggtaagttcgaaaatttctttatcggtacgctctcgactagtgattaacattttacggctatcttagcttcctaattgtttatgaaatgatcttttccaacaattcttcatccaattcaaaatgtctcttttgtatttcatcgttgttcgttctttttgctgttctgcgtgagttgtttttagtgtgtattgctttctgaatttgcttctttctttttcagtatttccctcctctgaatattcgtcggtcgatgccactcgaattcgcttcaggccgaaagatttgcagccggcgattataaatcagacggagttatggaaacaaagtgtgttcgcttcttttttgctttttcattccaccgttaattcacacattactttcagaattgaagcgtcacgcaatcaaccgggcaagaaaactcgccaaacttgacaaattgccaccaattccggaggtcaaggtcaagcgtgtgatcagaaatgccaagggcgagtacaacccttgcagtgttgttgataatctctgtctgaatggtggcacatgctactccgataacgaagagtgagtgcgctggcagactagaaagcttcaacaaatatatgcagttttgctcaattttttttaaagatagtcatgtcttttagggcgtcgtataatgctgcataagtcgcgttcaatcgaagtcgaaattcgtacgtcttccccagtgcgacatcgactgcacttctcctcaatatcgccctaattgataagtgacgccttggatcaactgattcaataataatatcactatttgactgactaataatttttgatagtaatttgggtcgtttttaacctttttgtatttttaaataaaataaccaaacagagccaatcataaagccccatgagggaattccgtaaagttaagctttatgcctttttccaaacattctgctaattgtaagttaaacattttcggtagattttcggatttatcacaaaggggtccttttcgagaaaatttattcgtgtagtttacaaggctaaaaacgactggcatcccttacatatattatatttcttaataatttgttttcattttacaattattgttatcaatttatttgaattgacgaaaaaaataatgatttgattgatcatttgcttttcgtgtcacatattttatttgtacactgttttgcattagaataaggacaccctgttttttgggagtttgaccacttcccatgaaccgatcgagctgaatttttaactgtacgtagaaattctgaaaatattaagattctgaaagtgagaaaccgaaatgatgacggaaaaaagttttacgattttttttcaaaattggggtgttgcattaaaataaggacacttttgaaaaccgaacaaaatctcaacaactaccaaaaagaaactgataaaataagctaaataagaaagaacaaatcttttttcacatttctgtttattttgcgaatagaaatatgtcttttaggcagagttatgttgaatttctaagttttcaggagaaattaagggccaaaaggcttaaatcgcctctaacatttgcccaaccgaatcaaactaacagcaatcagcactaagataatgtacagacatcctttaagcattttttattcattttatgccataaaaaaggcattaaacacaaaattttatggattaaacgggggaagtggcacattaaaacggtacggatgtatacttccaaactgactgacctccatcagtttcaagcacgcaaattctgttcagttcgccgtccgccgggcaaaacccaacacttttcaagtggatgaggctaaaaacagttagtttgtgatcactgatcagcgacgcaatgaatgttctctacccaaaacttcatctgcgttatttcaagtccctcttttcgaaagcatttgacagataatttccgattgttgaccttttgtcaaactttcgtcgcctcgtctccacaagcgcactcaaacggctgctcaacgagctaattttattatgataattgcccaaagtaaaagtaccaatatgagaaatgccggggaggtgggagatttggtgaaacggtctttagcggagaatggaggagaaagacaataggaagagagggggcaaagtaagaaaagtggaaatggatctttagaaatttgtttattttgtcacaaagcgaggaaaagtaaagaacaaatcaatgcataaacaccatttcacaatatatagattatttcctaaataacgaaagaacagttccaagcgccgtcgtcaaaagtgcgccgatggcgatactggcgatacgctcgaggcgacgaatccgccgatccatcctacgcatttgactcgctaatttgataagctcatcaatacgctcagcattgtttggcggctgtggcgggtcaattggcaaagcgatcggcggcgccacttgcggagcgattggcagaagtgcagccttcaaaatttcgatgtattaataacattttaaaagcatgctttcaattcaatttccaaaaggtttttttttgattcctttatactttctgatgaattttttgtattaggggattaccgggccaattgacaaagcaatgggcggtgccattggaggagcaatgggcggagcgattggcagagccactggtgggtcaatcggcggcgccacttgcggagcgattggcagaagtgcagccttcaaaatttcgatgtattaaataacattttaaaagcatgctttcaattcaatttccaaaacttacagatgctgcggaactgctcgaagaggttccatcgaagtaacacgtttcatacaaccagaaaaatccatccactacaatttaaaaaatagatattatagtgtaaaatattgttaaacacaatataatctgcccgttggtttataattgaaagcttttccaaaaacttaaattataaagaaattataaccaactcaatatctcctcatagtcctgcgcctctcccttgagcaaattttgtggtccagaggactttcttttttccgcgccttgatcagttaatttttgtgacatttttctaaaagaagttcttaaaattttcgctaaggacattctcaatgaacaaagcataagaaagcttgataaaaaggttattccatatagatgtgaagatggaaatgaattttgtttagattttgttttacttcgggtctg

SEQ ID NO: 4000 - DNA, 2427 bp, Heterodera glycines
  unsure (1)..(2427): unsure at all n locations
tgaaatgagcaagaaatggtggaactgacaaaaaatctctccattaagtgtcaaataaaattcggccgaactttttcactgaaatttttcgggggaaataattggccaaaattggcactgtctgagtcggctttggccaagcgcagatgagctgacaaagaaaaaggatgaatgattaagcaacacttcgcttcccaattgttcaccttctctcatttcattttgcaatatcttaaaggtcgattcgtttacattattggcacaattttgtgccaatttgcccggcgttatgattggcattggacttttttgtccatccgccgatggattccatacaaatgcttcgaacgctccatcgcctccaatttgttccgttaatttcaaaggcatcggccaattcctttaaaaaattattaactgatttaaatgaatggataaagccaccaagtcgcgtagatcaacatgaacttttggaataagaattgcactgatccgtttgggtaccacagaatgacttttgccgccaaaatgcacaaaattgtcccattgaaaaagccaaaaatgtttccgtaaatatgagaccctaaaataaataaattcattttcaaaaaatattctgcgcaaaagttcactctttgcccaatgttttagggccacgacaaaacgtctgaactttggtctgtttctttcggcaattagcccaatcatttgatggttggccaaatagcctgaaggtgaataatttccaaatataaatttaataattgatttttttttaggctattccatttgaattccctaccggctaatgatttgatcataacttcggacggcatcctttgattggccagcacttccatcatcaattccacgtcgatcggttctaacggttcgtccggcagaaattccatgtccggcacagagaccaaagaaagatcgaactcaacaccgaacagcttcagctgtatcaaatggagataggcacttggaaatttgctcaaatgccttattttggggtgctaaaaaatgccaaaatgtaaaatttgaaaatttaatttattttatttatattttaaattaaattgattttctcctcattctgtctcctaattatttttgctcactttgcaaagtcggcagtacagcgaattgtcctcacaaattcgctgttccaatggaattgccaaaacacaggtgaaagtgccggaaaatttagccttttcctccccaattgaccctttttgtggcaccacgcaaatggtgtcaatgtccgagtcggaagagcgcgtgccaagaaaatgtgagcccgaaacgacgagacgagcagtgccattggactgaaaatgagcaaatgattcatttactaattaatttccctctattaacagcagaactgtgctattgggtgggacttttcataagaacgccgccaaatggatttaaaatgattaactcttgcccagaaccaactaaatttaacattgatagattgatatatgtgttctttagtaatctgtaaaatttcaaaactttcatcaacttaccaaaaaatatatcaagtaaaactaataattataccttacaattagtcattttcgaataaatttttgtttttatataaaaaaaaattaaaaaacaattttcattattttcttcttaaaaagtgaaagatttcgttttgtaacgaaatttcgggaatttgagtgaacttataaaaagactttggcaaagaaacttttttcgagacctaatctttcgaacgtatttatgtcaaaatatttcaatcattttcaactttacccattcgtttatgacggattttaaaatatccaaagcaacgttcagtgaatccacatcacttttagggatttcatttgtgaatacggtaaactaaaaattatatattattttttattgtttacttaacattccaaaattaaccaaatatttcgattgaaaattttcgcattggtcgacgtgaatctgttgggtaatttctggaaatttaacctccaaatgagggcgtgtaagttcgaaattaaattgaacattttcttcacataattttcggtctgaagaagtaattaattaatttcaaaattgaaatggcaattcatttggcttaatttatttttaattgcttttttcattaccaattcattaattttttaaatgcttcaattgttttttctttacctttaattattttttatttctttctcattaccaataattaatttcaaaatttaaacggtaataggtttagcttaatttttaattgctttttctcattatcaattaattaattttttaattgcttttttattatcaattaattatttttaaattgcttcaattattaactattaatttctttttcatttcaattaattcatttttaattgctttctcatgaccnntgcaggc

SEQ ID NO: 4001 - DNA, 1842 bp, Heterodera glycines
  unsure (1)..(1842): unsure at all n locations
aatcataaaaaactaaaaataacaaaaaatattaaaattattttatttgaatatttattatataataattcagttaatcgctttacactaattttatgctttattctgtgctccaaatgattaccttctttgtttctcattttttctccatgctcaacactaatgagtgctaattgcttttccccaattaatttcttcagtcgggtccgcgccccacgcttttccgcgatgaattctttgacttcgtacaaatcgattttcattaaactgcccaaatgtttatggtgaaaagccatgagcataaagtgttgttcctattaacaatacagataaattatttagccctaaaaatgtctcgaatctctaaaatttctgattttttaggtagggtaaactaagtacttgaaaaacaatgggcggaccggacttgaaccggcgtctcttctggctttccggtccagtgttctaccggctcaactcccgccctctaattacccatataaatattaattaataagccatttattcattcattcgcacattgaatgcccgcatttgctcattaacatcggcacatttttcttctccgtcccaccgctggattttatactctttcattttgatcacttcttcattttttatttccctaataaaattgataaactgttgcaaaatgcacaacgcccaaattctgtgatgggcttgccccattttcgggtaaatttgagcccgaatttgtttcagcttctcttttaatgattgctgaagcgttttttgattggtgccgacagattgcggcatttgcttagtttggcactttacgaaaatgagaagcattggcaaagcaagtcgcgtccctgtgattatgtgctgctcactgcccgtcttttgctccaaatacattttgtacagcttcgactgaacggacagcgaaagggaatctaaaaaaagaagtgaaaaccatatggttgcccttatttaataaaaaaaattttaccaatttccaaaatttttgggaatttttcctccaattttatcaccaattcgtgccctactaaaagtgccaaatcccttttcgcgtttcccagcgttccttcgcttgacgacaaattacaataaactcgctgaatctctttggagagggcaattagcttaacgatggcaaggtaaatgatctgctgaaggatttttgcatcgcttgtcgtttcttggtaaattcgaattgcctcgtccggatcaaacgcaacttccacccaattgtccaccaattccatttcgtcctccttaattgttcgatattacctctttaattatgtaatttgtttacccaaaacagtccgaagtgttccttaacgaatttttgccaattttcgctgtttttccacagcgttttgtttctgagcaaaaaacttctgaatttccacaagctgaatatctgttcgattatgcttatgccactcagtgttcttttcaattcgtcatacaaaatcatttgaatggtaatttcggcatcaaattgcgatccaagcggctcttttagccgattggccgacgtaagcaaaaactccaccgaaagtgccaaaagccaaagaatcgcatgcatttctaatggcactaattgcaaatgttcttcgtcctttggcactttcaattctttcttttcccaataaatgaattccaaataaattttgatcaattctcgagcaattcggtctaaaatgagaaggcattagcaacaaatgtctaacttttcagtagtcattcattttacctntcactngttctctgtccattntccgcagttttttcatcgaaatttttctgagggcatttatgtgctta

SEQ ID NO: 4002 - DNA, 3456 bp, Heterodera glycines
aaaaagattaaatacgcgagaaataatattaaaaatagcaattaaatactaatttttagagctcgatgttttgaaaaaagcctggacctggacctgggttccatattggatccaggcccaggaaaaatccaggctcctcgagacctggaccaaggaaaagaccaaaaacatgcctggacctggacctggatttccaaattggcctagacctggatttcctggactcaggaaaatccaggtccaggaaaaattctggttaccaaaaaataatctggacctggtcctggatccagatccaggccatagtattttaaattgcaaaactctcaccaattcgcataacctccgggaattcgttctccaaaatgtacatatgttgtgcagtggtaattttgatcaacaatgcttttaccattttaatatttgtcagttcatagcacataaaatagcgaaagtgttcactcttttccaaaaactcatacaaattttcaccgctaataatattaatttttggcccagtgattaagctcgaaacgatttctgaattcttttctctgtcaatgcagtcaatgggcggttggaccttaattaattttacgctaattaatgagtgagtaccaaatgacctcaatgatgcccgacactcccttttccgccaaatgcctttcccattcgcctcttattgacgactttttgctgtattttaacatcagttcgataattgccatgccacttttgtacattaaacaaagacacgttatgtcatcgttcgtctcactttttgccactttgttaatttcgttcattcgcttttttgcttttccatttcttccaaaaattctttttcgttcattttctcgcccaattccccggcaaatgcgaacattccatcaatttttctctgcaaattccatttggccaagttcactcgcaatctcaaatttgtttcagacgaaacattgcccaattgtcgaatgaaatttttgaactggtcgattctttcatacccttaaaatgctcatagtttattctctaatttctgctgatttatttataaaacctaaattttcttccgtttcttccggtggccaattttcaccgcctttttccttttttgggcattggtgcgtcaatttcactgagtttcgaatgcctttaaattgctcatttgccactgattttcgttctgctgttatcgcttgcttctcacttttactcacttttgcccttttgttttttccactgagaacgaaatttgacgaaattaaaataataaataaaaataaaattagagagatgatttttcgatttattcgttccgaagtcattttctgaaacaaaaggcaattaattttgaaatatgataaaataaaagtgtttctattaaaataattttatcaataaaaaatcctcatattaaagcttaatcttatttcgtcagtttatcaaatttgccctaagctgtgctgattaattgaataaattcggtgttgccaaaatttgcatcactcagcctaaagttaatatattatttataaaattatttttaatttgttatataaatatatataacttagaagaataaatataaatttatataaaatataattatatttaaaatattaatcctataatttttattattttcaattttattcatttgaaattaaattctgcttgaaaaatcaaagcaatatatgtgttaatattactatccacttaacaaatatgtaaatgccatgggtaatgataaaattcttcaataaataatttgttgttggcacatttgaattggtgcttttacgtgtctattaataaaaatatttttgttggagaatttctttttgaaaattttttgacacgaattggaaagaatatcatggatttactagaaaaattaaaggggagggaccctttttgcaatttttttttgtgattccgttttatttcgtgaacgctcaggcttaagcctaagaaatcgaaaagtaccaaaaaaatgtatttttttattaccaaatacttgagacgcaaccggctcaagactcaaccgcccccagacgcaactggccctgacgcaactggtccagacgcaactggcccaacggcaactgccccaaatgcaaccggcccaacggcaactgccccaaatgcaaccggccccacgcaactggccagacgcaaccggccagaacgcaaccggcccaaacgcaaccggcccaaacgcaaccggcccgatgcaaccggcccaacggcaactgccccaaatgcaaccggccccacgcaactggcccagacgcaaccggtcagacgcaactggcccgaacgcaaccggtcagacgcaactgccccgaacgcaaccggcctgacgcaactggcccaaacgcaaccggcccgatgcaaccggcccaacggcaactgccccaaatgcaaccggccccacgcaactggcccagacgcaaccggtcagacgcaactggcccaaacgcaaccggcccgacgcaaccggcccgacgcaaccggcccgacgcaactggcccaaacgcaaccggcccgatgcaaccggcccagacgcaaccggccagacgcaactggctcaaacgcaaccggcccgacgcaactggcccaaatgataccgtccccagacgcaactggcccacgcaactggtcctgacgcaactggtccaaacgcaaccgtccccagacgcaactggcgatacgcaattggccagcagcaatgatttttgtgcctcaagctctaagcaagctttcgttattttctaagggttcccgtaagttctgatttatgtatcagtaatgttctgatttggagagtccaaatttaacaaaataaaaaatgttctgtttaccgaattctttataatttccttcagtttcaaagtcgccacttttggtttcttaaaagattgattaattttaccaagtttgagctaagttatgatttatttttagcaataaaaataaaataattaaatttaaatatttcaatcattgatacttttgtagcaccctatgtgttatacaacttttttgggcttgctttttcaatctttggccattactcatcgattttggcttcgttttcgttttccattttgtctgttggtcccccgtattcaccctcggggtgttcttcgtcctccgccccccccccccccttttttcttttttcctccaccatttctcttccctttccctctcttctcttcttttagacggtccatgtgcttggaatacacagcacaacagcagtgaatgaatgttttgcttctgcttttttgtcccttttcccatcgattagcgttcattccgtaaaatttaaaattttttgctcaattttttcaatttttgctaggtaaatttatttattttttaaggtcaaaggaaaaaaaagttgattagtgcctttagcaagggcgtaaccgagggggggggggg

SEQ ID NO: 4003 - DNA, 2407 bp, Heterodera glycines
  unsure (1)..(2407): unsure at all n locations
tatataataaattttaaaaataatttttatcgtcgcaaatgtcgttttgactgggcgccgtaaatgtcgaccaacagttaatttatgcggtgagaatgtgaactttgcgcgccttggttttttaaatatttatagaaactaaaaaataaaatgtattttttctcgccttattgatcacgaatcaaaaaaattttgtcattaaaattaattccaaaatgacagtgccgggaaaaagaataagaccatcgggtacacctcagcagttgggcgctcatgtttgggcgccagcatgtttttggctaacattattggtatcatttttaaattttttcttaataattaacttacttcaaaagccaaaaattcttttttattttttgtaaggctaatagcgtttgttaagagcttatcgaatgatgccaagaatgttggatttggatgacaaataaaaaaaagttatagtggaaaaacgtgctggcgcccaactgacaaatgagcgagtccgatactagagaccggcgcgggacggaatcccgcgcgggattttgcgggatcccagtccgcaatggatttgcgggattaatcccgcgggatcccgtcccgcaaaaaattttggattccaatcccgcagcgggatccgcaaatttgaaatttccggtctctatccgataccaccacaattttcaattttaaaaaatattctttgactcttctaaaacaaaaaaatatccatatgctttttctttcttcgtttcccattcgtcaaaccaataaaattctttccttcgtgagtccccttacaaattaatcatttatttcgcctcccccaaatttttttttctttctgatcgatcggctggtcacacatatgtaataaagagtttactttattctttgttcacacattgcttacttaatatattcttttatctttcatggttcttattcctttttttatttgtagtatttggagaaaaatggcttattttgaacggtggcatcgttttcaggcgctaagaattatttattattcttgcatgcccaccaattttataaaactggtatcattcaaaagagcttaacattgggttgcagttttgaatttaaactcattatgcggttttttacaagtcaaatgtaataaatttattttttctcattttaaaaaatgcttctcaaattaacaattagagaaaccaaatattttatttatttcagcaaaccgcaaggcaacataatttttaaaaatggtcccgtcccaaaccacggaatagttgaaatttggaaaaaaaggtattttttatagttttttgacttttttcatccttcttcagcacacattttgctttttttgcttttgtattttaatgttttttttttattagttttctggtttttagcacataaatcccatctctgctgataagttatgtattatcacttacattcatttggggaatctttttcaaattcatagggaagttgatcaatgaatgaatgaatgataataataataataattccaattgcttattcgtcaacaataaatgaaaagccccaatagtttttcggcaactccaagcagttcacggtcatcggttggcgatgaacacgaacggtgtgagtgacacctcttttgagtccgcattttctgttcgttcttgctaaattaggttctgtgtttgttggccatgttccactagaaatgaacgaattccgacttggcaacatttttagccgatcaattgggcatgttaggtgattaataatgtcatttaattttttgattcctcagttttttccagaaaagttacaattttgcgcgactttcacactggacggagtcgggaatgtgccttcattcgctttgattccgaagattttgccaaaaaagcgatgaaaattcgctatgtttacgtaagtttgtctaacctgcagaaatttttttaaataataaaattagcatttttatgacccaattacggaccatcagctgattgtcaattcttacgacgcaaaattggcgaaaagaaaagcggaggagcaaaatttgaagaaaggagcaaaaaggacgaacgatgtgtggcaaagtcctcccaattttgtgcaagtcgacgacatttcgtcaacagttgaaatggcaggaaatgaggacaaagtgccagaaaaggtgggcaaaatgcgaagcaaaaaattcaaaccgatttttcagaaatttttctattcttacatttgaatccattttgggcaaaaaatatacctttttganattttttcaactttttgttcggtttcctggatcgaatttggttggattgggtttcatattcgttgattaaacggttccccagtgccccccggaatgcttcggagaaaatttatgctttaccacgattttaaattatga

SEQ ID NO: 4004 - DNA, 1487 bp, Heterodera glycines
tgtgcctttatatttacgttctgtccgtcagtggtcaaacaaacacttttctttcttttcccccatctgtcccacaaatatgtatttttctacttttcccattgtgtgcctcatcttaatcattgttcatcatgtgttaccaatttatggtattaatcaaaatatgaattgaacataagtgaataaattgtttcagcatttgtttgatttacgttggtcgggtcggttttttattttagaaaaaacaagaaaatacctaaatgcatgtcccggcattcgaaattggtacaaaaaatatcagatttatgttcagcgactccgaaaaccattagaaataaatcacatttgcggttaataatattaccccaaccccagttacatagcttaaattagtttaaaatatacaacaccagaaaagcaaaacagacaaaatgaaaagccatcctaattttccaattagtacaaaatgaaaagccatcctaattttccaattaatattttcataaagcattaaaatgaccatgttcaaggaactgaccaaccgacaattggtcgccattgttatgttggcaatttcgaatctgtgcagcactgtggtggtcagttgcataggaccaatttacccgggcgaagctaaacgaagagggtcacttttgaattcacatgcaaaaagctaacaattacggggcttcagaatgtcagaggctcaaatcgggttggtcttcggtttgttccaattggtgatgttcatttctgcacctcttcttggcaaatacgtaaacatttttttttgatttttttgccattttactaattgaaaacaaaattcagatgcatgtgattggctctaaatggatgtgtatcgctggccttcagatagccagtttggctgcaattgcatttgggtacgttgtttcttgaattcagcagaatatctttagttgggggttctgttttgcagttgggttccttcctaatagtcatcattgtttaaaattttgaactgcttcaacttcctaaaccttatccatgctgaatgtgttgttccttccattcccatttcgtccgttacatccttcccttttcacagtactctgaattggatacatgacggcttctacttcttctgggcttctttgttcatccgtttcatcgaggcgcttggcgaggcgtgctttctgactgcgtcgttggcaatatgtgccaaatcctttcccggccgaatatccgttattgtggtgcgtgatttgaggcatttaaaagcaaatttgttcacttgtaccagaatttgattcccccttttttatggctttatggaaactgtcgcgggtttcggcttcactgtcggcccactgattggcggtgttttgtacgacaatttcggcggtttccaagtgcctttctttgtgctcggctcgctgctgttggctgccactattcttgcctattttctcatcgatgaggtcaaaggtcggcgagcaatttca

SEQ ID NO: 4005 - DNA, 3038 bp, Heterodera glycines
  unsure (1)..(3038): unsure at all n locations
gagcgagaataataaacacagcgccaacgatgagaagcaaaagttgaaaagggcacaaaacggaagggagaggaaaaagcattttatgggaggaggaagaaggacgaaatattatttattttgtgtattgcgacgaatgaaaaaaagcgcaaaaatgcccatttaagtaccctgtagatttaaaaaaagttataggtagttggcctagtacgatttggggttttcccatgcttttccactataacttttctatataaagcagcagtttttttatgcattttcatttctactgatttttaattttatttcactcccctttccccgcgctttttgcttcctcaaaaattcttgtttataataatatttagctccaattcattgtccttattattaatggcacatattcgagcgaccgcacaaaaaaacccacctgaaaaggtgaatcactcatttctatgtacatatgtaatctcgaattttctttccaaaacaggccaaatgtttatccgaactgggacctgatctccgtgacgacaaattggacgtcgacggacaaattggacgtcgtcattcgcaaccagcacgaaatgaaggagcagcagcaggcaatgaacaacaaattgaataacggattcaacatcgtcactcgcaaccagcacaagctttataagaagatggcaaaaattgagaagaaccagcaccaactgaagaagaaccagcaccaactgaagaagcagcagcaggaaatgaacaacaaattagacgtcctcatgtccatcaatcagcagcaacaacaggagcagccgcagcagaacgtggtgagttagtggcagggataaatgcattttaaattttctcccattttaagggtccaaatggagcgcgcaacttgtttgatgccttggcaaataagtgcaggaacgtgtgaaagaacatgcgatggacaaagctgtggaactcctcgccaatggattcgatgcacctacacacaaagttctccccaaaaagtgatgctcctataacctgatctattcaatgtgtatgatgctcctatacctgatctattcattgtatatgtttgtatgatgctcctataacctgatctaatcattgtgcatatttgtatatatattgttttacagtataaccgtcacttgcaatgaatattcaactcgttgtataaaatgaaaatgaattggcattctaattcgactcatttaactatgctagatctgtgtcaaaccaaatttctgataacgaaaaacaaacgcttttcaatgaaccgatcaaaactaattctttaacatttgcttagaaaaagcttcaattctagtcggttttacgcgtcccattacattttacgcgtaccatgatactttacccgtaccattatttactcgtcacaaaaacagttttttcaaaccgtcaatcgaaacattggtaattctgtcaatggtacccccccccttttttgagaaaaattatttttgttttcaaaaacatgaaaacacgttttcagggttttcggggtcgctgatcacgaatccggcatttattccgaccaatttcgaacccagacctgaattcgaaccaaagttcgaaaattaaaatttttcgaattttgtatttgtcgaaaccctaggaaacatgctttcatgtcttttgaaaacaaaaaaactttttctcaaaaaaaggngggggggggttaccatcgacagtattaccgaaactttatacctttcgaatctctaattgttcttgattgtatactttgattattanaatatgcaaaagcaaccctaagcacacttaatgatatcattagaaactaaaatttaaaaaaattacaaaaaagaaagcctaagattaagcctaaagcttangcctagtctaagcggtaggggtcagttgcgtctggccagttgcgtctggccgattgcgtctggccagttgcgtctggggccggttgcgtcttggccagttgcgtctggccagttgcgtctggcgccggttgcgtcttggccagttgcgtctggcgccggttgcgtcttggccagttgcgtcttagtgattaaagggccagttgcgtctggccagttgcgtcttagtgattaaagggccagttgcgtcttaaatatttggtaaccaaaaataccttttttgtattttttcgttttgtgaccccaaagaaattatcaaataaaaagtgatttctagggtaatttgtgatgctaatcacaaatatgacctttatttttcaaaattccgattctaaaccagaacttgaactaaaaggatcgggtgtcatgacaattcgtacaaaagtagaaaatccgaactcgaacaaaacattgatttttgataataaaaggaatggtgtgtccccccattttcgaaattttttttatagttttttctgaaataaagtgcttatgggttttggggccggagaatacagttctgactagaacccggcgcggggaacgggatcccgcgcggattttgcgggatcccagtccgcaatcccgcattttttggaaaatgcgggatttgcgggattgcgggatttgcgggattaatcccgcgggatcccgtcccgcaaagaatttagagttccaatcccgcagcggaatccgcaaatttgattttttgtgcgggattatgcgggattttattatttttttgaaaatttttctaagacagaatgccaaatatttttaaataaattaaataataaatttaattaaagttaactcatttttcatcgcaaatttcattcaaaatttgtgaaattttcccggcggcgcctatcggcaccgccgtactctcctccaagttccaaaaaagtttttgaaaaaatcgcgctgtaaaaaacatgtaaatagtcactccttttcccaaaaatgttctagaataatgaaaaatgacaaaaaaagattttgaaaaaataattgaataattttttcaagcgaatatactaaaaacatttgtgaaatacctattgcttggttaagaattaaaaaatttagcatattaaa

SEQ ID NO: 4006 - DNA, 2056 bp, Heterodera glycines
  unsure (1)..(2056): unsure at all n locations
ttacaatataaaaaatcttccaatcttttgttaacagatcagtcaaggcctggaatgcccttgataaaacgttaatgtctagctccttaaacacctttaaaaaattattagaattgactcttgattctgaaagcaccaatgtataaagaattattaacttttgaggcattttattgactttgacctcgattttattttcatataaatttttcgttattgtttaagtgccaacccatttttttgatgttttctggatggaaagatatcgatttgggtaaaaagactatgaaaaacaatacgaataaatcgcaaaatatgcgcataaaatatgcacaaaaaattgcaaaatattcacataaaaagtgaaaaatatgcacataaatttttccaaattgagggcaaattttcaaatttcttcaagttgttaaatttaagcataaaaatcccgaaaatagctaaaaatagtatgaatgattattttagaaccaaaaaagtaatatatttatttattttgaagaaaattgagcaaaaatggagaattttcaattttctgactatttttggcataaagcttcaattttttaaaaagttacctttttatcagaaaatatacccaaaaatctgatatttttgaaaaattttcggtcattagagcccaaatggccgctttaatagagggggccgtttaatagaagatttgaaaaaatgcccaaatatgcatgaaattccgaaatatgcacaaatatgcaaatacgcacataaatcgcgaaatatgcatatggaaatcaattcttcttctagaagcttctaatcaagttaaaaacatgtttttcatgcgtttcaggcctcccgcagttcaggaaaaaaatatgcatgtgcatataattaccagccctagtaataattgtgcgaataatcgaacacctaattcttcacacgttctctacgataaaaagcaaatatttcattgaagaaatttttgagcctttttgtagttctttggggaaaatcactcaaaatttctttaaatcctgctacatagcaaaaccgcaatgaaaattccaaaaattttctgaagtcgttggccaaaatcaaaatatcgagcttcgaatttgaaaaatgttcgtttctgacaaaaaaaggctttatttaaagggcgtaatcagaccttttgcttcggggggggctgaattaaaaaaatttgattttagaggttatttttcagttttcttaaatcctgaattaagggggtgtattttaccggaatttttaacggttttcgcaaaaaaaaatccctccgctcgctcgggctccccactcttgcttcgtcatcgcatgctcgctaagagggcttttttttggatttttttataaatcctagtcatatttccgtattttttttaaataaatccattttagcttttcatagataaaatcatatgatgaaaagcatagatttttgcagttttgacaccaaattcttgattaatgcataaaattaccccagaaaagtgcgtgctttcctttgttgggatcacgacatttttatgggcggggggcataacggaaaattaccaaatctcgaacatttattttctgtcgacataagcacaataatacatacatatcaatcaggaggaaattgggagtgtgttcagtatacaataagtgccgaaatgaatgcgtgggggtgaaaggacaaatggtgaattatatacaatataacgagcaaatagatcaacgtcatcgacacgatacaatataatgagcaaatagatcagcgtcctcgcggcacgtcactcggttcatcaccagcgttcagttatcggtcatggcaccgtccgattcgtcctgattgtccacgtcgacgtgcaatttgtcctgcattttgatctgattgcgcgctccatttggacccttanaatgggagaaaatttaaaatgcatttatccctgccactaactcaccacgttctgctgcggctgctccctggttgtgctgntgattgatggaccatgagggacgtctaantttgntgntcatttcctgctgctgc

SEQ ID NO: 4007 - DNA, 1351 bp, Heterodera glycines
atttgtcctgcattttgatctgattgcgcgctccatttggacccttaaaatgggagaaaatttaacatgcatttatccctgccactaactcaccacgttctgctgcggctgctcctgttgttgctgttgattgatggacatgaggacgtctaatttgttgttcatttcctgctgctgcttcttcagttggtgctggttcttctcaatttttgccatcttcttgtaaagcttgtgctggttgcgattgacgacgtccaatttgccctgaatgcgcatggcaccgtccgattcgtcctgattgtccacgtcgacgtgcaatttgtcctgcattttgatctgattgcgcgctccatttggacccttaaaatgggagaaaatttaaaatgcatttatccctgccactaactcaccacgttctgctgcggctgctcctgttgttgctgttgattgatggacatgaggacgtctaatttgttgttcatttcctgctgctgcttcttcagttggtgctggttcttctcaatttttgccatcttcttgtaaagcttgtgctggttgcgattgacgacgtccaatttgccctgaatgcgcatggcaccgtccgattcgtcctgattgtccacgtcgacgtgcaatttgtcctgcattttgatctgattgcgcgctccatttggacccttaaaatgggagaaaatttaaaatgcatttatccctgccactaactcaccacgttctgctgcggctgctcctgttgttgctgttgattgatggacatgaggacgtctaatttgttgttcatttcctgctgctgcttcttcagttggtgctggttcttctcaatttttgccatcttcttgtaaagcttgtgctggttgcgattgacgacgtccaatttgccctgaatgcgcatggcaccgtccgattcgtcctgattgtccacgtcgacgtgcaatttgtcctgcattttgatctgattgcgcgctccatttggacccttaaaatgggagaaaatttaaaatgcatttatccctgccactaactcaccacgttctgctgcggctgctcctgttgttgctgttgattgatggacatgaggacgtctaatttgttgttcatttcctgctgctgcttcttcagttggtgctggttcttctcaatttttgccatcttcttgtaaagcttgtgctggttgcgattgacgacgtccaatttgccctgaatgcgcatggcaccgtccgattcgtcctgattgtccacgtcgacgtgccatttgtcctgcattttgatctgattgcgcgctccatttggacccttaaaatggaagaaatttaaaatgcatttatccctgcca

SEQ ID NO: 4008 - DNA, 2539 bp, Heterodera glycines
aagtgataatccgtttactgtgtttgttgtttgagttttgtggtgataatttatatatgtagccagatatgctcacgacattgacaagatgtactcggatttgttccgtttgtcccacaatggagcattggatttgggatttgaccaaaatttgaaattctccattgaatttattttgttttacattgacattgaacgtcttttcaatttggtcgatcattcacttttaaatgagaaaaaaagggaattaatggaagagaaacgcaaaatgttcgtcaattttatgagcagcggacagcaaaaacattcatttgtccggaactgtgaagcttggaaattttggcacgaagtcagcagcacatttggtaaaagagtttaagcggggaaatcacaaaaagaactaattcgtaaaaagttagagaccggcggaagtttcaaatttgcggattccgctgcggcaaatgtttgcaggacgggatcccgcggggttaatcccgaaatttccaaaaaatgcaggattgcggactgggatctcgcaaaatcccgtgagggatcccgtcccgcttcccggctctaataaaaagtgcaagtttttgaacagaaaaaaattcctttgaaatttttggatgaaattaattaggttaaattttcttccatctctaattcttgcctactctcttactttcccccactctctcctctttttcagttaaacgaagtttattcaacgaaaacacaaaagaagaaatgcaaaagagaaaaatcgtcgacattaagaaaatcaattgtgaaaaaatggagaaagcattaagtcaaatgggagaagccaagcaaaaaaatgcggaaacggatttagctgaattttatttgctcgatttggaactcggccattttaatgcaattcgctttttattgggcctaaaaggaaatggagagaaatggtaaatgatcaaaaaaaatggcaattacgttttggttgttttataggaaattttctgaatttttcgatgtttaccaattgccaaaagagtccaattttgcattccaacttcggattttacacataaataatgccaaagtgaaattgactcaaatcaaaaaggaaatgaagcaattgcttgacggaaaacattggaccattctcgaattcgaggctctcacttatttggccccgggtttgttatgaaaagtattgacagaggcattttataaatcctttaaaaaaactaggtagggtcaaaggtcgatttattaattgaagttttcgtttttcgggtccccggctttgtctttggctcagaagcgccgcttttcggtttaagttaaaagaccgtgacgaaccctaataaaaaaacgaaaaaatgaaagcaattaaaagcatttttaattttatttaaatttatattattattattttctttcgttctttagaactattagatgagcaatcacttgcaatgaaatatttaccaattatttcaatggggcacaacgaaatatttacagttgttgaggcaggcgtaagaatttattttggaagaatttggaaaatttttttggcattcaaaaggcaagaaaaagactccgttcaaagaagtgattgggcagcgattagcaaaaaattggaaaacaaattaaaaatatttttcggagaacaagtgaaaaaacattcgttgtcattttcccacaaaatttggttagatttggccaaaatgtacaacgaaacttttgcgttgaatgaaaatgaaaaaatggcaataaaaaattttgatttttcaaatttggaattgattgaacaagaaatagtcgaggatcattgccaaaatatggagcaactgatcggtgggaaaaatgaattcagtgaagtcatcaaaggggcgagtaacttggccaaatttcgagtgaagcaattcattacggcgagattaaatcgggaaaatttggacgaagaaaacgaattgatggcgaaattccctgcccttgggcaaatgcttcaatttggtattttaacttaatttcattaaaattcttctatgaaacaaatccgtaccaactgcgttaattaaagcgattagtgtttaattcacttttggcgattttatttttcctccgattaaatgcaattacaatttttcctcattcagcagtcattttgccccctcccctgtttagatgatctgtcattttcgatcattgatcaataccagcgtgtgctgatgcttgagactgctctgtccggcgccgacttggacaccttcaacacaaatgtgctttattatgtatttagacaaatgttgattgaaaaagtggatgctagacaattagtcaaattaggtgcacaaaatgcgcaattgggacgaaaagtcgccgaattaatgcacgcaaatgccgacggccgattggaaggcgaggcggagaagcgcaaacaaatttgccacttggaacgctttatgaaatggtatgtgaaaaacaatgaaaaacaagacgaaagtgggtaaaaaagggacagcgacattaattcaatgctcggaagtgacga

SEQ ID NO: 4009 - DNA, 1849 bp, Heterodera glycines
attgtcttatttttgcgaaagggcgagagagagagagagatagagaggggggggggggagaaagacgaagagataaacagtcattagtcatgaatttaattaaatttcataattaaatattttatgcacttaaaagggcccaaagatagaatctgttgatgacatttggcaagcatcaaattgtgaagatgaaaaggtggcaaatgaagcagtgcaaagactgtcaaaatgccccatcattgagcaaattcatatccgacagttggccgtattttattaccaacacgagtttttttcaaattttttgcatgctaatgcctacaattttccaataatcaaaaattcaggtgctaattaaatacaatagactatccacttttataatttttgcggcctaattacccttaattatctccctatttttctcaggtttgaatttgtccgaaaacgcttctgacttttactatgaaatgattttttcgccttacaacgacgataatcaaatgtatgcagaaataatgctcgcattaagatatgccatgattcgcatttatgggctaaaggaccaaattaaggggtcgcattcggaggatttggaaagagagacaattcgaattttgatagtgttgcgaatcattgaactgtttgacgacagaatgccaaatgtgcgaatgctttgcgttgcgatgtcatttttgaaaatgataatagacaaaagaaaaaccaaacggtaatttatttccccgggaaagcttcataaatttgttcatcaaaattttaaaataaattgcattttaagtctttcgtgggacccatccgccgtggtcgctcagtgcctggagacagaagctgagccaatttttgctgaacagcgattttatatggtgccgtaccatcaggaatatttcaaacagtttttggcgttgtgcaaacgtgatgatgcactgaccacaattattcgggaaggattgtgcaaactcagcctgttgagtcggctgatcggcgacgattcgctctttaggctgtttaatttcacactaattcgcgagaaattaattgaccgaaattgtaagtggaaaatatggaatataaattaattcaacttttaatttatatatatgataattagaggtgccgagaattcattttattgcacgtaacaaaaattaacaggcatttaaatttgatttatgatttatttttaaaaaattgggaaattgcaacaaattctatacttttctctcagttttcaacaacaaaaaatttttgctgtcgcaaaattatcttggattattgatcggtcgaactgacgaagaacgacagaccaacagagtgttggccgatctgatcgtgctaacgaccaattattttgaagtcgacaaattcgggcattcggaagcgatcagaaaaattgtggattttcagtggttgcactgtcgctttttgtacgaatcggtcgttgaaaatgtcgaagagtcgcggaaaatttcgttttttgtcggcatttttataccgggtaaaaaagttaataataataaaaattgggaatttttataaaaaactcaattcatttttcgctgaatttcatgaatttagaattaataaaatttttggaagccaataaaatgttggcaaataactcaaagaaattcactaacgctttgcaagtaacggaaagagaagcggttgcggagatggacacgcaatggttcaactcgaaaaatgagtatgcaaagccaagcgaaattgtccaaaaaatgcattttgatcagctaatgatgctgcgaaatgacgaaaattttacagaaatttacaaaggtttttcattaaatattttatttgatattta

SEQ ID NO: 4010 - DNA, 2791 bp, Heterodera glycines
ggtggtggcacaaaggtcaagctaaaagcctttgtcgggcgaaaagccctgacaaatctctttaagactgcgataatgacctctcagagaattcttagggacctattaatacatgaaaattctatatttgggctgttattaagataaatttttgcgtgtgcaggacctaattattaatgaacgtttatgaggatttgcgaaaagaaggcctccgaaaaatgtattatgggcttcaaaaagtgaaaagcacacctaaagctgataagagaatacacagcaatacgaagccaaatttgaagagaaaaaagaggcggaaaatgtggaagaggaaaaagaaaatgaaaatagagaaaatggaaagaagaaaaatgatgaaaatgctaatgaaaatgatgaaaatgttaatgaaacaagggaatttttaacaggagagattgtgcccccaaaaaatgaccatggaaaagtattagctcctacagaaagttacagtaacaaattatcaggtttctaactgacaatcataattattttttacattaattcagcattatgtaaataaggctgagaattttagtcacgaaaaatcaaataaaagttgactaaaattcaaaaaaaaaaatagcaaagtaataaaatccatattttaaactattttgaatagatttataaaaatattaattttgatttgcaaaatctgataaaattgggcgattgttcaatttcgggatcttctcaacaattgtgaaaagtttctgccggatttcaattctcctttttcttttaagtcgctttaaggccatttcgagtcagcaaaaaaaccaattgacttcaattctcatccaaagtaataaaaaagaataaatgtattttttaacgtttaattaataaattatctctcgcaacatttttaaaaatttaaacaaaaagcatttcaagaactttgcaacaattcgtttctttggcaagaatataaaaatttcattttaaatgattttgatgaagaaaatatgaacatgcttacattgggtggctttataaatgaaatagaggatcgtttcaaaatggttgaaaacatcagcaaaatggaaaatttaagcgattttatgtgcaaagaaaaagcacaaaatttgctagaaaaatgggaagaatttaagaatgaaatggaccaattcaaaaaagtgaataaaaaagaatttgaaaatttggaagaaaaattatacgaaaaactgcgaaatttattgctttttatcgatggagaaggccaactgagcggacttaacgtgaaaaacaattttgcgaaggcaaatttgaaagtacaaattcatttaaaaaatattttgtgggcattaattagcgacaaaaaaatggggaaaaattggcagaaatttgacaatgagacgaagaaaatgaaattgtttaagctccttcaaactcaaatggagcaatttaaaattgaacaatcaatggagaaaatggaaaaaatgatggaacaaaatgaaattggtaattaaaatgtttatttttttaaattaaattaaattttagacaatgaattgttcgagaaaagcgcaattaaagaagacgaacaacaaaaatatttgctcactattttccccttgcattcacaacaaattaccattgtaaatcgcgattatttggtgaagaagttcaacgaaaatgtttgagatttattggattaaaattaattaattcattcattcattcattaattattgcttaatttagtttgacaattacttgacaaatgtattgtatcaaaatatttactacaaaaaggagtttgagcgtaaaagagaagctgcgcttggccaaataaatgcaattgtcgataattgggcatgttaatccgatttaattactcaattacacttaattaattgccacatttgtgccttttccagtccaataagcatgcccgactgctcatttcgggctcacttttgctcgatgtgcacacaattggctcggatgtgaatttgttttgtgtagcgcccggcgaacggctgaaactaagcgattttatgggaagcgataaaaatgggaaatgcatggaaaataaatgcaaaagcgaagaagcggacgatgcaaaatcacttttttgccaaatttgtgaggtaaaaagtgaaacattattatttgtttgggttaaatggcaaaaaataaaaataaataaatgaattaataaatgaataaatgctcgttaatcctattctatatattaaataaagctaaaaacttaatatttttaaacgaattaatatatttaataggataaaagcaccgccaatctgattaaaattgagtcagccagcattttacttattcgatttgccttcgatggcatcgaatttgacatttcattcgttgtcgtcccaaaagtgaaaactttggcacataaaatggatgacaacgaattaaaaagtttattggaacactttgattggtcggtcaacgaacaaaagcatatgctacgcagtctttcgagtaaaaaataaataaaaattttaatttttaaataaatttttacattttaacttttaaaatataaaggttttcgcgcaactctttacatcttcaatttgttttataaagaagcccagcaaaatgtaaacgaactcaatgaaagcagaaaaactttccaaaatttacttattacactgaaaatttgggccaaaagtaaatgaatataaaatttaaattataaaaatatttagtttttcttcgataaaatagtataatataccacccctccccgtcgatgagagttgaa

SEQ ID NO: 4011 - DNA, 1859 bp, Heterodera glycines
  unsure (1)..(1859): unsure at all n locations
attttactcgataaattcttcttatttatttctcgaggttnacacaaataattaatcattttaaatagaaatntaatnttgttaggtaccctcaaattccaattcaattgtcaaaaggcaatgccatttcgccaaatgccaatttgttcctgtcagatgcccgcgagttagaaatgcctgttcttactccaacttctctcgtgcaaaatgctgctcgactcgtcacacattcaaatgcaaaagtcatccgtcgccaaatgtttgatggtaaataattaaaaaattgtataaaaaatttaattaatttaatttttattttaaatatggaatttatttttaatattaaatgtttttgctaatattttgtaataataacatattacagccactaaaccaaatcagctcaatgaaaaataaacaatttgaattggacgcactgctgaaaaattcgattccattctctcaaaaagtacaaataaaattaaagaaaaatggcaaattaattcaaatttaaattttgtatttattttttcagtttggcaatttcatcgtcattaattgtgttgccgaagacaaagaagaagccgacgcattttgtgactttgttgaatggcgaatgcgcctccaaatcattttcgacattgacaaaaaggggggaggaggcattgagacgcatttgtacccaaatgtttaccaagaaaattgcattttaacacaaaaattggtgaaattttcctttcggtatgcatggattattccttaaacgaacacttttattatacctattttcccacattgaataattcaaatttgttcagggccaatcactgcaaaatttggcttctcggaatttacggaaaaaacgcaattagcgaaagaattacggcgatggcacaaagtttcgacacgaccattaaaaggcattatttcttgaagaaagttgaaaatggcaacattcgaaagatcgacgactttttcaacacaacgaaaattgaacttaagtcgataatggccaaaaaggaagaactaatttgaattttcaatgctttttgtttttatggacttgtattcttttcctagaaatgctaagctgtttactattttattgtgtataagattattatttttatatgttattatcacatatattgaccaaatttgatataaatattaccaattggcaaccatttggttgatgttgtaattgtttgtgagtaatttatgcttaaatcatttctaggccatatttgtaaaaatctaaaaattgatgttttgtgatttttaaaaacgaaaatatgatgtaaaaaagtgggactatcttatgaagttaccaatattttttttatcggccactaattaaaaattaaaaaaaaaaattttcaggacatatcaaaacatctccacattttcatttaattcagttttgaattttgtttactgacgctgttgcatgttcaatttttctaaaattttacgaaaggtgagctttggaattagggatcgactgaatgcacttttttctaatgactagggaaagcctaatatgcacgaaaacttatttttagtttttctaagaaaatttagacgcatttttggcgttttttatgctcaaaatcgcctgttcaatatataatattaaaaaattaaatgaaaattttttacattgaaaaattgaaacaacgaaaaaaaggaattttaaaatatataatttatttttcattattttaaattaaattttcactgatttcatccattttcaatccgttcatcttgtcatcgttgtattatttaattgtgataaaatatttttttaacttaaaattgttctaatgctgaacaagcattgaaatatttacaaa

SEQ ID NO: 4012 - DNA, 1044 bp, Heterodera glycines
aaatattagacaaattaaaaaaattgtttacctttccaattaacaaacaataactttcatccaaaggccaattccttaacaatcgctccagaaaattttgcaatatgtcaacgaacaaaggtttccttaaatgaaatgaaaagaaatgtgaaatttcgaaaaggaaagacaaccttaacaaaagcaatttgagtgaagcgaagtcaccgtcttccgtttcagagaacaaaaaagtgaggtaatggtcgagaataatgcgaaggacttggaactgggcaacacttggccaatctaaaacaaatgccatgcctttcaaaattttattgttctttgaaacgattttataaatgatgaatttgaagtgtcaaacttgacagagaagcgacatggcttaacattgtgccaacaaattggaggagtcgcgggtaaagcgttttgaaggcgcccgaccgaagagaaacgtgctcaagtggggcacattgggccaacacttcggggcgcagcaatctgcgcggactcgtcactgccgacgttggtaaagaggagaaaggagcagaaatccaggtagagttcttcagcaagttcagcttctgttcatcgacgggcaacagatattgcaaataatcggccaaaagccacatgtaaactggaaaaaataactgagagattgagggaaggaaaggccgtatcagcgaaccgctctcagtcgcttccttaaccgtagctggtgaacgaatgcagtgtcgactgaacagctcgatgaactcgtcaaaaagtgcatcattgacgtaaatggtctaaattaaatgcaatcagaaagaggataatacagattggttagagcagtcctttttgtggcttagaatttaccagtagatgattttgcataaaaataccataaaaacggtcgactcaaaaccaatcaatgcgttcagtcgattaagcgcatcggcatgtagagaatcgaagtgcggttttagaagaagaagatcaactgacggatcaccaagaagcgtttgaagaacagtgcgagcgaattcctcc

SEQ ID NO: 4013 - DNA, 4654 bp, Heterodera glycines
ttttttctgtttacttacacataatgatgtatattaagcatttccatcacaattatagtgaataaaaagtatattcacggtttttatccaaaaaaatttttacaaaacaaaagggtcccccccccctatggtttttgataaaattcaaaatctatcacattataactagcgccaaatttgtttaacaggcccaaataattgtcatattcgtgatcagcgacctctaaaacccccgggtacttggtttcaggactttttaaacaaaaaaaattgagcaaaaaaaagttgaaaaaattttcaacacctgtcacctttaaactagcgccaaaaaatttctttccattttacgtttattttttgcttcctatactaaaaatggtttggaaaaagacagcagacatttcgatcggtggcaaggtgccacttgcgatttatcactccaaccggtataactattaatacaatgttaaatgttacaacaaaatgtttattctttgaagatcaaaaatttgcgtatttgtggccgatacacctgggccaatggtggatgggcaaataacttttggtaaaaaataggaatattaaaaatataatttctctgaaaaatatttgcttgtttgaaatttgttgatactgaataagaaccttttgaaaatttgttcagtcaccgaaacacgcacaaatgatgggctgccccacacgttggagcaccttgtgttcatgggcagcaagcagtacccctacaagggcacgttggacatcatcgccaaccgctgtcttgcgagcgggacgaacgcgtacacggaccaagaccataccgcgtacgaactccgcacagccggaagcagcgggtttttgaaggtgctccccgtgttcttggaccatctcctgcgaccgacgttgacggtacaaacaacattggcaaattggcggttttggcaaaaaatgatttaggcatttcaaaacttaaacatcaatatctttttttgaatcatttattttaaattttactttcagcagtcacaatatgacacggaggtgcaccacatcaatggcgagggcaaggtggcctcatttatccgccaccaaaaaataaaaagaaaaattacaataaatttcagaaattcgggggttgtctacagcgagatgcaggcgcgagactccgaaatggactcgatgttggacaaaaaaagaaaagagctgttctaccccgcgggaagcagctacagagcgatgacggggcggttggtttcgactcaaaaatcaaaaaaataaaataaaaaacaaaaaagaaaaattcgtagcaaaaagaatagaggatgacttcgaaacacactcaaccataaaaaattccggcaatcatcaagaatttgtgtctcgacgaaaaaaaaatatggcaggcgtttttttctaggcttaaaaaagcgctgattacgaatttgattataaggttttgttcaaaatatgagaaatttgaaggtttttgaacctttaagttcagcgaaatctgttaaaaaataacaaaaattttcaaaaacaatccttttaggcaccctctctgacatccgcgaactgtgctcgctggaacgggtgcgaaactttcacaagaagaaaaaagacgggaaacgggaacgggattcccgggttttcccgcggcattcccgttcccgtccaactctagttttttgataggtcaatgaggctagattttcaaaatgaggctttttgtggtttttgagaaaacccgcaaaataaagaattttttaatgaaaaacggaatggaaaatcatcaaaataaaattttgaagcacaaatttgaaaaaaaagtgtcagattttggtttcgttttagagcttttgcttagtttgaaaaattagatttgtcttgcaattgccgattatcccatggtgagtgttctttgcttacccgcgcctcccatggcatttcacgagtgtccccacaaaatccgaaaccgttgaatatcctatcaaatgtagtaggccccaaaacattttatttttcagtctcaaaaatgctatttggacgcttaaaatgccacaggacgaatgaaatgccgtgatggttggacgcataaatttaaagaagtccaaaaagcaacagtttcaattcacaagtgatttacaagggattacagctttattgtccgaatacattcatacaatatatacatatttatgtacacataatttgggtgttgcattgaaattcgttttgtgaaatttttaattcgggcggcttacaggtcggccagcgcaacatttggatggtccgacattgctcaattgtcgtcgttttcgttgtacacagagaagggatgattgatgaagatgaattgccgataattaatgaatgatgaaaataatggcaaccaaatgaattttttgtgccttttatatatgaatttatccgaaaaatttgactcttccgactaaaaaatttgctatttaaggcccacacattttgcttatccacgttcattccgttcattcattccatccacttaattattcgtcctcctccaccgccacttaaatcgtcagtttatttaggtaattaattgttttgttatgtgcattttcattgtgctaattgccccccccccccatttttcagcgaatggccaacgcaatgtacgcggcacgggcgcgcgcggccaaggcggaaaagcgtcaagcgcagctgcgcaaggcggccagagcaagggcaggaaacgtaagtttagattaaaaaaaaattttaaaccgaaaataattttccccaattgttttccccacagaccgccaaatcgcgacgagccgagcgctgttcaatttgcctgggccgactgagccgaatcacgcgtaccacgatgggctgccaccatccgctgcaccgacgctgcctctacaattgggtgcgcgtcaacttgttttgtccgatgtgcggccacgattacacgcgcgggaggccccgtgatcgccaaggacgccgcagccgcagccgcagttattaaggatggaagaacggacgacggatcacaatgaatgattggccgagtgtatttattgatgtatttgtgatggatattcttcatttgttgtctcatataaccatgtcagaacacacgcattgtttgtatcacttaccttatatttgtactgaattgaatgcataaaaattctgtttgctatcgctgtttctccatttgtgccaaatttgaatttcaaaaatagaatttttcttttttcgactcatcagtatacacgccgagtcaattttgggctcccagttcaaaaagtaaatgtgtgtgtggcaaagtggtttttgtaagatagtaaaggaacaaagggcggaggttcgagtccgttttgcaacatgaatatttttatttatttttgtccaaaatattaaaaaatgacgatttttgggaattatttttgaagctttttggcaaccaaattgcataaacttggtatcactcgaacgctcttgttgaggagaacctttatacgagccgtcgtggtggcatttttggttataggagccgtcgtcgtggcattttttggttataggagtcgtcgtcgtggcattttttggttataggagtcgttgtcgtgacattttttggttataggagtcgtcgtcgtggcattttttggttataggagtcgttgtcgtggcattttttggttatacgagtcgttgtcgtggcattttttggttatacgagtcgttgtcgtggcattttttggttataggagtcgtcgtcgtggcattttttggttataatagtcgttgtcgtggcattttttggttatacgagtcgttgtcgtggcattttttggttatacgagtcgttgtcgtggcattttttggttatacgagtcgttgtcgtggcattttttggttatacgagtcgttgtcgaggcattttttggttatacaagtcgttgtcgtggcattttttggttatacgagtcgttgtcgtggcattttttggttatacgagtcgttgtcgtggcattttttggttatacgagtcgttgtcgtggcattttttggttatgcgtgtcgtcgtcgaggcattttttggttatacaagtcgttgtcgtggcattttttggttatacgagtcgttgtcgtggcattttttggttatacgagtcgttgtcgtggcattttttggttatacgagtcgttgtcgtggcattttttggttatacgagtcgttgtcgtggcattttttggttatacgagtcgttgtcgtggcacgcccccccccgcccttcagagcacgacaaatatttcaacaaaaatttttaaaaattgactagagcaatcgaacgctaacggacgacctaatggaaaaaaatccccgaaggagagaatttaattaaatccattccttcgggggaccgtgccgggtgccgcggggtaagcagtgctggttcgtttcatcacggcaccgaaccttttggctagtcagcaatcgttgcttaacttgccagatcggacgggtgcgcatgattccactgttccaagcaccccaccaaaagcaaaacgatataaccaaaatataaggaaaaattttttctccatcttcctttttgatactagagcatcagagtgctaaaattaagttgtaaataaaatt

SEQ ID NO: 4014 - DNA, 1868 bp, Heterodera glycines
aataaataggtgacccaatttcaacataatgataaggcaatgggtcaccaaaaaggggaaagtcgtggaacaaaaatcggtgacgacctgccaaaagacatcaaaaaacagcgcacccaaacggacactgcgttcattgaggccacagacgagcaaaaaatttgtcatcagcgaatcctgggcattgagtgtgacgccatttgaaaaacggaagcgcaggaaaaattggcaagcgatgaacgcggggagaaaagtcaatggaacggatcggaccaagtcaaagtggacgagcaaacgcaacaaaacgccaaacgaagcggcggcggacaaacggtggcagtcgaaacgctcgcggcaattgaccaggcggcactgctgaaaagagaaaatattggacatctttaaggcagtgttcgctcattggtcctatgatatgcaccgatataaaccaactatcgtactcaatgatggtgaattgggtacggtagttgtttgtgtcggtacggttcaaaataccgtaccacgtcaccgtcatccatcactgacgacccctcgttgctcgtcagttccaccggtgcagtttcgccaccactgtccgccctttcttccccgtacattccatcaatcgttggcgcctgtcttctttcgccaccatgcgctgtcaaaattttcgagattcgatcctccgcattctgaaggattttctgccgccgacgttcgcgcctctccgccaccgaagtgctggaaggcacggaagagttctgtgcggtcaaagacatgtccaaagtgtactcaacaagtatcaaaatcacaaaaaagtggaaaaattaaaccaaaaaaagaaacaaaattgttatcaatgggatacaaatttacgtgtaaaagcttaacaaaaaacagaagtttatcgtcagaaaaatgcttatctaaaatgatggtggaattgcaaacaaaatttgatgcgcgtcattcaatcgtatgagtgggttctgatcggtttcagtgggtcaaacagtctcgggtctcgcaaatatttggcgtccttcaccagcaccggcatgtagccagccttgcgactggtcgcgatggtggccaacagagtctggtactgttttttgcacagcccggtcacgtgctggtcgtacacgcgcccgctgaagttggagacgaactgttggagcagccgtccgtttttgtagtccaattggatgcccagctcgcacaacagacactttcggtcggcccgttggaatgggttgaagcccaattggatcggtgcgtcggggtccgtcgggaacaactgcttgcacttctcttccggcgcttgccccttcctcagcagactcgtccgaacctcgccaaaatcgaactacaattccaaccatcgaccattgaaaaaagacggtagaaaagcccaccatggaagtgtcaccaaatttggcagtgaatttgctgtccttaggaatgcttttcatcattcgcaaaaaccgacattggacgaacagaacatgaggctttgccttcaacatttctgaagaaaaaagttgcttttgcaaattggcaattacaatattctttttcgattaaaaacgaaaaaagaatccgctctcgaataaatatcaccaatatttatatataatcaggagcaaaatcaactcgaaacaataagttacacatgtgtttgtgttgagattgatgagtgtatatgtaaaaaatgaccaaaacaaagcggagggagcaaaagggtagaggtgaaaaacaaacgaacagcagaagaggtggcaaaagcgaagcaatgagatgcaacaaaatgagtggtcaaaagtgatggaattttcaggtaatgaaaaagagacaattcattcatt

SEQ ID NO: 4015 - DNA, 6724 bp, Heterodera glycines
  unsure (1)..(6724): unsure at all n locations
tcataattgtcttgcctgtcgatcaagtctcaattttctgttttcgggtttaatttcatgcgcccattggcagcctccccccccccccctcacccctttcaaggaattttcaatatttttccaatcatttaactttcttagtttccgcccccctcccccttcagtgctttaccatcagctcctcctcccaccgtcggtggacaaagccaattccatcggacgacaaatgccaaacaatcggtgccgaagcgcagacgaaaagtcattttgcgacggaaacttttgcgaaaaggcgccaccgccggcgatttgcagcagaaaaagaaaagcggaaatggtggggcacaaaaaaaggagggaaaaccaattaaaatttgaaaatgtgcagcaaaaagcggtgccgtccgccgcgtcgtttggcgcgttgtgccgttgcagcgattgccgccgtcagaggacggcgcgggacaaatggctgaaggcggaagtgccgaggagcgacagagcaatccatggaacacttttcccttcgaaaatgagtttggcgtgccatcgacgggagggacggagaagggagcgacgatgaggacgaagacgggcactgtggtggtgagggggacggacagaggagaaggcgtacagctgggaagacgaatggcacgacggagaacgacggcaccaaacgacggacaaaagccaacgcatgatgtggacggtaagcaacgaaatagtaaattgtgaacgtaacaaataggagggggcgggaagagtagtgctgttcgagagtctcgaatcgagaaaagtctcgggtttttttaattacggcataattgaactgtctcccctttccagcaactgcttcttctgctgatgattctctgtccgttgtcgattttcttgccccaaatcccatcgctttccgccgtttgccaccgtttaatcggtcgtcggcggttccgccgccgtccctcgcccaccaattggtcgccctgttcagtgtcggcctttgtctgtgccgtgccgttttcggtgccttttgtgccctttttgcccctctcattttcctccctcagattgttgggcccttctccaatgcttttgctgtgccctgtttctgctcggcctttgccttcgccgtcgtcccctttcgctgctgcccttggcctttgacgttttgtccgtccttttggcccttttcttttggtcagtctcttttttttggcattttggctaattaactatcctctccattgtccccatttttccaaattgcttcatcttccttccccctcctctctcttcagtctgtccctggttgttcttctgctcgtcctgtcactgctcgccccctccgtccctccgccgcctttgtcccttttccgctgctttcttttcatcgcctccctgtgctttgccgtcattctcttcaccttttgtacattttgtgaacagagcgcagtggccgaaatgactaaaaagaggaaaagacggaaaacggaggacaaaagggaggaggaggaggaagaggaagaggaagaaaaggaagaggaaaaggacagaagagaaaggagagtatgaaaaacaaagaaaaacaaattaaaattcgaaattgaaaatttatttatttactcagttaaacaatcaataattaattgtatcaattagtcaattaatcaatcaattaatgtattgatttgtgatgaatcaatttttaaacaataaaattgtgtcaaaatcatctgctgcttcattgcccgctgaatggtttattcgaacttttcttctctggggaattggcaaatgggagaaccaacaaatgtcggacatttatttacccgaatttggttcgaacgggaggaattttggggaacaattaattggggagaattaactaattgggatatggaagaaaatgtaaaaaggaccatctgataaatgtaaatttgaaatacaaattcaaattttttgaaatttgtggaaacgaatttaaaacgaaacagagagcttacaaaaaaaaagcaaacaaattctgaaagaaacaatgtctcaataaaaatataaggacaaataatgttttaatttttttagccatttgaccagtcagaaaagtttgtcaaattttaaaatttaattgccaaatttgtccatgtcaatggaagaagaagtgattcatccctttttgggattagacggaatttttcatttttaaattatgtatttaaccagtaaaaaacattaattatgtcgccaatcttttatttgcgccgcgcgcttgggggttggggtgggccaagctgaggcgggattggttcccgctcctcttcaccgctctcgtccctttcgctttctgctcactccgttcgcttgttgtaaagggaagcgcacccttttttgccgttctttttgatgggtctgatgctgctgaccgatccgatcagcgccaaagggggacgagaatgggaggggggaggggtgacaaatttggattggtgcttgagagaattgtgcagcaaatcgctgcttgcttaacggcaccaccgacaaggttggaggaagggcttgtcggacccctttgactcgacgaccacgggtttcgactcccgttccctgcggcggacactccggctggtgggagtccgcttcgatcgacgcgcgcttctccggctggtgggagttacgctgacgaacggccctgtcctttcgtcggacgatttggcaccgctcggctcttccttccttcactgccctgcttggacttgacgacgacgggagttctccccgtctcttccgctgctcctactggtgggagactgaactgctcgaatttggcgctacttcgggtcactcccgaattttttcccagtggctgatgggaggggaatttgggatccgggagggttgagggaaaagacgtaggcgaatgtgatggagtgaggagggtctttttccctccttaccgtgtcccccgaaaacgaattcgagacttcgattccgacacaaaatttattaaagaagcgatcgacgaattaaaaatgcgtaaaatggtgaaaaaaattgatcgaaaagtccagcaaaacgaataaaagaatggttgggggtgaaggaagcgaagagagcgaccccttgggcagggccgcttaaatagacattcgacaaaatgggcggagtgacagacggcccgataatgcgatgagaaaaaatgggacaaaaaatgggcagaaattgtgatgtgaaaagtgtgaacaaagaaatggcgcataaaaataaaatgtaaattggcagatgtgaaaagttaaagaaattgaaaagaaagaactttgtgcaaaattgttttgcacaaagcttgggccggagattagccagccgatgagaaatgaatttgtaaagaagtgaaaaatgggacaaaaaataggtgaaatgataatggctggtacgattaaatggagaggaacgtgatcaaaatcagcgatttaggaattgatgaatcgggaatccgcccgaacgtctcgtcgcctttttgctctttttcttccggtatttcttcgtatttgacggtccggcccatgtgctcgtgcttggtcccgagaaaacggactccccgtaacggtcctcctcgtctgtgtcaagttctttcccgattcgctgcccgtccgcgccctggttgaacgcgagcactcgcgcacgccgtggcgggttggcaccccccttctcgtcgccaatgagaaaattggcgacaaattaattcgtcacatttttctctccttttgtaaatcaattttttgttgtttcttcagttcatttgtattaattcacaaagtgataaaatgggctcagagaaggggaaaggggggaacaacagcatcaaatcatcacaatataatacaaaattaattatgtattatattaatttgttaaacttgaaagggcatcaaaaagcggggaataaactcgacttttggaaggccggcactccgaacatgccgaaggcgctgtccgcccgtgtgccgccgccgttcagttttgtggagccgccggccgaggtggtggaccgtcgatggggtgccggcgacagcagcagtgaggacatgcgccagggcaacggcacggaggaggccgaacctgtaccgccgcttgtgccgttctgctgtgtcgtatggaaatgggacgacaagggttggaacatgggcctcgagggcagtgccgaggccgagtgccgatgccgcaacgcttccgtgccgtttctgctgagcgggggaggaaacaaaagttggtttttggtccgaatgccgacaaacaaatggcaattggcactttttatggatttttagtgcccgcattaagcaagctccgtccatggcatttttacatgccggtggtactgctaggcaaagccggtaaatatttttgaaatttttccggaattgtaacaatagcagtactgcactcaccgtgcgtggtggtggttgtcctgctggtgctgctgctgtccccccatttgccgacttcccccgccccccaccaattggactgggattagtgtggcggtggcgcgtgcgttggccgcgttcgtctcccgctgctgctcgcgctccctctgccgcctttgaagtgccacaatctgcgggtcgtgctgcggtgggcccgggttggacagaatgtgcccgcgcaagtcggacgagtaaacgtcggggaagggcagcgccgacccttctgccggcaccatggtcacggtgttgtgccctgagacggggagaggtgtgaaaaagccggggaaaatcgggggaaaattggcatttcttaaaggggggggggaagacaatagcatcaagaataaagacatgaaagtttagtaaatatttgaaaatttaaaagcgaaggaaggtccggcggtgccaatgccgccaaaaaatgtttaataaattttttgttggaggataaaatagaatttaaaaataggtaaaaggcaataataaaaaattatatattaattcaaactcggatttagttgaaaccagagaatattcgtaaaaataattaaatttaaaaaaactattaattgtttaattatgcctttttaaattacattaaaacgggagacaaaaaagggagttgacacttggcggactcgaaccgccgaccttctgcgtgtgaagcagacgtgataaccaactacaccaaagtgcccaacgataaagtgatttattgaaagcattttgtgcacaccaataaataaataaatataaataaaaaaaccaatttccataattgtttaattagcactatttttataattacttttgaaccctaaaaattagaaaaaaggaagttgacacttggcggactcgaaccgccgaccttctgcgtgtgaagcagacgtgataaccaactacaccaaagtgcccaacgataaagtgatttattgaaatcattttgtgcacaccaataaataaataaatataaataaaaaaaccaatttccataattgtttaattagcactatttttataattacttttgaaccctaaaaattagaaaaaaacaagttgacacttggcggactcgaaccgccgaccttctgcgtgtgaagcagacgtgataaccaactacaccaaagtgcccaacgaatggggaccattagatagtcaccaaaaggcaaacataaagaacgaacctctcaatttccgctcgtattccaccagctgctgccagaagccgaggtttggccgaatgattggacgggcggacttcacgtaatggtaagcctgacgaagggacattcgctcgtgtttcatcagactgaaaatggacaaaaaaaaacccattgaattaccattaaaataacataattaattaatttaattgtaaaaatatatttaaaaacgctttttggtggtcagccctaatataaaaattaaacactacaacaaaaacaacatcaatttgcttactaagcgatgcaaagggtggcggagcgggaaacaccggcgacgcaatggacgagcgtattgccaccgcgttcctggagcagtacagacaaaagttaaagaaggtcatgccgaaataattaatagaaatgggaagtgaacggaagggggggcaaaagatgccaaaaagcgaaacagaaaaggggaggactttgaatttgaattgaaaaatgagttcagagtttttgatgagttaaaaataaatttaaataataaataatttatttgaatcggtgaacaaagggaaaagcaatcggatgaattctgcataaaaacgcatcaaaaaggagaggaattaaaaaaaattgtttgatgggacgcaaaatgccaacgcgcaaacaccttcccccccccccccttggggtatgccccaggggatggatggcattctgatgcctcaaaaattttcggaaatcggaaatccatggcatcttttgtatgcccncactcgatagaatttgtccaccaatcagcccaccttgactgatttgattttgtccgccgtttggtcaaagtaatggtccaatcgggcgaatggcgagtcttcgatgcgaattcggacgctgtcaatgcctgtggaatgagttggaaatgccaccaatgttttgccattttgccgctcgccaccaatcaattaattaattaattggtcatccctttcaagaatttactncccggcaaattcgccgtcggttcctttaacgtggcgttgaccacgcatgtgatgcccttctgcttca

SEQ ID NO: 4016 - DNA, 915 bp, Heterodera glycines
  unsure (1)..(915): unsure at all n locations
ttcattggcggcttcggccaaacccttngggccttaatactttaaaagcgcttgctgtgcactttgcttcattaattgggaatcccaactcggctaaaaatgaatgactgactactgactgagtgagtgaatgcaatgtttcaaattggggggcaccgtcatggaaataaatgagtgttttttctgtcccaaatttgctccattttcacccttttgctcccattttttgtcgtgtccaaacggagcgatggacgaaaagcaaagggaaaggggggacactaaatgctaaatggacctgtgaggggaggagaagcgacaacaaaacaagcacacaacatttaccggttccctcactcactcaatccatcaaagttccaaatcacagagagggagccttggggggggggggaaccattggaccgacccctcgggggcaaacaaaatttgggacaattgccggcggaatttcagagtgaacccaatgaaaattagtgttttgtgtattattggctgtcttttgcccacacccgccattggctcatgtaaaattggcctctttcaattagtgacgacgaacggcgggcaaaggcaacggacggtgggcaattgggggggggagagggaggggattcagtcatccgacaaatttgggggtcggtgttcgacgcattttctaagggcggggggggggggggctaagggcgatggttcggagagggaaatgggcaaacactcagaaaaaaatggctttttgtattttttaaaattttaaaaacattgcccttttaaaaatttaaatgtgaaataatttcaataattaaatgttggaaaattccaaaaataattaataaaaatgtaaaaatagttaattaaaatgaaaagtgaatttcttcaattaaattggcaatggaagaa

SEQ ID NO: 4017 - DNA, 1146 bp, Heterodera glycines
tttgtcagtgttttggacattttttaggatgtgaacatccttttctgaccaagacgtgctacgaaatttagcacacattttgaaaactaatgtggccgcctgcaaatcaattggagctccattcttcagccaggtctttatttttgagtatttcagtttttatggcatgcccttagcagtatttatttattttttaaaaatcaaagcagttggattttcatttgtggaataaaacaaatgtataataaatttttatgtatttttagctaaaacgaattttgaatgacatgttgagcgtgtaccaagtgatttccggaaacctgaacaaagctgtgaacgagcagggcgaacaggcgctgaaatggccgttggtgaagcaaatgcgaattgtgaagaaggagattctgacccttctgtccacttggatttcgcgtgcttttgagccccgtgtcgctattcccgtaaaatccaagcgaattgttttaatctttttgtcttctttgaggatcctttgttcgtgccagttcagctggtcatcgagaatgtgattaagcctctgttcagcaccgttctcgtcgattatgaaatgaatattccgcaagcgcgagaaccgaaagtgctttccctcctttcgattaccattgtgtctctgaaggtttcacaccgtcattttgaatttgcaattgttggtttcttgaaggaggacgcgtcggcacaggtccccgctattctcgacgcggtgttcacgtgcactctcgaaatgatcaacaaagatatggaagccttcccggaacaccgcacgaatttcttccaactgctgaaggccatcaaccaacactgcttcgacgtgctgatcactcttcccgacgaagtttttggcctgctcatccaagccatcgtttgggcagtgaaacacacaatgagaaatgttgcggaaaatggcaagaaatttgcattaatgaatgagtgttttaatttacgatgattttctgcaggagttgacattctccgcgagcttttgaccaaagtctcaacaatgacggacaaagcgcaggcacaagccttttacaaaaagcactttatggtgatcatggaacatgtccttggcgttgtcaccgattacaaccaagtgaactttgttggtga

SEQ ID NO: 4018 - DNA, 4975 bp, Heterodera glycines
gttaggcccgcaaattcgagtcacagtcaaagggttcttcagctttaaccgcacagttacaaagatgcgtgaacacatccgagacttcctcgtccagatcagggtttctctctcttcgaaattgaaaaaatgattttccattttgtccttaggaagaagccggcgacgacactgcggaccttttcttggaagagaaagaggctgagatccagcgcattcaatcgttaaaacaagcgattcccggggttagaaatccgaacgaattgttggaggaggacatggtctgacaatgcgtccgtcgggtgggctcggccctgccttccccgtttttgttttttccatttgtccatcctgacattaaacgatcgttcgtattttttctctgcgcccatttgaattcctttcgtctgtttttgctctccttttcatgttttgtgtccgttctgctgagctttcccctgcttcttctaatggagtttgtttctttgcttctgattgtctctactcgtctgttttggtgagagatttgattgtttctgagtgtgttcctccatccgttttgctttatgaattcgaccattgtcgaccctccattattcacagtctgtcatctcttttttaaatattttttgtctgaattatggtactgtccaatttcaaagtgacatttgtggtctattttatttatcgtttgttaaatgactgctttttaccgtataaatttgagtgattgttgttggaaggaaagtgcaagaagtgtccccggtggagtgaggtcatctccccttagattcttgctaattactcgcggggagtgccgccccaaaataagcgggtcatctcctccaatttgcggggcttgggagggcgagaatgtccagtgtcttctcgcccttcggtcacaatccgtcccccaatggctttcctcgctcttcgtccccttctgctgctgtgcctttgcctcttcgcttccgttggcgttctgttcgcccaatttcccttccgccacttcagtcccgaccatcgctcgccttttgctcttggcgttgagaatgggtcggtctgtgctgcgcttgctccgtttgtttcattccgttccgttcttcagtctgtcctccttcccttttggcccccgtttttcccctccgtccgtcccctctttttcgggtccgtttttccttgtccttttcccttccctttgccttttagtgccctttggctttgcctccgttcgtcccaacttcgcttcctttgcttttcgtcgtccctttttccccccttccgtcgccgcccctttcccttcacatttcgtcgccaataattttctgcgcgattctctcttcgatcgcgacaatttccaagtgaattacattaattaattacccccccccccatttttggcttttattttcctaaaaaggcacgtggctgcggatgggagccgagccaagcgacttgcgtcgatttgctgggcatttgtaagggcggctgtgccgacttttcgctcggcggtgcgctgttgcgcgactgtcgctgtgtgccgttgggatacggcgctttgctaatgggcggatgaaggaaaggcaattaattgccaacgaatgacgattattgttgaccaatccgacaaatcctcctcatgtcattgcgagtgtttatgttccaatggcccgttgtaaaagtgataaaatacaaaaggattaactaatgaattgactaattaattaatgagtgcgttgattcattcccccgggcattcctttctttccatttcgcattcccttcatctcttcccaatttcttcgtgttttcctccgttcgatccgtttccttcgccgctttgcgttcgtttctccgtcgtccttctgcaaattgttccatcactttcactaatttttcaggaatggactcaattttaggaagagaagcagaaaaaatgtcatatgactcaactacgctaatgtgatgatgttttttttttcatttttagattattgattgcgggtttcgctaattacggcgttttttaaccccacgtaattacggttttccgtaattaaaagtaaagtccagtacgtccagccctgcttccattgcttttccccttcacattaccttttgccctcccaaagactccttttcccagttttcccaatggcatttccgtttgaatgtacgcccccgccgcattcggcacattctcgtcaccgtatccgggggttctaccgtaccccgggaacattcttccatacacaggctcattgctgtatccttcaaaaagatcttttcaaattctctttacaatatataaataatttgatgcacgttaccgtatattccgttggcataaggtcgaggattactatacgccccattgttgtacagttgctgattatcatatgctatttcactaactatcggtggagtgccgtgtgcgttgccgtataactgttgattactgtatccggcgactgtgccgtaaccaaaaggcgaaaaattggcgtcgttttgaacgggatattgttgtccgacaaaaggtggagggatttgtagagaattttctttggcggagcacggaacgcacaaaaacgaagggaattgaggggaaatgggaaaagcattggcaatgggcggcggataaggcggagagaaagcgggcgaagcagcgggagacgacgaatagggatcactttgagaagagaggggcagcagggggaggaggacgagcagaaagagcatttggcacggcggaatgaatgggcggaggggcgaagcgcactttaaaagcaccggcgggaagccgaatgggagggaatttgacgcggaacgctgacaaagggaattatctgtcggatggacggacaaatgggcgaccaaaaaaggagacaaaagcaaatggtagctaaaataccataataatccaaaacatttttggtgctaatcactatggcaaccaatcgcaattccccgccccaaattccaattttggcatcatttcccttctctgatggcttccgtcgttcctcaaattgctgcgccgtcgctgcatttgcctttccaagttctgctccatcttcatgctcacctgactccgttcgccataattggccaaattggctgttttctgctcaaggttgcccaccattcccacttagtctctccacattaccccccccccccccaccatatttctcatttttctttcattacccccctccttcgttggtcagttccgtcttctctacccgacttatcgtgccactcttctcgcgttgcatttcgtttcggtgctcgtccaaattgtgcgtccttttctcggctttcatggcaacttaaaaggccgggtttgttgtcctaaagcgacaatcggagcatttcactcgctgcttttcttcggcagatcccttctctgtccggcttttggattctgtcagccctccatctgccctctcttctctttctcggccttaactccgacattcgtccgctccctttggaacaatttttctattccatcgattgcgccttttcttcagtcgaagtttttataaaaattcgctaataaagaacgaaaaaaagagcgatttcagctggtaattgcgacagtattaatacgacgattggccaacaaacaaatggaaatgatcagcaaaatgatggcggaagagacaaagaaagaggggacgaacggatgaatggatgataaggaagagtcagaaatggagacaaggacaaattaaggacaaacgaattaaggacggaaaggcaatcgcaaaattaaggacaaacgaattaaggacggaaaggcaatccaaaattaaggacaaacgaattaaggacggaaaggcaatccaaaattaaggacaaacgaattaaggacggaaaggcaatccaaaattaaggacaaacgaattaaggacggaaaggcaatccaaaattaaggacaaacgaattaaggacggaaaggcaatccaaaattaaggacaaacgaattaaggacggaaaggcaatccaaaattaaggacaaacgaattaaggacggaaaggcaatccaaaattaaggacaaacgaattaaggacggaaaggcaatccaaaattaaggacaaacgaattaaggacggaaaggcaatccaaaattaaggacaaacgaattaaggacggaaaggcaatagcaaaattaaggacaaacgaactaaggacggaaaggcaatccaaaattaaggacaaacgaattaaggacggaaaggcaatcgcaaaattaaggacaaacgaactaaggacggaaaggcaatccaaaattaaggacaaacgaattaaggacggaaaggcaatccaaaattaaggacaaacgaattaaggacggaaaggcaatcgcaaaattaaggacaaacgaactaaggacggaaaggcaatccaaaattaaggacaaacgaattaaggacggagataccatcgcaaaatggaaggacaaatgaccgaaattgaacattttataaacgatgacgaagagacaaatgaataaataaaatggcatttgcttaatgaagcttccttcactttactttggcccatcgctttgcctttttctcttgcttttgcaactctctcccccattttccttggccatcgtccgtattctgtccatcaccagcacagatgtgtttgtttgtccgtggccaactgacggggttggatcactttggatcattcccagcagtggcccctcccctctctcccttcgatgatggtcccttcctttcccctccccccgataaatcttttctctctcatcgcctgccgggtcattccttcgtccaattcttcctcaactcccttttccatttctcatgagttttcgcttaaatcgccgccgttcttcgggcaccggaagcaatttggcttccgccggtgcagcatgtcacagcgcgaccttttgaggggcaaaggtcagcagggcaaaatgcccgggggcga

SEQ ID NO: 4019 - DNA, 1304 bp, Heterodera glycines
ctttccaagttctgctccatcttcatgctcccctgactccgttcgccataattgccaaattgctgttttctgctcaaggttgcccaccattctcacttagtctctccacattaccccccccccccaccatatttctcatttttctttcattacccccctccttcgttggtcagttccgtcttctctacccgacttatcgtgccactcttctcgcgttgcatttcgtttcggtgctcgtccaaattgtgcgtccttttctcggctttcatggcaacttaaaaggccgggtttgttgtcctaaagcgacaatcggagcatttcactcgctgcttttcctcggcagatcccttctctgtccggcttttggattctgtcagccctccatctgccctctcttctctttctcggccttaactccgacattcgtccgctccctttggaacaatttttctattccatcgattgcgccttttcttcagtcgaagtttttataaaaattcgctaataaagaacgaaaaaaagagcgatttcagctggtaattgcgacagtattaatacgacgattggccaacaaacaaatggaaatgatcagcaaaatgatggcggaagagacaaagaaagaggggacgaacggatgaatggatgataaggaagagtcagaaatggagacaaggacaaattaaggacaaacgaactaaggacggaaaggcaatcgcaaaattaaggacaaacgaactaaggacggaaaggcaatcgcaaaattaaggacaaacgaactaaggacggaaaggcaatcgcaaaattaaggacaaacgaactaaggacggaaaggcaatcgcaaaattaaggacaaacgaactaaggacggaaaggcaatcgcaaaattaaggacaaacgaattaaggacggaaaggcaatccaaaattaaggacaaacgaattaaggacggaaaggcaatcgcaaaattaaggacaaacgaattaaagacggaaaggcaatccaaaattaaggacaaacgaattaaagacggaaaggcaatccaaaattaaggacaaacgaattaaagacggaaaggcaatccaaaattaaggacaaacgaactaaggacggaaaggcaatcgcaaaattaaggacaaacgaactaaggacggaaaggcaatcgcaaaattaaggacaaacgaactaaggacggaaaggcaatcgcaaaattaaggacaaacgaattaaggacggaaaggcaatccaaaattaaggacaaacgaatataaggacggaaaggcaatcgcaaaattaaggacaaacga

SEQ ID NO: 4020 - DNA, 1308 bp, Heterodera glycines
  unsure (1)..(1308): unsure at all n locations
atggacacggccaatggcatttctccctttggcctttctgctggcacttttttgggtccgaatcaaaagggacgaattgcgctgcttcgctttgtacggccaattgtgggctcagcactgcgcccgcgtccctttcattctcttccccggcttttaatcgtcgcaaatccaaaaattgtgaatttattgcttcaaatatttgtataaagcagagaaaatatttcataagaattgtacaaaatattatgactaaccaaactttggactatgagatcgttctgctaattgtctgagtcaccagtgaattggccaacaatgcaccccttttcacgtacttcttggccttaagcttaaccagttttcaaattgtggggccattttcgttcactgagacgcattccatgaagaattggtgcaggagagagtcttcgtaagtggggggaggcgaattgcccgtcgggggactttgacgataaaacggcggggggacggcggacggttcgggcggcgtaggttcgccccgcgcttccttcgccgcaatggctctcttacggacgtcccttgcttctgcaattcgttcaaatgcctttccgccaccattcctttacaatactttgaatggctttgaaattgcgttcgcggagtcgtgccgttagcctttggatgatccgtcgggttcgtctgatttcgatcactttgtccagctcccattgcttacatttgttgattccgatcagcatggccacgaccattccgacgcaaaaagcgatcgtcggaaggattatttgggtgacaacagcagaagacggcgtaaaaaacttttcgtcagttcgaagcatttcagaatcaatttattaacgcacaagtgcttaatgtgagtaaaaagaaaagaaaaaaaataaacacaaaaaagaaattaatttggggacattttccgggcacaggtgatgagatatttgttgataaattgaatattgccaaatgattggcattgtgaatttattgtttgttcccaatgccacacttctcccccccccctttttccatgttttccttttttcttaaacgtttccatcactttccccatcaaagaaaagcttctcttctatggcttctcctttttcgaatgcgattgttggtggcgacaatgtttttgagattaatgactttactgtggtcaccgaatttgaggttctcactctcacattggaaaacgccattcaagaaatgaagacagaagcggaattgcagggcattgaggtgtgacaatgtttttgttttattgtcccaaaacganntaattttctc

SEQ ID NO: 4021 - DNA, 1138 bp, Heterodera glycines
ttttaaaagtgatgtcatcaagacgggtcaattgttccttatttatgcatttcgacaaaaacttgccacacttattatttattattaatatttatttatttatttgcttttataacgacgacgaatttggagggtttgtttttttattaaatttaaattttaaattagtttaaaaaaacatatttataggaacggaaccaccggagactatttctcaagtaaaatttatttatatttataggattaaaatttatttattgataattatttatattttttaataattttaaatttttatttatgcttcatttaaatagtatcatcaattaattttttcatttaataaaaatttaattgttttaattaataatttatttctagctactttccgttgaatcattgaacccatttttcgatgcactgctctttgcagcaaatattacttcatcatcttcgtcaatcataaaaaataattcaaaaaaccgtaaaaattaaattaaatttaaaaatttattattaaaataaatttaattaccccctcccaatttatcaattctatcatcagtttccgcggctgctgaattattatgcaatgcgcaagaaaattcgatgtgtgaaaatgcgcgaatgtgccgacgcagagaaaatgccaccgattttgagtgcgtttgtcggcgaggccatgccggaaaatattgccaattttgtaagcaatttaagtagccactaattggacaggctatttttaatacgaaagaattttgcgaaattaatacataatttttcgaaatatcaataatttttaatcttttaaatttcaattgaattatttttaaaataattaaaatttgagaaatttattatatttaattggtttataatgaaacttatttatttttaatttttacatgctattaaattgtttgctaatttaattagaacctaattaagattttctaaaattattttttgtaaattttaaagaaacttatcaagaaaacaattttttaaatataatttaataaaataatttatttattttcataatttagcgctttttccacgaaattgtgccgatgcatttgccttccatgaagaggtggaggaggaggaagaggacatttttgatgggggcgtt

SEQ ID NO: 4022 - DNA, 9371 bp, Heterodera glycines
  unsure (1)..(9371): unsure at all n locations
gggccactttattagttcgtcgtttttggatgttgatgccgaaaaccaaaagtgttttcctttctatgggcgcctttatttgaaatttgcggtgtcatttttgttgaattggcgcgcgcatattaatttttaattgggctacttttttaattaaatttttaattttcatatgaatttttataaataaattttaattttctaattaattttcttatataaaatctatctcctgcaattgcaaatttaaaaaataaaaataaaatctgcccttgattttcctggtaaaatgtcatgtaaaatacacaacccgtgccctctattcaggccacactttacaatgccagtgccggcgtcagtgccatttattttcgcgcatcaaaaggacaccaacaacaacaaaaacaacaattaaaacagaagcaacagctgaagggggcacaaaatttcactttgggaccagtggaatgttcgggcgaaggtataataatggtttcgggattccaatggaaacctaggtctgattgatgatcaaattgatcaattttcatggatttgaatttctcctgataaaattgatctgataatttaattcgattaaatttggctaaattttcatatatatttttttgatcacttctgatggattagttaattgggccggatattaataaatctaactgaattaatttagtcaggcataatgacctgatttggtctgacctgctgataagaagttaaagatttaaagttaattttatatatgattagcttgatagatttagttagtttaatctattttctttgcttaaatgatcttactctttttttcatgcttatttaattagctcgatcattaggccctgttcagtcaccagctgataccatttctatcactatttccattttagccggcacttcactgcccggcgcggtggtcacactccgctcgccgtctgtcggcattggcaccgacccaatgggccaatggcgtcagctggaatttgacttccgcaccggacagccggacattgagcaaattgtggccggatgggacccggcggacaatgggcttcaaatgaaaatctcgctcagagcaggtggccaattataacaaatttcgtccatttgtcccttttttcgacaatttgtcatgccaaatggggccagctaactcgaattgcttagtcatagttctatctagtcgagaaatttcttgggttttgggattctcggctttctgcaattagcccattttgatactttgtcgtgcgatgtcgaccatttgtccaatttattaaaaaaatttcggttaaaaggttcataaaaacaaggatatttttcaccttgtacagaattaaaaagtattttctcgatagtctttcattttttgttaccccaatttaaaccgtaacccaatgtgttaggctaccgtatcgagttgacactgtcgcatcaggcgaacattgagcaagcagaaaaaagtgccgaaacggatgacaacatggacacaaccaatgataataataaagtatttgtccatcaacaaaagcggggcatacgacgagaaatgagtgtttccattgcatcccaacggcctttaaacgatttgttttggcacagggtaattaattaataaattaaaattagagtattcaacaactaatcaatgctaattgcttttaggtgttggtcgaagtatttcgtggtgaaattcgtttttctgtcgaccgtttgaatgcatttcaaccactttcatttccattcgcaacatccacgaaatttagcattggaggcgatgaaaagtaaaaccataaaaatcatttttaaaaatttaatataaattttattttcagagggaatggctttgtcggatgcattggcaacttccaaattgatcaaatgctgcatgattggacccagcaattagcacagaaggacagggatgaagatggtaataaatagcccgacacatgacagtatcctatacagggtactgtacttttctgaaaaacgggattcatagggcttcgcaggactagtccagaaaaagcattatttcattgtaaactttaaaaactgaatcctaaaacaggactcggaaattcgaagtaaacccggcttttaaaatgcgtattttacagaaatgttttacaagtgtaatataatttacgaaaaaatgcggattttactatgttattttacaattgtaatttatcaccggaaaaaagcacatttatgttaatattttacaattgtgtattactggaaaatacattttatgaaacattttgtttaaataatcacctataacaaaaaacttttaaaatgattaaataatattttatccaaacattttatcttccaatttacaatccaacatttgacccaaacatgaaaagcacattttatgataatattttacatttgtaattgattaccggaaaaatgcgcattttacgatgacaaaatggcccttggaataaaaagattattatgtaaaagcattctctgaaagaattggccaaataataataattatataaataataatattttatttttttaacttagttcgtgttgtttctggttgtcttgagttatgtgctgagaataaatgtgaacaaggtcaaataattaattttttaaattttcattttattaattaaaattaaaactaattacccaatgaattaattaattactccccaaataaggctccaaatgtgtggaacattttgacacagaaacaacttcgtgtgcatgtaaattaccacgaattcattatggcgagcattgtgagaaaagtgagagaggaaaattaaaaattaaattaaaattaataaattaaattaatttttaaaattattatttttagatatcaatgaaaattcttccgctacttttcgtggtggatcttctggatttttacgcttttttaaccttcctatcagtgcccttcattcggacgtcatttttagcattcggactgatcagaggagggcattggtgggaaattgttgactttaattaccctagttaattagtattaattagttgttatgatacacaaataatatgtaattgtttcagctactttatgaacatgatcaggccgataattttgtgcaggtgaatgcaattaaatgtttttctaaatatatttttttacttaattttattttactcttaaaattttattttattttgtgtaaaacactaattattataaatgttttttacaaagattattttaaatttttattttttaaatatttaataaattcataaaatttttaagattcatttggctgatgactaccgaattgttctcacaatgaataatttgtcctccattgtcagctgctctgtttttgctccaccaataaaaagtcaattaaaaacaacaaaaattattttaaataaaattaaattctttataaaagcccaaattagtgtattttacctactctatttttattatttatttttaattcattttcagcatttaatgacatgcgttggcttcagctaattttggagcgcagcaatgagccgggcgcgacggcaccacaaacagtggtgcttcatgttgacgatgatcagtgtcaaattggacctgttctattgaatgatccggattcaaccgatcaccaaaatggattatcattaatggatgatgaagaaaagacggtggaggagggtaaaaatgttaattaaaacaattaattaattggaatataaaaataattgatggtgtacaatatggtataatattaattatttttattttttttatttttaaaaagatatttatttaacatattaacttttaatttattaaattagatattcaaaaacttttaattttttaataaaaaatttttatttataacttatttaatcatattatttaatattcatttaaatttaattttctataaattttcagatacttttcccagaaatttttttattaaccaagtaaattctcaatattaaattccattcaaagatgatgcaattttgccaccagctccgccagtgccacccgaaaaagtgcggccttttcagattttgtttgttggcggtatgccaagggcaaagcgaacactacgccaaaagcgggaaaggcacgctttaaaaaattacaaaattagtcaagatcaagctgggcctaattactcataaataagcatttttcttgccccaaatttttttttcttaatttaatatctaattgaatacgaaattaattttcggtcattaacacgctagttaatggtgaaccaattactgttaattaataaaaagttaattatgcctaattaagaatgccggtctatttgtcaaatttgccgccgttgaagggatgcattcgcggactgatggtggatggggaaatggtggatctgtggcatgctgtttctgaacgaaaattggcacaaaataggcgatcgggtaaagccgaaaaaaattatttaaaattaaaaaatttaataaaattccattaaataaattaaataaaaatgtttttgattaaacaccgtcaaaaatatattctcagaagcagttgaaattggttgtgatcatatacaatgtgatgataattcggagcagttgaactgtcaaaatggcggccaatgcgcagtgaaattatttatttataaatttaatttaattaaaacttttaaaataatttttaggtaaattggagaaacacggccgccgatggtaataatcgccaaaaaacaaggcaatgtgattgcacaaaaagctcatttgttggaacgattgcaactgaaggtgtactcacattgatttaattaattaaaatttttatttaatttatttaaaaagtaaaaatatttaaaaaaggatcaattagataatatgccaacaattcattgcgttttaaaaaaaatttaatcgccatttttactgaaaagacaaacttcgagactcaaatgactttaacgcaatgataccaaaaattatttttttaaaaatggcgaaatttcagttttttttgtgtggaaacgggagaaaacaaactattttttgtataaaaaaattaaaaaatttctatttttatgtaaaaacataggaaaattttaattttaaccccctacaaaaaagatgtcggcctttcctttgttggccattccgccgtggttttcgacatgtccgagccaaaacggtttgcctttttgcagcacagtgaacggcaaacgctgagtttggcattttcatgtgccaaaataagtggccaaaatcttgcgcaacatttggctaccattaattttgatgatggaaggtaagtcatagggaatctttggcatttgcactattaataggttgttctttatcatctattccttgatttgccaaataaaaatcataatttttggcaatttcagagaatttcacattgttttggacagaaatggcacactttttgttggcatttttggcttggacagaaggccaatgctcgtgcatcacattccacacatttttaatgatgtaattttataataaataaaaatattattaaatattaaatgatgaattaatttgtaaatttaatttatttaattaaatttttaaatgattttttcagggatttcgacaccatttccgtgtccattttttgtcgcaaaaaattcaattggaattggccgagccttttgggccaaggcgaatttggacaattcaaaatgaaggcataaatttagcaaatgcgcaacaattttattttggtggccccaaaaatggggggaaaattggcgaagaaatggcggcaaatgattcaaattcaaatgaggacgaaagcagcgaaagcgggtaaattttaaagcattttaatgacattcaatatttaaataaaaaattttaaaaataaaatggaaaataatgaaaaaataaataaatacatttgaataattagaaaataaattaatttaaaattggttatcaatttattatgaagaattaaatttaagttgattagaatttttaattaaattatattactccaactagaaattaaatagattaaaattaaattttaacatttaatttcctcaaataaaactattttgtttttattggaaggagtgttgaaggagagaaaaaacaacagcaacaacactatgaacaaaatgccaatgccaatgctgagcaagagtcggcattggcgtcaacaaacactgatagcattgataatgataatgataataatcacccgccggactccgtcattttggcggatgcaatgcgcgaaattttggcgcgtcgcagtgccaacgctaatgagcagaacgaaaatgggcaacaaaggcatatggacaaaattgggacagcgacagtaaaagtgccaaatgcaaagtcaacaacggcgtcaacagaatttttatggccacaacaaattgtccattttgtgggatgcatttcgagtgaatttttgcaaaatttaataattttttattaataacaatttttattaatttcggatgtgttggttgtgttcgagaatgacctgaatctgatcacttttacgccatttttgtattatttacaaaaaagtgaactgttgcatcgcaatgttttcgttgtgccatccgatgatcagccaaaacaacaccaaaaacaaaaactgttggcaccgatggcatgtggccaatttaaagtgccagaaatggcaaaaagtaggccttttaaacaatttaattttttaaatttaaaaattatttttcgtaaatgtatgtaaataaatttaattataaagttttttgaacagaaaaattatcatttttatctttctgtcagaaaataatttcgtttcattaaaacagtaattgacatgtttatgtgatttgaaaaaattaattgttttatcagattataatttgaaaaacgggaaggaaaccgtttaccgcaatttaaattggaaaagggacgattgaatcaaaagttgtaaaattaattaaaattttctaattatatgtcttttttaatatttcataaaaataacattaaaattattttaaatttcatatattttataatagtatcataaaaatcattaaatattttaattcaaattttaatttaatatggttaataaaaattaattaaataatatctttttttgaaaattcttaaataattaattcaaatgttgaattaataagtttttgtcattgcaaatattttaatatctttattgaaaattaattaaaaaaacaattagttaatttaaattttcattaatatttttctttttggaaaattatttaataatttattttcatcatttaaaaataattaatccacttcacttttagccatttcaaattaaaaatgcatttagagtcacgccgaaatgtgacttttcccgtttgngaggcaccctttggaccaattgcattccatgagaacgatgttagctctgagaagctgatcaaaactgatcaaacagatgaggcaattaatgaaaaaggcattttaaaatgaaatttctaaaatttaatattttaatttttaaggaaattcatttgtccattggcttttcctcatttttctgctgctcattttgttggcattttgtctgtttctgatcagtttgatctgccgacggaaaattcgtcaacgaatcggtcgaacttattatgtgctccaaaaatcggaaccaaaaaatggagggccaacatttgaaggtgtgcaatattcaaataaatttaatggttttgtgacagaaatttttcgagaccgaattttggtccttgagacgagtcgccaaggcttcaaaaattcgagacttgtcgagatctgcatatagactatcgccatcgctaacaggacccttggcaattcgttcaaaaaactcgaaaataaaattttaaaaattcgaaaaaaataaaaaaacaaaaatgaaaatacagttcttaaaacaactggtccaataaagaagcgacggtttgggagcagaaccgattcaatggaacccattcagctggctcaacataaaagtaaaaattatttttttttaacttaaaatttatttttacatttaaattttcaattttttaggattttttcccctggagggctctttttcggccactccaccggtcacgccaacggcaccgctactttttgctgaacaaaagcctatactaaggccaattttacggcatttgcctcctcccaggctaccgtcatcatccattacggtaaaaaaagggaggagaaattaaagaatgggaatattttttaaaatttttgttttgccagaaatcccctaaacacccaattttcttggttttttaagaaatttgtagaaattctaaaattctcaaaaattagtaggaaagtttgtattttttataatttttcgaaaattactatttttttttgttttacagaatatattttcaatacaaatagccatttaagcggataaaatttaataatttttttttcaaaggatgcttctcctcacactcagtcggctaatgaaaatgatggcatcgcaacttcgtcgtcctccacaatttattacacggcgcaagaagaacagtttgcggcggaggaggacaattcgtcaacaacaatttcgtttaaaagcttaggtcacagaaaagaaaggaaatattaaaaattttcaaaaatttccaatttaaattttctcgaaagttttcttcactttttttgatttagttggtgctatgacgttagtcaaaaaccatcaaatgaaaataatttttgatataactttgctcaaaggcaataaaatttttaattcttgatatcattagataggcctaggtgttttctattagcctataaaatttcaaaaagtttcgttaagtttcaagaaagttatgactgaaaatgttcaaaaaaacacggctgagggccaatagggctgactgatgttctcaagagtcttgacaatggattagaaaagtcacggattttttggaatcttgcaacgaaatccgaaaattaaatttttaataattaagcattttcttcataaaaatttgtttatagttttaaaaacattgcctgcagaggcaccttttccaaaaattttctgggatttttgaaaaatttcacaccaaaaaaatcatagaaaaaaccgaaaaatccccaaatgtgcaactttttttacttaagatgaaaagcagacgagcagtggggacgaagattcgacaacaattggccaagcttttgaagagaatgcgcccgaattgatggacgagcgcacgtaatttcaactaattaattagcctaatttaaattgtttcagtttaggcgtcaattaagcgccgccctttcctcctcttacggtggctcttccgaat

SEQ ID NO: 4023 - DNA, 1944 bp, Heterodera glycines
ggggtaattggcgttaaacttcgttttatttaaactttatatataataattcagagacaaagtgatcagagggaagagcacgatgagtttgatcaaccggaaaaagaaactgacgaaatttcgcttatcaatgtcattgattgatggtgatttagcaaaaagaaattggtgatcgacgggagacggacgaagaaaacaatggagaagaagagcaattcgattttgaatagacacagttcgataaaaggtttttcttcgtttttacaggaaataaaattttttttaatttctgagcttcattaaaaactgtgttatcatttcacttatatttatttgctttaaaaacctcaaaatacagttacgcatgcatgggactcgaacctgtgaccccccttgtggtgactaactcacagaccactaagacgaaaaaaccaacttaattgtacttggagcccaaaattgggccgctgtgtaaaccaataaatacaacccctaacccttcggaaaaaagtcaataattttttcgtgttacgatttttttgggcaatggtaaagattattggtcccgaaaatttttttttaaaatctcatttttacaaacattgctaaacccttgtaaacaagattcaacccaacaatcttaatttattttacgggacagaacgttttgctgacggacactgccgaggtgaaattggtcgactttggagtcagcgcacagcttgacaggacagtgggcaaacggaacactttcatcggcacgccttattggatggtggggagagaggggcaaaggatagcatttatggggggagggaggggcaacagatggcatttatgggaaggattgcatggattttaggcccccgaagtgatcgcttgtgacgagaatcccgagtccacctacgactcgcgcagtgatttggttggtttgagacttcccatttgcaattggcaatctttcatttgcttttcagtggtcacttggcatcaccgcgttggaaatggccgaggggcacccgccgttgtgcgacatgcatcccatggcaattcccccccccccccgccgaaatgcccttcctaatttggagcttttccttcagcgcgctcttttcctcattccgcgaaatcctccgcctcgcctcagcagaaaatcgtccaaaaaatggtcgaaaaagttcgaggcattcattgaggtcagttttgattttggcgtttcgcctttcaaagcgttcgaatttttaagtgcgttttggaaaaggactacacgagaaggccattcacagaaaatctgataaagttggcaggccaaaagatgggtttctaatggcgaagaatactttttagacacacattcattagggaccaaatttcggaccgaattgtacgaaatgcaattagagaacacgtggaaaggcatcggaaagtgcagaaaaagggtaaaaggggagaaaaagcgacggacaaaaggacgacggacatttgcagaagtggacgattacttttcgttcagtggaagcgacgaggaagaagtgcaaatcaacaacaatttggacagactaagcgacaacaaaagcaatgccaaaagtgagaaaggaaaagccaaagcgaaggggcgggggagggagacaccaccacctccagtgacaaaggaaggtcctccccaagttgggatcgccaagcgcaaaagactgcaattggaaatcataacttactgcattagttggttggcttttgatcagcctttgtttgattagattctgcgattagtggcgtcgccgtcactcccttcgccgccgcgggcggtggccgtcgcgtcgcagcgaccgccgccggaggggcggaagagacggaaacgatcaaagggggcggcgacctgcgcaaagagttccagcgcattcaggagaacaaccgaagcgcattcgaaaacgagaagccaatgaa

SEQ ID NO: 4024 - DNA, 2671 bp, Heterodera glycines
ttaattaattctgtataattatacatacaatcgtcagattggcctgcaattacgacaaaaagcgcaaggagcagcaaaaacagagcggaaacgaacagcggagaaaggcaccgcaacaattcgcaagaaaggggagaaagcccgaagttggcggaggacggattggcaccaaacattgaccttttgctaaggatttggacgttcttgcggacgaactgcgcgagctgtccaaattggtccccgtccgacagccgccgatgggaattccggcaaagggcagtcccccgaaagtgcccgactcgccgcctgcgcctcccccgcgaggcattgcaccgctgggaaagcatccaaattgtttatttgttttcagattcgtccattgctgaatgcttttcgtcggcttccgccagcggaagaatgggaagagacaaagagaaaccggtgaaaaggacaaagagaaaggaaaaggaaaatgtgccgaatttagccgagcaaagcgaacgctttcaacgattcccacgacaaacctttgccgccaacgccgacgcattgcgaaagcgcacactttgacaatggcaacaacaataacaacggcactttggtgctccgttcgtccgtttccccgcagtggcgacggcgcagcaacagcagcaatttgttgcggagggcggaggagaaaaggcagcggacggagtcacggggaagtctgaacagagtggcaggcattgtcaagcagtgctcagtgccagaagtgcgagggagggaaaggggacggcacgggaggggtgattagggtaattaggtgccccagtagttgggggtcttagggcgggagggacaatggcacggcggacgggttacatggccctacttttttgcggtattttccatttctactcgtgcagcagcgttcgccactgcgaagcgacgacttcgattcctcgtcggatgagtcggaagaggcggcatttgatcagagaatggcacggcagcagcaacaggcgtcggcaccgcatttagccaagtaaatggggggaagacaaagtgcagaagcccaaaggcaccaaaatgggcgttttcttttattacccttcccatgccctcggggttcggcttttgccacgttcgattttcggttttttttgtctaattataaatatatcgtcagattggctaaggtcgaagcggccattgctgctggtaaagcaatgatagtccttcccggtggaaacgtcagtgattttttggcactcgaacctgaaatcagagacggaataacgagacggagtgtccatgaagtccgagatttgttgcagtttctgtcttgattagttgtggtctcactatttaatgtttaaatttttcatcaattctttttgattaatttatcggcgaatcaaccatcagttaattttacttttgagacgtatttataactcgagggatgtgatttgttttatttagaagaaataaaaatatccaacgaaggggtgaccacttacacgttagattttagtaaattaatatcaagtccaaggagctcttttacagactaaatttttgtttaactcaatccatttatttattcgttttttgaaactgtcaacagatggagcatctgttatatctttgttgagtttagaccatattaaggccgttctgttgataaaagaatttgaagttttactggattgtggttttaacacaactttacgtctaagattgtaagggatgtgaccagaaaattgggggaatatgtcttttttaagatgagtgagaccattaataattttgaatgcctgaactaaatcaattgtttttcgcctttcttctaaagtttgaataaatcaagtctttgtttgtaaggtatatacggaagcctacatttaaataaagcaatttttgtaaaatatttttggcatctttccaatttatttatatcttttttgtatgtcggattccaaatttcgggcgcatattctaaaagaggacgaatgtatgtcttgaatactttggtccaaatacgtatagagcgggtttttaaaatttttggcaatattgcgaatccttaaataagcagctttagtaattttagtataatgattagaaaatcttaatttattatcaatcaaaatgcccaaatcactaatagattcaacctcattaataatatggttggataatttatattgatgttttgagttatttttgccaagaaataaaataaatgttttattttgggagatgtttaaaccaaatgcattcggtcagggtcgttttcgcgtggccattttcgcgtggccgttttcgcgtggggacgttttcgcgtggctggggtacgttttcgcgtggggtacgttttcgcgtgagtacctgtttagaactcaaattggtcggatttgtgcaaaacttccatttttcgaattccgaacccgaattcgtacaaatttattaactttttaatttttttgtttcttgcggctagtatcttctacaataattggtcagtttggtcggatgtgcgtcaaacggaaaaaataattaaaattttctaaaaacacataaatagtataacaaaaaataacaaatttcagaacaaactaaggtcgcatttcatagtttcgtgaaacaccagtgagaaaattgttaacgttttcgggattcacattga

SEQ ID NO: 4025 - DNA, 3817 bp, Heterodera glycines
aaaactgccaaaagtaaggattagggcacttttccagtttatacaccccgaagcttccagtatatacgctcccaaattttttttttttaattattcgccttccaaagtttatgccaccgcatttctgagccacagacacaagttcgctctgcatgaaggagatgcagagaagttaaccattcttgaaattgagcgtcagaaagttgtattttttgatataattttgcaggagtaaaatttttggcgctatttaaaaagagggcctttttgaattttttttttgctcgaattttttttttaaatttattttaataataatgaatagggagtccaaaaatatttatttattcagaagaaataaaaatatccaacgaaggggtgaccacttacacgttagattttagtaaagtaatatcaagtccaaggagctcttttacagactaaatttttgtttaactcaatccatttatttattcgttttttgaaactgtcaacagatggagcatctgttatatctttgttgagtttagaccatattaaggccgttctgttgataaaagaatttgaagttttactggattgtggttttaacacaactttacgtctaagattataagggatgtgaccagaaaattgtgggaatatgtcttttttaagatgagtgagaccattgatgattttgaatgcctgaactaaatcaattgtttttctcctttcttctaaagtttgaagtttgaataaatcaagtctttgttcgtaaggtatatacggaagcctacatttaaataaagcaatttttgtaaaatatttttggcatctttccaatttatttatatcttttttgtatgtaggattccaaatttcgggcgcatattctaaaagaggacgaatgtatgtcttgaatactttggtccaaatacgtatagagcgggtttttaaaattttggcaatattgcgaatccttaaataagcagctttaataattttagtataatgatttgaaaatcttaatttattatcaattaaaatgcctaaatcactaatagattcaacctcattaataatattgttgcaaaatttatattgttgttttgaattatttttgccgagaaataatataaatgttttattttgggagatgtttaaaccaaatgcattagcccattttccaatattgtctaaagcaacatttaatttgcttctttcatcacgagttttgtaagaaacataaattttgacatcatcagcaaaaagcttgatgctaactcccggagggattacctgcgggaggtcattaatgtatattaaaaacaacagagggccaagaacagaaccctgtggaacaccagactgaatcggatataaattagaaaatttgttgttaattttaactctgtaaaatctatcctttaaaaattcagataaccaacttagcagttttcccctaatgccaatgttatgaagtttatttattaaaatattaataggaagggaatcaaaagctttccgaaagtccacatagatacagtcaatatttttcttaccgtatatgctgtcgtaccaatcttctaatactgtaattagttgagtattagtagatcggtgtttaacaaaaccgaactgatgttcggatattaaattattcagatgaaggaagttataaatgctttttgcaattattttttccataactctacatagacagcaagtaagagaaatgggtctgtaattatgtggatcatttcggtcaccttttttaaagagaggtataacaatagattttttccaaatttcaggaattttgcctgtgtccattgatattctgaaaagttcggaaattacaggagaaagagtaaggtggcaattacgtaagattctaaaggaaatttcatcgggggatgtggattctcgattcggtaaattttttaaaattttagaaatttcatcggcattaaattcaacatcagaaatagatggtccattgggattggaaggacaactgctaatttgtggaacatctgaatttgaaaaggattcttggaaaatttttgcaaaagtttctgcttttaaataatcatcaaaaataatttggttctcgtaactaagagagtggatttgttcaaaattttttgtaaatttatttatatatttgtagatagcattttttcctttattcagaaaattattttcatttttagtaacaaagttatttatttgaatttttatatgtaatgaaatgctatcatacaaatgcctatatttatcacggtttattttttgtagtttataaagtctggctttttccttaattgacagtttaagactcaatgggtagttaggctttctggatttttgaccgacagtgattttaggcaagtataattctacatattctctaaaaagaaggtaaaaatggttaaacttatcttcaatggtaaatttttgtagtaatttgtagggtaaaattgaagataagtttaaatttaatagattaagtttagtagaattataattgcgtactgtaaatgtatttgccttactcttattctgaggaaatgacaatgaaaaattagtggatagatgatcagaactaaaaatgtcctcaattaaaacattattaacaaaatcaggtttagaagagagaatcagatcaagccaagcactaccacgagtgggtccattagtcataaggaataagccatacttattaaaaaattcacaaaaaatatttcctttttccgacttagcataaggcgttccactggtccaagttatgtcctttgcatttaggttaaagtctcccattaatataaaattttcttcaaaatagttaccaatgaggttcagaatcttttttgtgaaattagcagaagtgttcggtggtctgtaaagtaatactattcttaatttttttgctccatttatctgaataatttggatttcacaattgaatttagagcaggataagacagaaaacgaatttacgctcgtttttgtcaaaatcattactccaccaccattttttccgcttctgctagcttcatatattttgtaattgttagtaataaatggttggaaaggtattttttcttttgcccacgtttcagttacaaaaactaattcaaaatcttttagggctataatcgcagtaaattcgttaagcttattatttagggatcgcatattgataaatgttgagtataaaaaattttgttttttatttagtaaagttttcgaattttctatggggtgttcaaatttcctatatttagtttgtaaaagagcttgcgttttaagagatttcgtgttacagtggccaccaattacacattaagagtcatcaacattatgcacatgacaaatacatttaaaagagtcggggttggatttgtaacggggaatgtcagaggcaaacataacatggccggcataaatgacagaattcgaattgggattactcatatggtcatttttgcaaatgccaataagtcgggaacgttcagcgagttgctgtttggatagagatgggcggaccaagacattgttaaatttattgtgatttttgagttttgtcttgttccgcagaaaattttgggcgtgttttttggtggggaattcgattttaatgagacgggggcggtcggacttctttcccattcggtaaacctgacatggccggcattcgatctcacaggtgtcgagcattgattgagcatccacaaaatcggagttgacacgagcagagggcacagtttcttcactttccggcaggttcaagaccacgacagagtggagtcggcgttcttcctcacaaagt

SEQ ID NO: 4026 - DNA, 1299 bp, Heterodera glycines
actttttcgttcggagaccgctcatgctatggacatttccttgtttccaaagacggatccaagaatttgctcggattggacatgatggacagacttggattgtcggactccatcagaaatggtctgaaggacaaattccgaaatgaggcttccaaagagaacggagcgagccaaaagaaaaagaagaaattcttcagaaaagacggacgtggcaaaaagaagaatttcttcgctgtgggagcgaatgtgatcgccagcttgggtgatgagccatggcgtgccggacgtgtgatcagccgaaaagaaggcacttacgacgttcaatttttggacggcacgatcccggcaaaaggtgtacaaccgtacaagccggatgaagatgaaaatttgaattttcttcttgacgggtttggtctgaagagagcctcatccggtggatctatcgggaagcacggcagcgatggccgacgagatcaaacgaaagatgatcttcgagaagcttccgactgtggacacaaggcataagaacgccgacctgaggatgcggatgatggacggaggcccggcacttttcaaggggggagatgttagggttgggacccaattgtccggtgcccattttgaccctttgtttcatttgtatttcccttctcccttcgttaagtcacgcccacttttccgcccataaatacccgcgatgttgacccttcctcatcattcttttgcttcttctccatttatttgttccctttgctcccaatcgatatttgaccccgttcgccctgtcccttctttttgaataaatatttcttttattcctcttcggactttggggcgtaacaaaaacacaacaaaatttaccattcactaaatttccaatttataattaataaattaaatttttaatttgaagactcgcctcttttgcgtctccgtcgcccaccaaaaaataaacatccgcgtcctctcccgtgctcaacaaatgcttcatccgatcaagcactgattgggacatgataagcaatatgaaaatcgtatttatctattaatgtaatgaaatgaaataatgggaattaagtgaattaagatattcaaaattggcaataaaataaataacaaaatcggctaaatccttatgattttactggactattcagctggctaatcatatgccaagcccataaacaacgaatgagtgaatggtgaaggcttcccctatttttggggggaaagattaaaaatcgccaacattttaattaatttatttttcaatttgtatgtaaaaaccaaataaaaaaa

SEQ ID NO: 4027 - DNA, 8372 bp, Heterodera glycines
aaataccggtcatatgtcaggttgataattcttcaatattgaacacaattacgcccattaatatgccaaaaagcgtgcataaaataaccaaacagattgaactctttcgaacagcgaatttttaatataattcattctaaaaaatgcttttgtttaaaatatacacaataaaagttataattaattgaaaataataattagtattttgaattaaagtaaacataaaatttaatgctttaattggtaataaattattttactgcaacggaaaaaggacgatcaacaatcgttcaattgagatcagatacaatgccaaaattgagccatacgatgctacggtagatgccataagagtggccagacagatacggtagtctattggactgtactgaaaaatgacgtcaaccaaattgagggcgaacggtgcgacaacgaaaagttggaacagtgcgtcgtaggcgatcaaccaattgcacactttgtggtgctccctgagaaaaggggttattattttggctcccttttgatgggcatttaatgccatttttggaattggtcctcatttttcgctttttggttggatttttgtaaaaattagggttgaaaataaaaccccctgaattagaacctcccccccccttgagggggttgaaaattagagcccccgggggctcttttcactaagtacagtatttgaaagaacttttcgcatctctgggctctctttcttcgaaatatcgccaaaaaaattcatttttaatttatttttgtttttattgctcaattactaatgaattttttaaaaaaccgaataagcaccttttgataattgtgacactgatcagcgaaatgttgaggacaatggaaatggctgtaaaaagactgggcaacacaatccatgctgcagtttgtgaaatgcaattgaacttgtcggacaacacgagtatggtgtcacggtaatcatcagactttaatttaagaaattaataagaaaattgattttaattttaaaattaaaactccttaatgcctcctttaaatcgcttgcaatttattttattttactaattaatataaagataattaccacaactttgttcaaattgtactggaaagcacatttggcggcaacaaattgatggataattgaactgaaaaaccattcaaaaatggtcacatttttcgatgaatccaaagccgaaaattttttagtcaaattatttgaatcgaatttccttgccgaggtgatattcaaataagtgcaaatatcgtcactcatttggttttttttgctacaaagaattttttagggaaaaacaatatttataacttacgaaattctggaatttttaaattaataaagaacacttaaagctatcgaatgataggatgtcgacaaaatttaatgcttttcagcaaattatgtgaagggatgtaaaaatttgagattttctgaaattcatcggatatttaatggctaaactcactttaaaacattaaaaaacctttatctgataattaaaggaatgaatctaaccaataagcacttatgaagattcagcgccacttaattaatgtgcaatttcatctggccgtaattattgggtaattgccacctgtccacctctttcgtaccaggtgttttcgacagtgattgatttcgacagtacttttaaattaattttctacatgatttattgtacacatgaatttatatgaatatacaatttgcatatacaaaatttataattgaagtaagtaataaaataagacttgtatgatttttttggcaaaaatttatcgcttttattttttctaaaaaatatctcttgctagactgtagtcaaaaatacaacaaatttcttagataagattctcgaatcgtgtggaaaaaactgctaactaatgccgggttcaagtgccaaaattcaaatttgcaagctcttaagcaagaattcgaaaactcgaacacctctgcaatgtataagagccatgttcttatcattctaattgtcaaaatttaacgagacttatgccatatagaacaatttttaaaaaaataagctttactgtcgaaatcaatcactgtcgaaaccaacactgtcgagatcaccactgtcgaaaactaacagcacccccatctgggtaggggtcaactccgtcctgccaactccgtcccagacaagtttaagaatccataacttttgaaaaaaatgaaatgttggcgatcaatttttgagaaaaatttttcaattcttaggggtgtattttattacgctgatacaacatttaatctataatttaatccaatccagtttttgtaaaatcaaaaaaatgtacacagtaagaaatatgataaaaaaggtccataggatgatagtttaaggacgagatttcccagagcatatgaataatttatgatttgttaaataaatttcaattgatttgtggatcatctttatccactatttttatttgagcaaagtgctgagctaaaactttgtcataaattctaaacggtttcaaaatttgaaaattttagacagatttgcgtcatattttgatcaaaaacaactttttgatggaggtttttatagccaaattcagactcgactttttaaacgtcaaaaatcaatttcaataaatacacctctaagaattgaaaaatttctcaaaaatgatcctaaaaattttgtattttttttgataaaaatttttggtttaaaatttgtctttattcgaaaatttttttaaaatattgaattaattttaatttacaattgaaatatataaccaaagtgttaataaaaagattttttctgccttttatgtgcctattttgcgattttttgttcctaaaattcacatccctagtgatcatgttttcattaaacgactgactaattaattaattggttggattgcctttagacatttctccgtgccaccatcgcttcttctgtcagttacactgttcactttaattccgccgtgtcaacgccgtcaattgtgccatttgaattggtgaacgaggaccaatgagaagctgacactgatgaatagggtgtaaaattatatgcacatgcatattttttcctgaactgcgggaggcctgaaacgcacgaaaacatgtttttagcttggtttgagcttctaggccgtacttccatatgcatattttgcatatttgtgcatatttcgcgatttatgtgcatattttggcatttcgttcatatttttatgtgcatatttgagcatttttcaacaaaatcctctattaaaacggccccctatattaaagcggccatttgggcctctaatgaccggaaatttttcaaaaatatcattttttgggtattttattttatatttttggttctaaaatgattattcatacgatatttagctattttcgagatttttatgcaaaaatttaacaaatttgaagaaatttgtaaagttttacccccaattttattggatattgaagcgatgcccaatttgggagacaaaggcgaaggttcagcggaagaaagacgaaaattcggaggacaacaattttaacaatgtccaatttgatttgatttgtggcaatgatttgtttttctgaattcttaattcgaaatgaattttttatgaacttctgttgacactaacttttaaattagctaagaattttcaaacccggccgatggctcgcttagtcaactgaaaatttgaaggaattcccttggaaatttggggtaaattgaacgagaatttccgaacaatcaaaaaataaaagtgatttaaaattatttaaacaatttttaaaaaattaaacacgctttttaaagaaaattttaattttgaataattcgaagtatcagaatgtcctgcttggtagaaattttttagtgattaactcatagatagggttgtaaataacatggactaaaaagcgattgccaaatatggactaaaaactgccaaaaaatcgttttaaacactcacaaattccaaaatatattcaatttgattaaacaaactttaaaaatatcccaaaattaaaaaactcaaaaaagccaaacttttattaaatcctagcttcacaatttaaaaccagatacactatgggtcaagcccagtgttagacaaaattgctcataacgccaaatagcgcatttggcgtaaatttttgcgcgttatttcaaaatttacactgaaaaatgacttttttgtattttttattttgatctgcaataactcgcttcatacccaatgaaactgaacaaatttgatatttaaaaaaagcttctgcaaaggagaatctttttcttagcgaatgctaagcaatttgacatctcagaaaaaagttggtggagtttcaagtttttatcacgttataactcaagtccaaggccgccgtttctaacaaaaatgctaaaattaatcattttttattgattctaaatgtccgtagtgtttttgtacctttacaatcaagattattataatttgtgaatttctatttttcatgtgttagagacatgaaaatagtttgccaaaaagagagaaaaagaaattcacaaaatttttcaccaaataacttttgagtgagccttatttttgtattaaatttccttattaatcgatgcaaacacataattaaaatcgatgagttagtacgccaaaatgagagaaattacaaagaaaaagaaaatgacgagatagcactaggcttttctctgcacagtggagttgacccatagtgcagatacatcttacattttttggtaataatctcattaatgttgtcagtgaatgtggccaatgtcacgcttattttttgggaaatggtttttctaatttttttaatttaaatttttgtcccctattttaaggttccacagatcgagaaaaaaagtttatttaattatgattttttttaataaattctctttatgttaataaatatttagaaaattatgtgtacttttcaaatagtgttgtaaaagattattattttttgcaaaatttaaaaattcaaaggcgggcaaattatgggtcattagtagtggaacaacaatggcacaaaaaatggcggcgttttcatcgcggcaaaatggcggcgggcggacgggtgacctatggcaatgccaatgtcagttatcagatccaaatgcaatcatgggaattttcttttcttttttttgtttccttcattatcattatcattagtagagattttaaccaaagataaaggtatgggattaattttttgcctttaaaagacgtgccattttttgaatttgtttcataaatcagtgcccacatatatcataatttttattcccttcttttacccctttattcagaagagtccaggattttcagaattttttgttttttttaattattaactcggtttggtgggggcttaggaaaaaaataaaaaaatttccgaaaaacttttatttcaacaaaaaatggtccttaaatgaaaatttttttgaattgttgagctcgctctctttctctagagaaccaacattcaaaagccaattcggtagaagttttgtgctcttttgggaaatttcctccccgacatttctttccccgaatgtcgggggggggggggtaaaattgtaattatttttctatcttttttggcagagagagatagcgttggatgttcagtcgcggggtgggggggccactaccgtatcaattaccacactgtatacattttctgtgtaatgtaatagtgcattttagccctaaattactaaaaagcattctcaaacataatggcccacttgctgtacattcgaatgaaagctaacgactgtccgggggtcgcttttgttcgatccggtgggtgcttttttaattgctgaaaaaatgcctgggtcaaaatttaaaatttggcatactgtaaaatgccggtttggtatgtgtcggactgagactattaatgtatgcacgctattttatttttcgcgctattttaacggcacaggatgtgaaatctcattcatttcggagtcatttgcgcgcaaggccaaccttttgggcaatattgaccgttccaattgtcagacaatatacgtgccggtttttggaggtggcaaattgcttggctggtgagtggtgtcaaaaacagaatcattgctttttaggaggggacggaagtcgaccaggaatggtcccaggatttcatcttggagagggtaccccacccacgaaaattttttttgaaaaattaatgattttttcaaagttttatgaagaactaataagttttttcaaaattttccaaaaaatcgctgaaaatttttaaaataatttttttgtttaattttttttatgaaaaagacatttgcgcctttgtccccccaaatcgtgttcaaaattaacttcttttttttccaagctttgatagcctaaacagctttaagtaagcgatagaaaggattgtaaaaattaaaaaaaatttttcgaaggcatgacttaaaaaattgggcaattaattctcttatttttacacttattttctttgcacgttttgcagggtcaacgatgttgaaattagaattgatgagctcaaattgaaatttgggcaccgtttgggggtgatggaggacaagcatttgccgatgtgagtttggcgtatttttttttattttgtaaaattcaattaattaaaaaatgcccttttttgtttaaacatttttctattttaaggtattgccaggagaaattcgacatgctgtaagaaacagcaattaatttttattttccaagcaattataagaaatttgacaattaattaattcaagcccccaaaaatttttcaagattattttccaaaaattatttgtataattggtaaaaatatcttttttgcaaaaaaaaaattgatgattttttcatgaatttttggatcaaaatttcaagaaatttgaggtcttagagattgttttttgcaaattttatgaaaattaatattttcaaaatacacatttttttcttaaaattttttccttcggtgaagggagggagtgaatttcttagtgctattccttggattatattatggtttctggcgccaaaatggcagcgccgaaacggcactgatttacccaatttttcagccaaattttctaaaaaaaatatatattaaaattttgtccaaatttttaaacacagccttggaaccgatttgctgtatacccatgaattgaacgtcgactatggccgaggaatcacccgcaggggcaaaattgccaaatttttgaccgaagaggaaattcggcgcatacgttctcatcgcgggcgggtggcccgtgccatatgtgcaatgatgggaattttttttgttgtgttcattatcattatcattagtagtgattattaaccaaatgataaagggatgagattaatttttgcgttcaaaagacgtgtcattttttgaattttcttgataaatcactcactgcctacacatatgtatccacaatttttattgcttccttcaacattttacgcggaagaaaaccttagattcagaaatttttgagtgttattttttcattaacccggcttatggaggcaaagggaaaaaaatctttcgaaaatttttttatttcctcacagacgcgcagattaaatgaaaaaaaattttgaggcttggcgaaagctgttccaaactgtggaatcaattagataaagaacttgcaaaaataaattcattaaatcaattaaaacaaaaatcaaaaattctttagagtaattaaaagccgaaggactgaaaaaatatatatttttaataaatagttaaatatgccattcgataattttgataaatttgagccgctttgacttatatttattttaaaataaattttcagaaatctatgttgtttttaatttgacttgggggataaggaaaaaataaatttaaaaaattcacacgaaaattttattacgatacaaatattaattaggtaaatgaaaaaaattttatgtagaggctaaaaaagcaatatacaaatgtataaaaatatggaaatataaagtcgtaatgcttcagcgtcaaattttaattttaaaatggtgcttaaaatatcaaaatttattaaccgacaaaatcattttgctatttaattatattgaacccaatttattaattaccctgatcagctgtaaatgtatcatttgttaaatggttaaaaaaagacattaattgtttaatttattgctaaataaagacaaaaattaaattttacatatttttatacatttctatcttgcttttttggcacatatttaaggtttttgaatttcgtatgttttgcatatgcggcctaaattctctaacaaaaattaaa

SEQ ID NO: 4028 - DNA, 1226 bp, Heterodera glycines
  unsure (1)..(1226): unsure at all n locations
cttaagctaaaacgattgaaatgagttttgcgcaaggaatccgttgatttatttgggacgaaggatctgtaccaaattttgaaattggacaggagcaaaagcaacttgagcagtgcacaaagtgatgctgatttaatatttctcacgttttgatgtttcatttttcagtcaaaaaggcctattatcgccagtcaattctgtggcatcccgacagatttgcatcggcacagcatgacgaaacgacgcgcgagttggccaagcagaaattccaagtgatcggcagagcatatgtaattttgggggatagtgagaagcgcaaagcgtacgacgaaacgggtgagaaaacattggaattttagtcagcgaatccgactttatctccaatttgttggcacaggttcgctcgacgatgagaacgaattttacgaaggcaaagattggtcggccgtgtggcgaggcgttttcaaaaaagtcactccggaagagatcgaagcgtacctggccaaattcagaggtccgtatggaaagaacaatagttcaaggatgaaaatgtataaatgaatctaccgcttctcgttaattggattgatttagagaaattagttttaaggattgtttaagcaattggtattatatggttcatatgggtttgtattaaattgaacttgtactatcaaatatatttaacgacgtggagaggaagtcggataacgaaactttcaaaattacatttccaaattattttttaccttttaaggttcacaggaggaaattgacgaggttaaggaggcgtatcagaagcacaaaggcaacatggacaagatcatgcaaagtgtggtcggcgccgagcatccggacgaggaccgaatccgcgagatcgtccgccatggcatcgagcggggcgaactgcgtgcatatgctcgcttcgtcaacgagcccgcctccgctcggactcggcgtgccgcgcgcgcacaacgcgaggaggtggaagcgcagcaggcgctggaggagttgcgccagagggaagacgtcagcaaagggacggacggcgacgactctttgggcgcattgataagggcaaagcagcgcaaacgcgccgaaaagaatggttcngtgtgctgtttccggacattagaacgtttttgaagcacattctccttcatatttgggtgcacttcaccccattcattccaatctcattgtcagacatattttgaaaatctccc

SEQ ID NO: 4029 - DNA, 9316 bp, Heterodera glycines
acccgttggttaatgggctatttttattgccaaatgcgtgcggtccatttgtgccatgcccgccacaaaatgtccacctcgccttttccttgcccacaagtccaacagttacatcttcgccgttgagcacaatgccattcaaacgccgctcagtccgtcgccattgtgcgtctccgagctgttcagcgacgactttcgcggctccggcaccaccgggcagctgttgctcatccccggcaaacaacggccccctctgtcagtggaacagatcgaacgctatcgcaacgaggaaaagtggcgcaggaaaaggtcagcaatcaattcggcaatggtaaagaattgtggtccctatttaattttcctgctccaaatcagttttcgagggtgctgttcacgaacctgaactcgggtttgagccaatttcaaatcccggacccgtacaaaaagttgaaattcttccaaataatatgtcgttgagatcaatcaaatctgacgaaaattgtgaaattttatccaattatcaattgacattagtgcagtttgcgcaaatcgtcttccaattttctttccgtttgtctatgtcagattgactttctattcggtgttgtggctcggctggctgttctcgttgatgtttgcccttttgcttgtccatgtccatccaaagtgtgcgccgtcgtcgtccctttcgctggaatggtggaagggcacactgatttatgaggcattgcttaaatttattttctttttaagtgagtaaattttcagatttggactctctccttccatggtaatttattttccgaatgattgaaatggtctttaaaacattggattttgtcatgggagttgatttggattttcggtgaattagacccgaaaaatgcgctaaaatatctaaaaaaatttgtttattaatgaattgtatgaatttttccgagatcccttctaaccagtatcatcttattttaattatctttcccattttcgactcggacggcaacggcgtcggcgatttggccggcattcagctcaaacttggccacttgcgccgaattggcgtgggcgctgtgttccttcgtccaattttgcgcacagaaagcacgggaatgggcgtcattgacttcacggcattgagccaacaaattgacgcgacaatggaccaattcgacgcatttgttgatgcagcgcacagaaaaggcatgggaaatttttaaaactgagcccttgatactcagatatgatcaaaatatttgaattttatgattttttttactcatatgagcgaaaaattcggcggaaattaatttaaaaaaattatcgaaaatagtctttgcccgtgtcattcttttaaatttccattttaaatttccgtcctttatttctttttatggcccttccattctcttcaggcatccgcattctgctcgaccttccgcttgccgtcacttccgttgcccacccgtggttccgtcgcagtgcgttggctgcacgacccgaaaatgcgccgtttgccgacttttaccactggcgacgaagtgccgtcccttccaactcagcgttcgtttcggctttcgacggttccatgcttaaggcactaccgcttctctgctcgaatattaaattaattccttttttagtatttccatgtggccaatcgtgccgatttgccggtactgaactggcaaaacgcaaatgtttcgagtgccgtgcgggcagcgctcagtttttggcttggccacggcgtggacggcttccatttggcgggcattgactatttgcaccggacagctgacggacggagaccgtcgtgggacgaggtcctaaccaaaaccacccaaataatgaaattaatgtacattagtcgaaaaacttgaggaatcagaggtccatcccatctgtcaattaactgataggacgtcaccgaaatcattggaactgattttaaaaattcatttgcttctgttttagattgtcgcgattctcaaatcgtttaaaacgaatgcggaggagcagtggcgcatcagacgaagagacggggaagggaaaatgtaaggggacagaccgatccaagggcgtagccttggaggggctgacaaaggataggtacccaagtaaattttttgagaattttaagcaattctcttaaaaaaatcacaccaaaatcattttttggcgaaaacggctatagattcccctaaaacacaccccctaattaattttggatttccaaaaaaagaaaaaacaaacctaagaatcgaatttttgaattcagccccccccccgaatagtgtttcatattttttcccatgtttcagctttctcttcacttcccatgagcatttgtccgaggcgttaaaggtgcgtctggtggatgaggtcggcctggacgcggtggtgaacacggaactgcgcgacttggcactcggcaaccgcgtctgtgccaacaaaaccgcacacgcagtgccggcgatgagtgtggccgagtgcgccaacgaaattttagcagatttgttgctgttccaccaatcgttcagtgagtgccttcaatttcaataccactcataaaagaaatattcggagcataacttttttttgatctgcgtatactcgggtttttattgactatctaattcaaaaatgaaagcaaaacaaattctaaaaatttggaactccttttttaaaacatttgtccatgcatattttttcgaaattgaaaattttcttaattcctctggataagctcttggctcatcactcattttgtattttttcttaattggccgtttagccaatgtttggcccctttggagtgtcggcggttcgttcgcccgtcggttggcctcgcgcgtggacggcaaagtgtacgcggagttgatcatgctgctccaactcgcgctgcccggcactccgattatttactatggcgacgagttgggactgcatgacgtgttgaacttgaaggcatattttttcatagatttgaaatcaatctaagcatgggtttttcagtttccgcaacgcggcccaatgccttgggattcgtcatcgccttttgacaatcgaacggacggcgcgggcagcattgaaacaaattttgacgttaatttttgaattcaatctttactgtaggatgccattaggatgagttggccgactcgcgcagttttctgcacagtgttcgtgccatggctcgccttcggttgcgcgacgccgcgctgagggcggacggcacgggcgatgtgcgcacatacatcacaaaacgagtggacggacaagcatttgcactctgtcgctatttgtgctgcccagaggaggaaaagaagtggaacggaggggacgagtcgcagcagcagcggatgagcacgacagtttatggcgatgtaattttttgacagtttttccgaacataattttggcacttgggaagtccacagtcaataatgccatacttattggcatgccttcatattaaattgtacgatttccatctttttcccccgttcgcagagtgttgtcgtgctcgtcaacttcggccccgcgccactcactttttctttgtccgatttgccgcccttccatcgccgtggggtctatcggcgtggccgaattgtcgctcgcagtgcgaatgccgcctccaaatttgcgcttggtcttggcattgagttggacggacggcaggtgcacatcggagccgggcagggcatcgttttcaaggcgttcgaattttgagtgtctgcctgcttttccatttttcaccctttctcttctccaattttgctttttgagcttgtctttcttctcccaaatcacttattattgatcactttggcgtccttgtcaaaattctttcaattttctttatgaaagctgtctaaactaaataaggacgaccacacccgttgagcttctcattatctatagaatctcccaatttctggtcactttttgttactattaaattcgcccaaaattcatttcattttgattatgttttttatccccttttgagcttaattgttccctcaaatttgtactcatcgtcgttactttcgcttttcacttacgcatttttccattcagcgagcttattttttttctttacttttttttcctggcataaatatctaactttcgcttttgattatccaagaattttattaggacacaaagcaaacgttggatttaagacatttaattaaccataaattataaaaattaaaatcagaatttcaaaatgggaaagagagatcgagtcgtgggtaaagcactttttctgaaatcactgcatgcgttcatccaataattgagcatcagcgagtctgttttttggccaagtgaatgccgtagatgagcaaagaggtgagcaatgagtacgtcagcatggcaacagtttcgccaatctggtggccatggatttcaaggtgcggcgatgccattgccaacagattgacgaagccagtcatcagattggcacacagaaaatggagcagtgcgtttcggctgattgctgccacaagtccaccccggcgcgcatcctgcggcaacggaacgacgagctgaatgagctggaacagggcacaggtggtgctgaacagggtcaactgtgccaagagaagggtggcaattattggcaaaaagcttttcccgaccgccgcgtaccatggcgaacgagtaggccaagttggccaaccttcgggaggcgctcaagccaaagtgtgcctcgagcaccctctgcgagcagtagcagcacaggctgaaaccgagttcgcccgcgacattcagcggggacagcttcttgtctctgcaaatgttcaaattgtgaatatacgaaaattcggtttttgctttaatccatggagtgatgatggaggttcaaggttatgaataaagaaatatcaaacgaccatccattttaccagaggtttcttctaagaattttgccgcccctccacccaaaaaattgagtcgctttcattgccttagcgtcagtttggcgctgcaccgcgcgtacatcagcgacagcgcgtagatgaagcagtagccgaacagcgagaaaattccctctctgttctggtcgagaaagccgtgccgtgactccccgaagtcgggccgtaaaatccattgctcaagcgttgtaagccgaagcgcaatttggtagacgaggccgagcagcacaccgagcggcataagcagcgcattgggcacaccgatgacgaacagctggggaacaaatatatcagataaaatcatcaaatttggaaacccaatagaaacggacggaccctgacacaaaagagggtgaggaagaagttccagtggacgccgtactccgtcacgtcttggccatagccgctgaaacggatgaacacggaacggccaactccgatcagaaacagtgccaaaagggtgggcactcggaaggcgaacagttgcctaaaattcaaaataataatttaaattagttagtccaaaaaatgttttctaattgtaagaaaatttactgaaaacaaattttttttgaaagattttagcaatttttaaaaattttatgatgaactatcaagtttttctaaatttttacaaaaaaagcactgaaaataaaaaaaaaaaatttttttaaatttttctgtcgaaggaaatgaaacaaatgcccacaataattttcccagtgtggcattgtgccacggcattccaaaccctccgcccgtccactgacattgtcgccttggccgccctctgccgtgggctttgtccgcgtgccattccatcatggtcggcgatagcattcacaaaaatgaacgccgctgtgccggtgtccatcagcgactgaccataatactgtgttttggccatacggcgcgggaacagcgtgaaatcgaccgccaaaatggccaacgaagtggcgaccaaaagcacggccataaaacgaagagaaaattcaatttacataaaaaaatcaaagaaaaggtattcacaaaatttacttacctagcctaattcgaaaaaataagtctaataaaaaaaaattattgagaaaattcaaggaaacaaaaaaaaagtcaaatttttctgaaaatttagcaaatctatttccattaatccttaggttgaaaaaagctttaaaataatttttaaaatggtgaaattttggtattttttgcagcgacgttgtgtcccggcgacattttggggtgtacccgacttttcacgaaaaaacaaaaacggataagaaacgccgaaaaacacgccccagaaatgcctaattaaaatgtgcaattttcttttgaatagcatttaattccctcggctgatcatttcatgtacgtgtcgagaaggggtgatgcccccggtcgaagcaattcatcccggaagcagttctttccccccccccctccagcccggaaaattttaatttttcaaaaaaaaaattagtgaatttttcacaggaaaatttaaagaaaaaaattttcagcgaattctctctcacctgaacattgtgtgcgcgtcgcgttgggcgcgtgccgcgtccacgcgcagcggacgcattgagcgcagcggcgtcacaccgcaggcgcgcgcactgtcacagcaagcgaaaatgacggcacagagcgcgagctgaacgagcagcagaagggccaaatggtcggcccagaaggtttggccgagaaacattggcaccaccagggcacagaagtccaagcagaacagcgacctaaagcgaatggacaaagcaattaatttggtaattcaattcagacataatttgaaataaattaaaaattgccaagggatcggaaagcactattaaaaacttattattaacctaattaacttatattccccaaaatccattcaaatgcaaattttgcaaagaatgaatagacaaaacagcagatttatgtgactctttcaaatggaattgagacctaaagctaaaaaactcgttatcgcaaaattaaatggcatttttccataaaattgtaaaaagttgcgcttttctaaattttcagtttgcgaagtggcttaaaggaatgcaagaatgcaaagtaaaattgtcctatgaataagccaacccaccaattggccaaatgccgtcccggcattccgacaaggcattggaccagcacattgcggaaaagcatgcagaacacgccgaacacaaagtacagcgccgtctcagtctgttgagagaaatcaaagacgggcagcagtcgcatcggcggcgaaatggaaaaagtgcgccaacttcaataggagtaaaattattacaataagaccgaatgttaagtaaaaggcaccggaactccgctaccccttctatgcactttttggcattttcaagaccattttttgtggaattaatccgcggacccggaaaatttcagcttcccgataaactgtaaccaggtctgaaaatctgatcagctgaagaagaagaagccccttgttttccgaattgtcacaaacaaaaattctttaaattaaaaataatgctttaaaggcaaaacgccaaaattaaaagtaatgaatttgaataagaaatttaaaaaatgcaatcatctcacctaataagagcgagagcactctgagttcgatttgacgagttgtgcgagagaaacattttatacaaataaactggagagcaaaataatttatgcaagcggcaaaagtgaaaatttaaaggaaattcgaatttgtgtgttcaaattgagggatgaaaaattgcttttacatacaatgaatgtgagaataatgagaataaattcctccgaaggaaagggagaattgaacagattatgatggacaacagagagaggaaaattggatggacgaaatgggggaaaagcaaacaaaactaaaaatggacaaaaaaacgaaagggattcattcattcattcaattcggcggatgggagaaaaatggaggaagaaatcgaccgcagttctgttggtgatgaaaagtacgcataacaacaacaacaacaacaacaacggtcgtgaaattaaaaacacaccctgccaaaagaaaagagaaaagcggagagaaaggggataagggaaggcatttggcacgggaaggaaaatatggcagacaaaatgtgtgtggggaaataaacgaaattcaatcgacggaatgggaggaaaactatcattgggttattaaaggaaatatgatcaaaccaaatttaggggagaccataattcatattgtcaaaaatatcagaaaaatgttgtctaatcgtgaatttatgcgtggaggaagaggcacacatcgacggaggcggaaaaagcaaatgccaaagccgagacacaaagctgaaggaaagaatggcaccaaatgtacagacaggaagggtataattaacaaacaaatgaagaagacatataggcaaaactagcaaccaaaaacactaatttcagttgtaagttttctctctgccacgtcacaactcaaaaacaaagaaaaaaccgatcaattttttggtggaaagaagaatttggcatttctattttctggcaatttgtttctttttccttattttgtcttcctctccttttcccacaattaatttcttcgttttctcccctcatccgtttttccctactttctcctccatttcctttatctctcatcccatccgccctccctctcataccccccccccaatttcctttctttctcttccaattcatctccctctcttctccctctcattggcttttttcctctttcgctctctctctctctctcttccggtctctttccactaacaataagtgcaaaaacagtgtgctccgtccccttacgtcgtcctcatggaatgcgcgatccgttccgtctcgtgcaacattcgctgggcggtcgggagaagtcgtacacataggaggggcgcagttggtactccgagggaaggcacagaatgccattggtggccaaattggtgaacagccgacgcatttcatcgggcgactttttgtgggttatctgaacggagtgccaaatcattttttaacccaataactgcttgcagatcacttgccaaatattcgttgttgcagccccgggaacgatattcagtgtctggaatatgcttatgttagtcgctcagagcgagaataggaaacggcaaagaataaaatttaaagaattttcttgcctttttttagaaattttatgatggtttgctaaactaagttttccaaatttttgaaaattttcagaggggaacgacggggggtgggatatttcaccacggaaaggggcgtctatccgcacgtggaacatttaaaaaataattgcatttttctaa

SEQ ID NO: 4030 - DNA, 6288 bp, Heterodera glycines
catttttattacaatttttcattacgttactaaaaaccattttaaattttttttttaataatttgaaattaattttaatttcataaaaattttttgcatttttcgttgtaagaaaattacgaaggatgcaaattatttttcatatttttttgcttatatgcataagaatgcataagaaaaaaagagctcaaaaaattaaatttttttcatttgaacgtcagtaattgtcaataaaaaatatatatatatttttggggtttaaggaaaaattttttatttcaatattttgaggtttgtcaatattttgtaaatattttgagcaattttgaaatttatcatgtaaaattcagaaactttaatataaatgtaataaaaaaaattcttaactaacatttttaattgaacttatttttgaaaaaaagcattctcaaaactcgaaaaatataatttctttgtaactataatcaacgaattaattctttgtgtaagctgttatttaattttacacacaaatgttcatttttcttaaatatttgctcaaaaatttcggacttttttcaatatttttgttaatatttcggcctttttcgtaaatatttatttcaatttttcgtgatttttaataattataactcccatcactaatagttattatacgcgtaattgtgcccaattgataggttttcctaaaaattaaatgctttttcgaaatttattatgcaatatctaattaattataaattaaatttaactatatatatttttttttttgcaaaattttaacatttacttattaatctttcctctccatacactgcattttccttcgcaattttgcgaaaggtcgtttatttaaaaaaggcagctgcaatcgggtgattgaaaggccaagaaaatagggctgctgtcttcccattcaaataatgcaaagtgacgtcattataaaatatttatttattttttttactaaataaaataaatactctaatttttttcaataatttttaaaattcatttaaattttcataaactttatttttttttggttttgaaatttttttttgcttaaaaattaagataactgggtcatgtgcacttttttacaaatgttctcattattttagaatttttttttaattaatcattttttaaaaaatgataatacaaaaaaattttaaatcccaaatgtgaatttttaatcacaaatttaattaatatttttaaataaacatattttatatttaagtaaatatttcagacactcgcaatttttttaatttgttaaaatttaagtttttcatctcatgatttgacaataatatttttgattatttacaataaatcatttacgccctcgcaaatgaaggaaaaagttatttaggtgtaaacaattagttcttaatgagtgctacctatttatttcacgccccaattaattagtgtattatttgttttatttattttttccattcaaaaattaatttaatttttttaaatatttaattgatttaaaataaataatctacatttaaccgaaaattatgcatcaaaactcaaaggttgaccaatttaacaccaattaaaaacgattatgagctaaggtacccttccaaaaccattcatcagatcacatgctttgttcctgatcggtcacacattaatttgaacaaaattgggtgtttaggtactcaacacacctaattacgcccgaggggaaaagcaatcaattttcctaattagaaaattaactgcaaattaatactccaaattgcggtggataaaaataaatgatttcacatctttgtcaggatgtggcgttgtcattgacaactaaaacatttaatccaaagaattttcgattatatattttttttatcttttttgttttataggttttcatttattttaagttttctttttgaggtgccgaggcaccattttctcctttctgtgccactatctcttctctctcattcgctctcttgctttctctctctcgctcatttgctctcttgctttctttctttctctgctttgtactatttcaaggcattcatcattctacgcgtttctcattttaactttctctttcttttctctgtactatttcttcctattctttatctttttacaatttttcagccaatgcattacatccacccttaaatacgcacgcatgtcatacacttttaaaggcaaccaagctttgggtgctctaaaattttctctatttctttcttcacttcttttctttctttctttctctactctctctctctttctcttctctctcttctctctcactcatttcccctctctcttctctctctctcttttctttctctctgtctctctcagttccttagacatctatttgtctctctttccgtgcattgccattaactctcaaatttttctatttctttttctgtactatttctctctctctctctctctttaaactttttctcttccaatgttatttctctaatcttttgttctctaataattctttctaactctgtgccatgcttagtccccctttctctgcttcttccttattttcaaactgtgctgcattttgcccgaggcaattttttgacattacgtcatatgacgtcattggctattgaaaagatttttgtgttgctgacgctgccgcgggcgctcagttggcactcaacgagcattttgccatagacagcgaaattaatttgaattgagtcccccagtccgcccgcccgttattcaatcagcagcaaagcaacagcaggcagacgtaggaggacaataagtcggcacaaaattacggcatggcacacagtgtaaatgatgtccttttccttgaaattaattatttgctaattcatgcatcgcatttaacatgctttactgggagaccaaaaatcaggaaaagcctatcgccttttcgggatttttgcccgggttttccacaacaactaactagatctcatgtgccataatatctgcttgaatctcgcattatttacttattcaatgatattatatttttgcttgataattcggcgctttttaaaagtgggaccaaaggggggggggcccttttgttcgcaaaattttttatgataattaatcgtgtaaaatttgttttctaggggttttatgggtcgcttgatcgcaaatctgacatccatttcaatgaattcctaatccctagcacgaaatcaaacaaaaaaccgaaaaattaattttatggagttttcgatttttttcgaattaattggttaaaatggaggtcagattcgtgatcagtgacccttaaaatccccaggatcaaggcaggactagacaaaaatttataaaaaacaaaagggtccccctttggttctttttaactagcgccgaaaattctttaacatttttgtagaaaaaaaatgtgcatatttcaacaaatgcctttaaaaaatcttagtttttctaccattttataattcttcattttcttggcattattgaacaaatgggatttaattctggcaattactcatttttcacccttattttatttcgaaaaaaggattctttattagctgtgcgcccgccaccacggcattatcactttcggcatgccatttatgaacattttttaatctctccaatttttaatttatacgagagttttggtctcatgtcttggaaaattttgttctcatgcatttttactggaaatcattttaatgttttgggagtaatattaatgaatttgccaaattatctttctttgtcactaattctgttttgctatttccgttttacaaacataccacatcattatccatcattagaaccattatgaatgccatttttggccaaatgcttaatttttctacacttaaaactttgggaaagcgttgttaaaacttagtttggaatcttaaggatggacattctgatagcaattttgccaatttttaattgaatattacagtgatgtcaatttcaataatttgggatatgaaaaatttcatccattattttttcttaccaataatgccaccattctattcaatgccctcatataaattcaattgaattcgttcttggcatttttcagtttttaatgtgcccttgattgtccttaagaagggtcatttaaaaatggttaacctaatcgggcacaaatacatttcccatcccccttctgcaaatcccatcatcatccccatccacatcatcaattttggcacacaattttgtggcccattcattcattttaccccttttgcggccatccccgccccctaaaatgcctcggccccccgctgagtgaatgaatgaatgaaaattgtactgaacaaccttttggccacaaaatgccaatgccattgtcgaggctgttgttgtccgcttgctgcccacgcgccaattttcatcccttttctcaaacatattttatgtgttatatgtatgcttttcgtttgccccccgtggggccccggaaatgaagcggaaaaagccgcaattttgtccacgtctattttgcccgtcccagggcggaccgccggcggggcggcgatggcaaattttttattttttgatcaaaatttattttaaaaaaccttttttcgaaaaactcgaaatttaaaatattaaaatgcaaaataaattgtaaaattgtcatttttgcgatgaaagaaatgaatgttgtgatttaaatttggaaagcttttctctaagataattaagagaaattaaaaaaagtctcagtttttccattttaatttggaatttttatattataatattattaaaatcttgctttttcatttctttttttttacgaattttttagtttacttttacccataaaattgaaatgataaacgattatcgtcggcgggcgtctttaagtccccagcacaaataaatttggtcatttatcaaagtcactaaattgctatttgccttcccaaatggcaataacgtcatttttaaaatgaataatatgaatatatatttttatttcaatttattttttagaccatttttaaaaataatattttattaatattccgtaaattaattttttatccaaatttgttttaccatgcaaatttgattttatcatgtttggcaaaaatataaattcttgaaggcttaaatatattttcttgttttttactataattttaaaaatttcaaatccagttttttttttgtatttttttatttaataaattgagatttgtgggaatgacaaacgaattagacgaggaagcccccacacaaaatgccaaaaggggggggggggggagactttttgttcgtgacaaatttgaaagaaaatgccaaaaaatgtatttgtgtgccgttttttgcccctctaatccttggccgggcaattttcaccggaaatgacggcggcggaacattctactatgaattggaccctatgagaatgtcggccacaaaaacaaagcccacaccatcaattggtataaaatgccacaaataaacgaaaattacaaaaaaaaaattaaatttaatgttcgcgaaaaaaatggaccaatttttttgtgaattaaattctcctaatgggaaaattattatttaattcaaaatttttatttgatttgattttgattttaactttttaatcaattcatttttaaagcaattttatttttttatcaaaaactaatttatatcacttatgtataattaaattttttgttaatttttctataaatcgtttccactttatttacagccaaaagaaatccaataaatttttctccataatctttgctcaaaaattcgtggccaaatctctttttgtgccaacataatcctccccaaataccaacagcaggaaaatgccattgtgcttgctctctttattcatttattgtaaattaagcaccatcaccaagcatcagcagatggttgtgatggtgtcattttctcatttgtgccctattcattggttcggcatttgcgccgcaaaaataaattgaattcaaattggcattatgtcgtcgcacagtgaaaatgccaaaataatgatggcattttcattttaatgaacttcaattcaacaaaaatgaatgggtaaatagattcatacacctacgtaaagcagaaacgtttttccacacctcggcattttgttttaacaataatggcacgtcacttggcaaaattgctaatgaaacaaaaatatttatttcccacggccacaaaatgtggccaaacattggctaaatgtcacattgtacatatgcagttgctatgtgaaaattacat

SEQ ID NO: 4031 - DNA, 877 bp, Heterodera glycines
  unsure (1)..(877): unsure at all n locations
gatgcatttttctttgcaattctatatttgaatgctaacaaaaatganncaaacacatnntataaataattacaaattctaaaatttaacttttttttttaattttattatttacatagatttttccttttcccgaaaatttacacttattttgttcaaaatttgattggtcttttttggcaacttttttcacctcgatgctctgtgctatatgcctttcctcatcatcaagtaaacttgttttttaaatttttatttatgatgaagccgagaggaggaggaagggaatgaatgatgtcatatttttgcccccatataaataggtgaagaatgcgaagaattgtcgtctcctccgcccgtctctcatctcatctcatctctttctcttcacacaacattctgtcattccgccgcacccatcgcgtttcataattttccattttccgcttcgttttttgtgtgttgttttctccgcctcgccgccggcagtaaattccatgcgcttttttagaatttttttttgttgtttacaccctctataaatatgcctaattatttgtgtcacatcaaatgccccgagactcttgacacaaaaattcttttcagtgcctattgacaaaaattcttcctaactccgcgccggcggtgcaaattggcgccccatttgggaattaaaaaaaaagaagtttttttggctgatttatattaaaacattttgtaactttttgctaatttttaaatattaaaaaatttttgtccaaaaatcacaaatttgttaccacaaaaggtacaattttttaagaattttttttttcatcaaacctgcttttgcaaaaagctgctctcgaggcttgcccgtaattccgcataatcctta

SEQ ID NO: 4032 - DNA, 2606 bp, Heterodera glycines
  unsure (1)..(2606): unsure at all n locations
attcgctgtccccgtcaatgaatttntgtgctggaatctttgggggcccgcatttagtcaagcagccccatcaaattgagtccagtgattttgagtttttgagtaactattgagtgctcttctgattatgcttcaccccgctttaaaatattgggttggatcaaacaaatttttcttttttttattcaaatttttcgatctacctgatattttttttttaaatgcaaaattaaattatttttttaatttaaaaacttaaatgcgatgataacccataactcagccaataatttatgctaaattttaccatgaattcgtaccatggcggccggccaagaatttgttatacttttgtttcgacccgtccaacaccaagaattttgttgcaaattcccctttaatcagttaataattatactataccatttttttaattttgatcagttattcttgatcaatcactttttttcgtgctccattttcttccacattttctcccccggtaccccgtcaatttcccctctccccctgtcccattgtgtcgtcgtcgtcaccttcttgtggtggtgggccgacaattgagaacgggccgggccattttctgctgtttgtacacacatattacgacgacgacgacggactctcgggactctcgcctcatcagcagcattttgtgctttctgagcactgtgtttagtgaatgtattgttgttggaggagaaggaccaatgtgcgggaaagtctcggctctctcgtcccccctcccgcccccggggcgctcctcactctgtcgcccaactctcgcgcaaagtcgagaattggcagaccatctccatccatgcatgcatataatgcttcttcccatctcgcgcaactcctttcctcctcctcggctagagctcttcttctgatcaatgtgattgatcaattttgtttgtatgtcgggcttcatcccactcccacctttttttctacaaattttggcaattaattatttatattttcagcttaaaatgcttttttttaaatgaaagcataatcattggcaaaaaaacatatgtaaagcttatcagcaatagccgcaccatgtgcactaaaaattgactagaatgaattgagccctgaaatttgagaataaaacattatggcaaaatttggatggcacctgttgcccccccccattttctatgtacataaatctcagggatgttgttgcttgtctcgggtttcgtgttctttgatgcgtgtctcgttctcaccattattcaatcccaaaatcagctttttgagcccgaagctctgagttcgaagattttttgatggcatgcctgcaagtctcgtaatttatttttcttctcgaaatatccctgttgtatattttttcaattgggctgcgggaaaaatttatattcacgtagttttttttctattttttccatctaaactatgtattcagaaccttgattaaagcatatttgggtctcattttaattgggaaaattgaaaaaatcgactaaaattaataaaattcaatttttttttttttttttttgtatcggcgcgccaataaaattcgctttcgattttccagttttttcttcatcattcatcagtattacgatgtacggactgatttaagactgcaatttgttttatggctagctgtggctgatcacttttccctttctttttattgttccggatcaatgggcgagcggcgaaaattattttcaaaacccgatcagatcaccaatttcttgctgtatttgagctggatttggttaaagaattcatagtaatggggcaattgaaagtcagtggcatcaattctgaggtggaaaaaacatttaattaataattcatttattactattttttataattatcaaattctttaaaattttcggctccaatttttaattagagttcgaccttcgatccaggctggatttttcctggacttggatttcctgggttttgtccacaggtccacaggtcataaacattttgtttgcttattgaaacaaatttcaaaaaaatccagatcaggcccggatccaggcctcgaggagcctggtggatttttctggatttttgtgcaggaaacccaggtacaggcatttttcaaaaattcgttctaaattcgacaggtaaatttggttcaaacccaataaaaaacatatataattcaatcaagtttcgcgaatatacgcctatatgctggagatttttctccagaaaatctgatcagaaacgctgatcattttcacttttccaatttgttttcaaatttttgaccatttgcatataaattcaatgcacccagcagccagcagcagtaaaatttttcaatcccaaaatgaaagtgnnggcggacggacgcgcagatgcgcaaacactcgaaaatcccccgaggggagaaaatgcattaaaatctcttccagcggcgacgctggcggatgatgatcatcatccacccacgccgtccgcttctcaagcgccgccgggcgggtgttgttaggtcaatccctcccgtccagcagcagcatcaagctctgcccgggtcggaagtgtactggcgcgaatggggatgatccccccccccc

SEQ ID NO: 4033 - DNA, 4076 bp, Heterodera glycines
ataaatgtcagggatgttgttgcttgtctcggggtttcgtgttcttgaatgagtgtctcattctcaacattattcaatcccaaaatcagctttttgagcaccgaagctctgagttcgaagattttttgatggcatccctgcgagtctcgtaatttatttttcttctcgaaatatccctgtcgtatatttttacaattttaaaacatggcattaactaaatcaaattttcttgcgcgtcattctgcttttctcaaatcaaaatatcaggtgatgctctctggaatctcgctctgaaaaaatatcgagaaaagaatgtttactctaaagattaaaaaaaattttttttgtttgcttttcaccgatttatgtcaccgcttttcggctaccaaagcaaaaagtatggcactttttcaagggctgcgggaaaaatttatattcacgtagtttttttttctattttttccatctaaactattcagaaccttgattaaagcatatttggggtctcattttaattgggaaaattgaaaaaatcgactaaaattaataaaattcaattttttttttgtatcggcgcgccaataaaattcgctttcgattttccagttttttcttcatcattcatcagtattacgatgtacggactgatttaagactgcaatttgttttatggctagctgtggctgatcacttttccctttctttttattgttccggatcaatgggcgagcggcgaaaattattttcaaaacccgatcagatcaccaatttcttgctgtgtttgagctggatttggttaaagaattcatagtaatggggcaattgaaagtcagtggcatcaattctgaggtggaaaaaacatttaattaataattcatttattactattttttataattatcaaattctttaaaattttcggctccaatttttaattagagttcgaccttcgatccaggctggatttttcatggacttggatttcctgggttttgtccaggaaatccaggtccacaggtggcgctaggacttttcgacagcggacctttcgacagaaggacttttcgacagcggacttttcgactgtaaaggacttttcgacagtgaaggacttttcgacagtacactaacaaatcaaatttttcattaaaaacaaataatttctaataattaatcttgtctttttattttattatttgtgaaataagaatttttaattaaaaaatatatttttataaattactggtttataaaatatcttaatttagcggggtttaagaaggcattttagtttattgcactgcatttttggagttctcatgaatggttttcttatcaataataaataatttatttgtttgacctccgtttctcgaccggcccaaaaaagagtgaccatgccattcataactattactgaaaatatttttgaattgctgtgaaaaatgtcttctggttctagtggtcccgaagaaggtgaaattggggccgaactctttgcaaatgaagcctttgaagaagcagaggaaccagctggtcttgtccaattttttcgaccagaaagcaagcgtggccgagagttaatcagaagcggcggttttgaatatgcctttgaagcggacagcggacttcaagaaggtgcaaaacttggaattttttgtccaaaccccaaattagggatcgaattttggcgctgtatcaatcgccccccgtattgtttttgcctatttcggactttttatgcctttttaagtgtctatttagtatgcctaaaaatctaatccctaataataacaattgaatttaaaaaaaattaaatcccatttgagaactggccaaatattttgcaaaaaattggcttggatgccgtcaaatttggcatgaatggaattcgtggtaaaggcatgaaaagaaaagaaatttatgttgaacaagacgaaaatttgctcgcgctttacaacacacgtgaacagcgccatccctaccaatatttaagagctgtggcctatcgaatgccggacccaatttaacttttccataaaaacggaaataatttcgaaacaaaaataattattttgcttactaaatgaaatagcattgtcttttttaaaactaccatttactgtcgaaaagtcctccccttaaacaaaaattttttctgtcgaaaagtcctttctgtcgaaaagtccgctgtcgaaaagtccttctgtcgaaaggtccgctgtcgaaaagtccggcgcccaatattttatcgaaaaattatttttaaaacaaaattagaaaatcattaaaattatttaaaaaaaaagaaatctgaaaattgcacattcgataaaaaaaatggaaattgcacagtaaccaagaaatgaaaaagaacaaaagcgcaaatacggtaatcagggaacagcgaaagaagaggggaatgaaaaggtataagacacaaagtgcgtggatactgtagcgtcaattttggtacaatgtaaccttaatgaaggcattaggtaaaataattaatagtgatagggttataagttgtatgattttgcatattttttctgcgcatatgctatgaagaaaggggggctcaaaaatagcatttctgcgttaaaactttttggtttggagaaggtttttagtgcatataaaagcatactttggtgggtttttgaaaataaatgcatatttggccatttttgcattttgagagcatatttcggtcatttttgggaaattttcacaagaaaaatgcgaaaaaaacgaaaaatacaccccctaaaggatcgactttttggaatttttaaaaaaatacacccttaaaaatcgaaaaatttttttattttgtaagacttttggaaaaaattatgtatataaaaatgtaatttcgttttagcataaaataaaaatttgaaattgaatattttgcaactgtctaaaaaatgcttataaccctaataatgaatgaacataataaaaacggtgcacgacgtttgagtgccgagtcatttttgggtcctgcgtggatggaattatgataattaatttgttagcgattaattgaagaaatggacgacgacggcacaatcaatttcctaaaataattaattaaaacattctatccccttccttatttaagggcactcccactcattagtgaaaggcacgaaagcttgaaatacagtttttctggggctctcaatttcagaaaaacggtggaaccaaaaaaggtgtgccaaaacagggagagaaaatgccatcaaaagagtgccgcatttttgctcataaaatgaataataataataatatggatggctttattggatggttgattgaatgaaatatatgttggaaaatgaaaatgatatggcatttgccaaaaatgaatgtgataatagctaagctgctgcataaataatgaattttgaaataaaaatgatcaaaaaatggtgatcagtcaatgattatcggtcattcctatgccaaaaatgctgatcagtcgtcagtgggtgatcgatcattcccaactccctcacatccatggcacctaaatgccaacaccattcttgttgttggcatccgcttctggcacaactgcagccgctgtttcgtcggcatcaccaccaccaccggcaccgtcatgcttttgtacctttttgaaattttttttcttttttttacacataataatgaatacccgggggttttcttggtcgctgatcacggatatggcaccaatttcgaccaactcgagatccgttcccgaacttgaacaaaaagtcgagatttgaatttcgagtttttgactttttggatttggggttccgaataagtccaaataattgtcatattcgtgatcaacgatcttttattgtcttacaaattatcaaatcactactcatctgatcaaaactcacttgtcgtgggtcgttcacgtacacttcatgtgccccaacaatttgcacacgtggctcctcctcctcttcatcagttgcggttttggtgccgtaattatccgagccattggttgtccttgtgcgccgcgatcttctgctgggccgtcggaactttctccagcaaaa

SEQ ID NO: 4034 - DNA, 1233 bp, Heterodera glycines
gacaaatcactaagtttttttaaagtttcattgaaaaatttttcttgaaattttctcatgagaaaacgagctagtcctattaaaaaagactgtcccgcgtttcgcaccgaatggccggcttggccggcaccgccggaggtggctgcttttggtgccgtcgttgctcattttgctgaacttctgcggaccgcacatcattgccgccttcagcagtaggctgtccttgttgttgtggtaagtgccggtttctgtgctgcaactcggccaccaccgaagtgccatcgcatcgcggcggcgacggcagtgacgtcatcgaagtgtccaacaagctgagcgcggccagcgatttgctctgcctggaaaattcacatttcattacgatatattttgcaattatacagtatgagtaaaatatatataattattttgtcaatgcgcttttccttataataaatcctctcattgaaacgacaatttgaaaagctttaaagccggggaaacaataatgataaacaattaagtatttccaaaatttttcaaaaaagcatgtaaaattttctcaaaatgtcattaaaatgcattttttttcttagccccaccccccttttaaatgtaccgccacggcaaaacgccacacctttccaattgttgcgcagcagcgaccattgaggcgggcaatttgttgcggtaggaggcggaggagacgttgtccacagagagtcggcgatcaatcgcagaagcggacgcgtaatggttgttctcctcgacgtcgtccgcttgttgctgtgcactcaccacaatgctgtccagttggtccaactcgcgttcaacctgtaagaaaatcaaaaaatctgggttttcaataaaaattttttgaaattaacgaaattttatgagtgctctgaagcaaagttttaaaaaattttttgacggttttcaaataacgaggacccagacaaaattttgtgattgggcccaaaaatgtaaagaattttgaaattcaagtccatccctgatcaaatgggtgagatgaatccgtctcattgtgattgatctatgaggggaatgggaatatcagaaaatgacaattttacatatatttttttaattttttcaaaaatcatgaatttataagaaaatttgaaaaatatttcagcgatttttactgggcttggctttttctgtgcctctgctgctgctgttgatgctgttccgtcttggccatcctctgcc

SEQ ID NO: 4035 - DNA, 2098 bp, Heterodera glycines
cgccacttggagaagcgtcgcgggacactgcgcgtgaattcggcactcggcaaccgtcggcgcagcacaaagcgaccgttatgcatgggtgacggcggcacgcagcgctcgctgccgtcgctcctctccttgttgccggaggcgatgccgttgttgtgacaacaccagcccagctggaccaacagtggtcgctcttccgcgtccatgtgccgctcgctaatgccacccgtgccattgtcgtcatcgtcgtgaacttcccacagcgagtaggaggcactcgccggtgttgtcgccgccatgtgcatggcgttcgcctctgcatggaatttggagaccaacgcggccaccacatgtgcgacggtgtgtatgctggacactcgcatgcattttgttgccaaggcacccgtcgtcgaagaaggggaagactgttgttgttgccgctggtgattttggatttgttcatgaagatggaagcggatcaccccgtggaactccgtgttctgcgagtgcgagagtaataaacaatcaattcattttttaaattaattgatgatgaagctatcggaaaagagcaatgcttttcggaaataaatcccgccccctccacctcctcaaggggtggacaaaaatcacaaaaattcagtaatgtaaacaaaaaaaggaaggccgaaaaacataatatgaaaatgcccatgcccagcccgtcaacgaaatgcccccgtgaaaatgccacgaaaagcggcaagtttaaaaggcattttttggtttaataaccccccccccccctcccaacggcatgggaacacatgagcaccagcagaaaccacacctcgtcaggcaaactgatcgcgaatatgtccatcattgtggcgttccagcgctcaattgtctcgcacaatttctgcctttgatgtgccgccgctgccattttggacaaaacaaacaaacaattaattaaatgggttttacaggcaagaaaatgtgtcaaaaatttgaaaggcaagaagagaattagtcaaaaattaaggcgatgatgatgaaggaagtcaaaaatatgcaaataatattatgggagatcattgaaccataaggtcactgaaaagtgaaaaaacaaaataattaaattacagtaacaattattataatagtacagtatctctctctgtgtcggagaattggacaacaaaacgcagcaatttcatggaattttcacaattgttttatttcattttatggaaaaattttaatatgtatatgtgtatttgtatgaaatagaaaaataggtgtcaagataactcatacaaaagtcaatttgtacaataggcaattcgtcgtacaaaagcttaggccaggcctaattaggcgttggcctaggcctgcttgagttgggttttttttgttgaaaatttacaattttgtataatttgccattgaatcggaaaatgggtgtattttaagaaaattgggtctcaattttaaaatttttggaagaatttctgacaatcacagtccccgcaattgtactgctacacaaggaaaatctttttgaaaattcaaattttctttgtgtctaagcccagcagaaaaatgggtgatttgccataaaaatagaattgaaaatagttttagattttttaaattcattcaaaaaagataatggaaaattaattgaaattttaaaaaaattggttaatttccgtaataatttcgctataaatgcaattttgccgtggtgaaatatcaatttaattaacaattatttttgctttgaccaacacatgccaactttttgctagccgtaaaaatgattattaaaagaggcgataaatcaattttttctcggggattgacttgttaaaaaatgaaaaaatttctctccctgaaaaaaatgatacatcattaatttgttcattaaaacattttgtgtaaaaaataaaaataaataaacgcgaaaaaaacggagattcaaaatgcaaatgaatgggatgggatgagatgacatggttttttaatcttcgctaaaaggaacaaagaagggggtgggggaggggcaaaaatatgtacttaaaatatgtaaataaaattttttaaatggtgt

SEQ ID NO: 4036 - DNA, 1106 bp, Heterodera glycines
aaagaaaggattttgacgggagaggaaaagccggcctcccccggagaaaattaatgctttttgttattggtggaggaaacaaaactagtttattgtgtgattattacgtgtaaattaccatatgtaaattgtgtgtgaatttcgagattcgttagcatataaattattagcatgcgaacggtaccccctttctccacctcctctctcaatttgttttccaactacattggtatgtattgtttgcccgaggacgtcgagaatttggccaagtgatcaatagtgacgactccttgatccgtagtcaaataatgagtcgagattactttaattaacggagtggtgaccttcgtcccctccccctccctctgtcaccgccgtttaatggagaaaagaaagcgcccaatgaatgaatgggtgaacagcaaagaaattgttgcgcttttaaatttaataagtatttgtatattattcgttttaagcgaaattgggaaatgctgtgtcgtgttaagtcaagcaaattaaaaataagaacttcttgaaaagcaacactccgttcttatcttctccccttccttgtaagcatgtctcaattttcctgtgattttgctcccaaaaacagaatcaagcctcctaacgaataaccacacttcgcaagctttaaaatcagttctgtcctcaaaacatgaaggcgatgagccaagacttttattgctttcaaaaatagtttcgtagatacatagtcaccaaaatggggatggtctcttcatgccttaaatttttgcgaaaaatgaaattctatgtattgtatgtatatatacatatgtaggtatgtatatataaaatattattattattattttaaaaatctaagaaaattttgtttctaaatgcatgacaataatttggggtaaacccaactcatctaaacccaattcatccatacctaactcatccatacccaactcatccatagacccaactcatccatgcataaaaatgccacgaagcagaccgcacaatcaaagaatgccacgacgatgactcgcagtgttatggatgagttgggtatggatgagttgggtatggatcgagttgggggtgactcc

SEQ ID NO: 4037 - DNA, 4236 bp, Heterodera glycines
acggttttcgaattaaggccagtttgtgagcagagatagtgcccaaccgacgacaattaatggcatcagcggactttcgcgtggcgagtcacgagaagcgacatttcagaaaggcagaaaacgcattcaagaggttataaagggaaacgggcgaactaatggcggggaatgggcgaagaaattaattaccgctcccttccctcattttcaaattatttgctattcttcatagaaccctgcttcagatctccaaccagcttcacatcaaccagcactgcactgatctcgcatttggcttcttcaaaatgtgcgtcaccaaaaatttgacgcgcggccgtctccgttcgcacatcgttgtcgcctgtctgtacatggcgtgccgaagcgaaaacacttctcatttgttgttggattttagtgatgccacccaggttatgctttattcatacttattttttttaatttttccaaaaaacaattttcggcatctctctgaaaaatattttactttgttttggactagaaatccaaaaattcgacacatttttccatcattataattcccacccgacacattttgatttttcctctttttcaaataatttgttatttaaagtttagataaatatattcgaactcggtcgcaccctaaacttcttgactcgctctttgttcatcaaacttcctcccaccgatccgtgcatgtacgtgctccgtttctccgctatgctcgattttggcgaccagcaaaaggaagttgcgctgttggccacacggattatccagcgaatgaaacgtgattggatgtccacgggacggcgtccgacgggcatttgtggcgcggccttgcttttagctgctcgtgcgttgaatttgaacaggcgagctaacaaaatatccacgagaactttattagccaatgatcctgtgagttttctcctgatcacttctttttgtcttttggggcttggcttttaactatgccaatgttattgtttttcgtattttccaggagtgtgatggacatcgtccatgtcgtcaatatcagttatgcggtggtaaaacgacgacttgacgaatttgccaacactccgtcgggcggattgacaatcgatgagttctccaccgtcgatttggtaattttaaatttcctccgttttttaagtttttataaatgactaaggaagagagcgaagatcctcccgccttccgcgagtccaaaagaaaacagcacgaagaaaagcgtagaaaggaggaggaaattgttgcggaatcggctttgaaggaagtgcgttaggtgaaatcgcagaacggcacccattgactcgtcacccggaaatatataacttttttgggtgggtgagatgggcataattggattgcaaccgatttgcaggcaaattcagattaactcatttcataccggacccttcctatattaattgaataatataaatggcttttagtttgaaccagttcgtctcgaggttgagcaggcactcctaaaaaggttcaaacgctcaccttatgccaaaatgattgcgaatggtttggtggacgacactgtgccggaattgtcacaggcaagtgatatgctgcaggaagaagtgatcgacacggtgtatcaactggcagaggaacaccaacagcagcctggcgcaatatcaaacaggtgccgtacaatcttacaattagggggcggaaattaatgacaaagccaataggctagtaagttacttttctcgttttggcacttccccctgcccaaaaaaccttcgccgaccttgacatacatgtgcaaggggtgtctcaggccaagggtcgtacgacggacgattgagacaggggggggtgtacgaaaaaggtccacttttttccccgatgacgaccttttttctttcctttttttgctatattttttggcaaccttttgctattaagaaatctgagtataatttgttgacagatttacaccaaaaaaggtccattttggaattttgagtcaggtgacgaccagttcatacttttaacaacacttttcggccgcttttgatcaaattttaaattttcccccgtcgtcgacgatccccccccccccgttcccacgacgacccctttcctcttttacagccgccccccttacgacgaacgaagggagggtgtccgaggcggcctcttacgacgagaggggggggggggtgtcgagacaccccttgcacatgtatggtcttgagtggtggtggatggagcaggagagggttttttaaattttaataaagcactttttcatttattttcagcgggcattatgccctttatgggccatctttggcttcgttgggcatttccaaggatcaaaaccagcagcgaactcagcaacaccaacagatttcttcctttccctcctctgattcaccagccatttgtccaccgactgttgggaaccaatcaaatgatacaattatctcaaacgaagacctcgacttgacaggtcctttttagtggtggccttgacattttacaatatttaggcatcgatgacaatgaaattaactcgtacattttgacagacgtagagacgaccatcaaagagaagtattggatgaagcaaaactccaaacatttagaagtgatggaggaaaggttggaattcggtttaaaacaatatcaatctaataaaaccatttttcaaattcctatttttagaaaacgacaacgccaggaggagcaagaacaacggcaaaataaagaaagcggcccaaagaggagaaaacgtgccccgaatgttcggaagagggaagtcaacgcggttacgcacaatgacgcgatgctccatgtcattcaggtggagggggccaatgccgaattcattccttcactgttataaattttaggaaagaaatttgtccagcaaaattaactacgatatactgaagcaactcgatgatgaaagctgacaaagtgaagttacaggaaaacaacaatgttttatcctttaatgtaatgcaagttcacaatcagtcttcgctttaggcggcacacccaaaatattgcaatttttgaattacaaaatattatttgaattgttgctagctttttttctttgttaataaacttttcctaaagcgttgtttttttctaatggttttgttacaatatttttctatcaaaatgtcatgacacaatatcgaaaagagatggtattattttctactccatcaagtgtaaaatgctccattccaaatcagtgacctctttttcttctcgtcacaagcttccaactcataaggacagtgtcggcatccttctccacaacatttttcatggaacagcaattggctcagcgatttcaccggctgcgcagtctccggacatttataagacaattttctgtcgcggatggcccgcaaatgtgcggtcaaaatacgccgttcctggccttcaaatgggatgactgattaaatgcaaaaagaaaaagcttaaaaactgactggtcattttgtcaaaacaaagccatgacacctaaaaaacaaagagaaaagggattgatcatgctaattaattcctatttgcacaccttcgtctttttcatcgtttcttcaaaaagcacataatcggccaatatttccccgccttttgccggcacgagttcgaagacgggtcggcccggtccccggcttttggcaaaatgcgtcggtagcactttttccacagttatacgcgcaatttcagcaggaatttttggtgtcgtcataacaaagtgctgcacaaatttacaaaaatatattgttgtagaatactaaattattgaaaaaccactagaaaaaatacttctgcttctaattatatgtagccgggatggcatttcgaggcctcaaattttttcggtaatcggattccgtgccatccctgataggaatgtactgtaggtatataggtcgagttaatgttaaacaggtccaattaaaaattaaattgctattatattacaattttatttttaaatttttgcaaaaacattctagtcatcttcatctaaaaggcaaatttgctcttttttgaagaatgatcgttcaaaacggactgttgcacactaatcagaactcaacatcggcagctcattgtcagtttgatttcttcctggacacgatcaaaagtgccaacaatcgcactgaacttcttgctttgttctacaaattgcctgaagtctgagttgtgaattctctcaccgtggaa

SEQ ID NO: 4038 - DNA, 1421 bp, Heterodera glycines
  unsure (1)..(1421): unsure at all n locations
gatatatcacagaagcggatttgnacgctttgttcaggtcccattaatcaaaatgataaaaattgttgtgctgtcattcagtaaaagtgttaatactcagtgatgcattgttcttgcgctcgccttgccctgccaccagcctttgggctttgatttgttcacttagccaatgcgacggcggcggagcttttcagttcagcaaatgcgtcgcacttttgaccaaagttcagcgggagctgttgagaaaggcattgacaaatgcgcaaaattcagaaggttgtgtaaaaattactttttttctcttaattcgttttaatttggttttcttttcccccattgttttttgtttccttttcagatggtttccaattcgctttcgttctgtccagcttcacttcgcgtgtctataacttttttggtggtcacgaatccttccatcggagaaatctttcacaattttgtgaattttcttccccatcgctctcttccgatgcttttgatcgcgccgctgcaattgttgccacttttgaagataatttgcttgccgttttggtggaagttgctgagagggagttttctgctttgaacatggcattgtttacgcacattttaacggagtacagcacggcttccgccggtggtgaggaggtggcattcaattgcctggcattttttaaataaaactttattttacagtttattcgtcgattttttgctgccgcactatccaatccaacaacgatttctgttctacatcaaatttttgctcaaaaaagagatgaatgttttcatagagcagagagccgacggaattgggaagcgatgcttcgcattgttgtgacaatggcaccaaatgggcaatgtttgcaggtgcatctcataatgctgaaaaattcaattttaaaatttcgtcttccaaaaaattaaatttgtttgggatttcatgctatttcaacatcttttttatttctttcagtgcctttttgacgattcccttctctccgatgctcacttccgtccttttctcattgagcgtgtgtcgctggtcccttcgtcttccgctgattgtcggccgcgcaattccgaaaaaatcgccgattttttggcgttgtctgcccccgccctttcattgacggcatttctttcgcatgtccaactttttgtcgaccgttccaaagttgtggagatggcgtcgctgcactcgcatttcgtccaatctttggctgtcgtggactttgcgcgacgactcaagtgaatttgctgccgatgggcattaactggtagcaattgaattggggtcattgacagctctggacagcgttgttcggttcgtgatcagctgatggtctggttgggggcaattgggccccaaaaggttggaaattgccgggccctttttttgcattaattttggtaaattt

SEQ ID NO: 4039 - DNA, 913 bp, Heterodera glycines
tgatgcgcgagttgcgattttgttggacagcgacgatgacgaggagacggaaaaggaacaaaacgcggaaaatgggtgcgattacgacgaggaaggtaagaaatggaagtgattcactgatttgacttgtcatgtcatgtcagctgcttctccctctgatcggcccgcttatttgcgcgattgtttggaaattcttttgcagtccaatccaaacgaccaaagcattaaaatgtaagaattcaattgatttcatttaaaccgaatgcaaaaggtggcattgggtcggtgcgtttcgtaccattccggaaatgttgcgaaaaaggtcaatcggatggaacactttgggcgaaggtttgatggaaatgattcttcagttaaacaaccgatacaatttacccgattttgaggttcgttaatgtgaaagaagggtcattaactaattgttttttgtttcttttttactttcaaggaaattcgagtggaaattctcaaacttttgttggcccaatcacctgaattggtctcaaatgcttttcggtaattgtgcttttcaattttgattgtgattggctgtttcttcagaatgatttcttcccgttgctgcccaatgtcgcggcggttccttttgctcagttccgttgtaaatgccgccaaatttttggcaaatggcggcgaagagggcgcaaaaacgggggaaaatacgccgaaaatagagcaatccgtgcgtttttgactacttttcctacacctagttctctttagacaaataacactaatcaaatcggtgaggggaaggggtgcaaagtgatcagacgatcgacgacactccaaaagggggacagcaaaacgcatgagaacggatttgcacgcagggaggcaaaaaggcatatttggattcaaagtccgtgagtgg

SEQ ID NO: 4040 - DNA, 4493 bp, Heterodera glycines
  unsure (1)..(4493): unsure at all n locations
cgcacatgttgttaattgtcaaatacaattttntggtttattaaaaaatttggcaaagttttttatttttcaagaaatattcgctttcggaacggataattttgattcaaaatcaatgatcatcatcctcagtttttcttaggccattaacttttttcttacttcgtcaatgcctattcattcttggtttaaaaagaaattttttgtataactaaattatggactataaaactcatacaatagataaaaaactcgaaaaatgttgcatttttcgagtattttcgtttcaatttttttttcttattatcataatgtcatttttcttgcatttataaattccagaaaatttaagcttccttttgttaccaagaataagtaggcattgaccaattaagaaaaaaaaaaaattatggctcaagaaactgaggatggccaaaatgatcggatgccataaattgatcaaagtgtcctggctgatgtttttgccacaaattgcgaatgttttttctcctccgtttttgtttttttaccaccgcatcgccctgaaaatgtgaaagaaaatattataatataataattattattttgttgcttggttcaaaagctttaatgacatgtgaacaaaaaacacttttcaaatgtaaccaatattataataataataacaaatcacagccattcattcattcatttatttatttattccatcaaaaacaattgaattgttatgttttcatggggccaaagtgttcccaaagaatcgcaaaattttgaagagatattaaggatatttgaaaaaagggcatggaaaaaaagagtggagtgattggcatgggttgggattgggttagaagcgccgggcaggcctgaaaaagccgggcatttcctttttccggtcccgtgggactgaaatgtcgggacaccgggagtgccgagatgacgcgagaaccaaaatgactgtaatttggtggctcgtcgcggtcccgtgtcttgactgaaatgccgggaccgtgacagccgagacggggaccaaaacgactgggatttggtggcctcctccggtccatggactgaaacgccgggatttgataataagcaatcaatcaaatttgccgtttccacggcttaattaggcggcgcctcttttgatgggtttttgagtcctaacggcgaaatctgtgggaacactcccaacgtaaaacataaagcataataaattcattttcatttattcatcaccccaaaaccacacaaaacatttgctgctgatcaaagcaaacaaaaagtccatccaaagagtgaaaaattcattaattaattgcattatagtcaaactcattaaatttatattttatttgttaaatttcatttttattttattttattcattcaaacattgattctatgctaattttattgttcctcctattaatcgcaatttaatattttcaaattttgttgctaatttccatttgctaattgaccacttttatttgtttaactacacaaaaggacactcgccaagcataataaaaactgtccattcgtagcgctttcttctctttttttttaccatatatttttgcgcatagttttgttttacgagaccaaggtatggtatttgttgtcatacggtagaattagtaaatattctaatgaaaaaaatcagttttttcgtaaaaattcctataaaaatcggaaattttcttttatatttcgagaattgccataagtcagcagcctccatattttggtctcttaaatttcatcgcacaatatcaaaaagtccactcatttttcggattcaaacattttggcccacttaaattaaatgccaaaatcccccctccccccaaaaatcagagtttctaacaatttaagtgtttctgaggctaaatttaaattttttttttctgattgtgaggctaaattttttggggccaaactcttcccgaaatccgttttcatggtaataatatgtaataattttatttccaccacacagatccaagcatgattctgctgattgtactcatcagccaatgactgatattatataatttttgtttgttttttttcaattcaatttcattttttcttttaaaaatactcaaagtgtacaaaaattttcattttttcacacattttttaaaatttcgctgactcactaattaattaattaattaccacaaattctacgcaaagattgggcgagaaaaaggccgtctctgtgcaatcaaattctagtcatcgctgtacaaaccaaacaacaacaaaaaggatggaggactgctgccaattgttataaatgatatttaattttttacatttttttttttacatatttgtgtttcctcgagacccaaaaatttttgccagaaaaaactcgagaatgacggctaaataaaaagccccgagaatttttttttctgaatcaccgtcactctcgagaagcactaatgtgtataatgtttgtttcttatggtaaaaatcgaatttgcactggaaacctattttgaaaaccaagtcgaattttcggaaagccgctaaatcccatttttatcaccggcaaaaatatgcatttgccccaggcactatttgaaatttcatttcttgttacatttttatttttgatgtataagtatttgtgctgattatgatcaaatgtgtataataatcaaacaatgacccttctttaaacataaagacgtagccaaatgcaccgaggggtcatttatctgaaaatatggcatttcttgccattttaaaaaaatcacggtaaacgatggattgattaatgacagggtaattaagcaataattgctcattttttgttggttaattagcagaatggtcggtcccctcccccctcccatggttacgtctttatttacgttgtcaattatttcgattatgcaatcacttaataagaatttttttgccaaaatttcatccaaacaatttcttagtaaaagaacatgtgcaaaagttgtacataataattcattcatttgtgaccagccattcattcatttttttagaatttcctacaatgtttgtatttccaaaattcaaatatttttttcccgcaaaatttaccaaaaataacaaacagtgaaagcagcttattgtgtaaacacaacactgattcaatttctaaatgtcatttcccattattttcatgttttagtcaattcattaacaattattatttttggtttgtagcacattttttaattatatatttttttggtgacgcatttatttttttaaacatttcacatcattatttttacttggaataaatttgaaaaaagcatataaaactggaaagaaatgaagtagaaaggtattctcaaagctgcaaatatagagtagataaggccggtgattggagagggattaccataatccgacaggagagagacggtaactcaaaaattacgatcaataattatgtaggatggcagagaaagaagggtgcaaagatgagaaaaaaataatgtcaaaataaaaaaatttgatgagaaactcatgatatcatacggataaaaacgatggtagtcaagagaaaagtgtggacggtactgtagccgtaccgtactcattccaaagtgtacggctcattggtcggcaaattgttgtgtgtgttgcgccgagcctgacgttcccggaaaaacggcgtctcctgcgcagaatttttttttggttaccgtagttaggacaaatacacagtataccataccttatagatgaaccaaatatttgaggcaaacaaaatgaacagaccaacaccggccaactacaaaaaagtgagggaaaaagttaattaaattaaattttcctttttcttattcactctcttttctgtacttccctctctctctctctctctctctctttgtgtttgctcctcttctttcttttctttttctcttccttttttctctctctctgcccctggcattgggttttcttttctcgttctctcttctctctctcctttcattcgtccgcactttctttcccatacatttatttcctttttctttgctcaccgtaacagcagagagtggcgcgtgcgtcgcatgcgattcccacctgcattcgtccccgctcttcaccccatcgcaaatgccatgcgccaccattgttttgttcacattctcttccgtcgtcgcctctgaaatggcacgtgccgaaagcgaaaaactcagcgtgccgatcatccagccaacggtcaacagcacagtcaaaatcagatcctggaatggacaggaattttattaaaaaattttgaaaagtaaaattttgacgggtgcacttcattcccccccccccgcatcgtttccccccggagaaatttaaaaaaaaaaattgctaacttagaaatttttcaagaaaaaaatcttagaaagttttttacaagaaaattctaagaaaaaaattttctgagaaatttttatggtgaattactaagatttttcaaaaaa

SEQ ID NO: 4041 - DNA, 4573 bp, Heterodera glycines
  unsure (1)..(4573): unsure at all n locations
cgctggttgattaaaaaaaattattcaaacttncggccccaaaacggcaaagtacccacttttttggaaaatttcaatgccaatcacaatttttgatcattttttgccaaggcctcaaacactcaccagcaccggaactcgatcatcgcttgtgtaatggctgtagcaaagcaaatagaagagaaggccagtgacagtgacgaacagagagagcggaatgagataagcgacaaagtcggcaccactttaacaaacagacaacatgtagtaaattactgggtaattaagctttagctggtgccgaccatttttgtaaaaaaattttttgaaattttgtcgtaaaaacttgttttcaggggttttcgggagtcgatgatcgtgaataatgcggcatccatttcatcaatttcggactccgtacataatacgccacccatattcgaacaaaaaagccgagaaattcaaattgtgtttttgaattaaaattggtctaattgctgcattggtcatatcattttcagttttgttgccatgtattttttgaatgaataaattgcaaaatttgagttttcgactttattcgaatgccccccccccctccttttcagtgaattaaattcgtaaaatcacaataaatgcacaacttacacgccaaagtttgggtcaaacagcaacgtctcggtcttgttacatcggcttaccgaaagcgtatcaatgcttaaaaaattgaaaattaaacaaatggaattgaatgatttattaattatgcacccacttcaaggagccaaattcgacgtgttgggacgccttgttgggacagaaaatggaaagatgaaaattccatgcgcggaaggcaatcagagagagctgaaaacagagggggcgaatttgcattcatattgctgtacagaaatagagccccgattgagtaaaccaacaacacgaggccatttggtccgggaaatttttccgaaaaaattgtaacgaaaaatggtaaacttttatgattccaactcaccacacagaaagctgcctccattagacggatgaacctacaacagttaaaaaatgtaaaaaactgtcaaaacggcgaaccccaacggcatttggagctgttcaaaatcgacacgacgaaacacgcgctccaacggcgacgaattcggcgacatttcacacaggaaaatagcggaaaatggaaataaaaacgaataaaaagtaaaatgtgattaaacaataaataaaaagacaaaaatgcaacaaaaatattcacaatttatcagcacatttcttttgttgttgttgttgttgaaggaaagggataaacagaacaaacgcactaacaaatattcatttcgggttgacagacgacggcacaaataataatgacgaacataaacgacatttattaaaacgacactgtgtgatttaagccaggcaaccctcctaaattaatgacaatgaaattgatgccgatcaaatgaacaaaaaaaaagatagagacattcagtcagtcaatcgatcgactccaaaatcaaaaacacatccattctcatccgattattgtgccatcagtcggagcccactttgatcagggtgtccgacaaaaactcgtacttgggcacttctgaaatgtacaacaaaaatgaaaatattaatttaaatagtacagcattttgagaaaagactggcccaggagggaataaaattcaagaaaatcgaggcccataaaaatctgacgaaaaataagtagttcgcgcaaagtgtgcctttgtagtaaaactctgctcatgtttccagaataaattgctattttgcagcaaacacaaattccagccatcgtatcgaataaaaatccatccgcgactgagggtgcaccccaaaatctcgccgagacaagatctcgccgccaaaattaaaaaaaaatcggcggcgagaatttgtcccatttcctttttttctacacacaaaatcttattactaaatatattagcaattaaatagtaggaaaactgccatttatttgttgattaagcatattttaggcattaaaaagacgtacccaaattgagcggtgccggccctttacgaatgcgaccagaagcgtcataatgtgagccatggcacggacaaaagtaaccgccgaattcacctttgccagctgaaattggtggaatttgagttccatgattgatttgttggtaaaatttgctaaaaaaatgttcttacaattagcaaatgcctaattttttgttgctaaaaaatgtctgtccacacaaaaaggtcgccgtacgtttttttggacaactttttttgttgttgttgttgttagccaaatttaagcattatggtcttgtactgttcgctggctctgtggtatactgttattcagcaaaaattcaaaaaattttataactataaaaaatgtatgcccaaataaccataaagaccatcatttttttgagtgtttcgtcattgaatttttttgtagatgaactaaaattttttttacgtgttaatagagttttcgtcaagtgctttctgacagtatcagaaatgtcatatttgattaataatgaaaaaaaagttatggtccaacaacaattcttcgacaacgtttcgacttgcccaaattacaatgcctcgaaatccaacaatttttttctctaaaatatcgcttacacaatgggatgcagccgaggtgggtgcacacgccgatcagcacggaccattccggcttcagcacacggtcctcgtcccgttccgggtgacgcagtttgcccacttccaccgcacgttcgcgctcaatttccttggccgtccgatgcttgacaaacacgggcttaccacgccactcaaatgtctttgtcttgcccaatggcacctggaaaaaaaaaattgaaattggaaaatttgggcggaaaatggcattgttttgggttcactactcttttattcccaaggttttttggaggtccttggtcaaagcgaaatgcattttatgaatttcggaactactgactaaaattcggtacaaaaatctgagaaaaaaaatcttagcaatggtttttcttgataaggagctatgtaaaaaaaagatttgttagattaattcatttgattatgaaaaataaaccaagctgaggtcgatttcggttgctgccattgcggcttggtcccgtggcatccatttgtaagtgaccgcttttcggacggcgaactttgctgtcatcaacgtaatggcaccgcccactgaaatgtatacaaaatttaatatttaatttgagaaccaatcaattgaattaaatataaattcgaaagtcagggtcacattcaataaaaagacatccttttttggggtgacaaagtaaatacgtaaactttagcagtgcaaaacattttgtttcatatcccgaacgaaaacggataatccgttattttttcaaaatttcaacggataaatgtccaatagtctccaaggaggtttagaccactctggtgggacaacccttggttaatcgaaaccaaactcggcaaaaaatggcaaacctccataaaagatgaagcttgacacgcctttgcgcctgtcctcagtcacatgggacggttgagctgggtctttggtcaattcgttgcgatacgcgtcaaagttggggaattggacatcgttgtgcactgcttgacgaccaagcggaagcgcgttgaccgactgttttcgaaggttgtgaaacagcagcattgacgacgagttgggcaacataattaataatgttgtcttatacgagccttaaaactatgttttgaattgtttgtggtaagtttttggatatttttccactttaatccccccgaaaaatatatactggaatttcctatatttttaggggttatttgatgcgctgagcacgaatttgaacttctttatatgcatcaaattgcttagcatttgttaagaaaatattttcaatttaaagctttcgaatgatatggaattaaataatttcagtttagttagagatcaagcgcgaaagttaaaaattaaaatcaaaaagttacgaaactcgaaaagatatctatttgaaatccaacaatgatttacatattcctagacatgcacatttgtccgtttcgcaacatgaataattttatttatttttgtcaagcaaataaaaaatggctcccggacatttcgacaatgaccgtttcgccaatgaccgtttcgacaataccttttcgacaatgccgtttcgacaataaaattaaatatatttttttaaataaaattcaaatttctgcaaaattatatggacggtgcggatttgggatcaatataaaaaagtttttttttcgtttttttcaaaatagcattatgagaatggctttagtttgtcaattttcggcgcaaattgcttattttttatttaattaaaaattgaaacattgttttacacctaaatagttgataatgaattagaagcttttaccctgaaaaaactattcttgattaaaaaaacaatttttttttgttcgaattcgggtctggagttcggaattgggcaaacccgagttaagatct

SEQ ID NO: 4042 - DNA, 2349 bp, Heterodera glycines
ttttgttagaattcgggtctggggttcggaattggtcgaaatggatgtcggattcgtgatcagcgaccccgaaacccccctaaaacctatctttaaacacttaaaaattttatatattttttaaaaaaaaggggggggggataaagtatactaccgggaatagtaatggaaaaatcggcttcagcgcgctctttgttgacatttttaaaattttgaggtgtaggcccaaaaccgaaaagtacctaacaatcttgatatcattcgaaagccctttacatgctctataagccttagaaaaagcaaaaagattttctcacctgcaaaaaagtaaaacagcatctaaacattgttaagctttcgaatgataccaacaaatgttggatttggttgacaaaaaaatttctaaccttttacaaatgaaagttggataaaaattatccatcgaattcatttgccccaataaaagcggagtcgtcactgtcgcttagatctgatcatcacggagtggaagtgccggattctctttgaacacgaccaacccggacgatggatggagacttggaattgaataaatggcctttttttgtcacgatttcgttttgattcgatttgttttttgttggtttgaaaatgaaaaatctaattgtttattttgttttgttttcgctgcttatgaatgcatcggaatccgtcagcagttggcatgttttggagctttgaactattcacttttttcttcgtaagccaaatctaacaatatcggtacttttcggttttgggcctacctcaaaattttcaaaagtgtcaatttgctgctgttcctctcttttctgcttcattcttctctcatcctcctcttccttccgtcgaatttttccttttcctctctttctcatccgtctctcctccttccccaatgctatttccctcctcttcccttgtttctccatttttgctaccaacaaatgttggatttggttgacaaaaaaaatttctaaccttttacaaatgaaagttggataaaaattatccatcgaattgattgatttgggggtaaggtaaaacgcccggcaaatgtcatcattagggatcggatttttaagtttttgcttatttttctgcggctttaactcgacgagaaatgcacgaaaaacacattttgcgctcggaaattcttcgttttgacgcatttattcgaaaatttttcttgacgagatcacattttttgcaaattttcaaaaaattttccacataaatttattttttcattgaccaaaatttttgtaatttattttttttcttgaccaaattttggttttttcgcccttatttaaggccttagtttggactttttcgcgcttaaaaatccgttccctagtcatcattttgcaaaatattctcctctgttgcggttccctttttcttccaatccgtcgtcattttatgccaaaatgtttccgcgccttccgtttttgtcaatgggttttcgcctcccattggcaacaatttaagacgaacaaaattcaaaaattttttggataaaattgattttcgtgcttctttcatccaaagtacaatccgtaaaaaataggaaaccctaaaaatccaggctttatccaacgcaattatttttctgctatttgtgtgacatcattcgaaattcaacagcaaattttgctaattgccaaaaaatgaaccgacggtaagcacaaattcttcatttatttaactaaactgttttcccataatttcagttggatttgcaacgacgtttggatggacattttcccatcctttgaccgtgctcaactcggcctcaaattggcattgctttcaccacgttttgatgaattgtgaacaaacatttcaagggcaaaagcgaattgacaatttggagaccaatcgcaacaaaatccgttttaaatgccttcagattaggtaagtcaaaatcagagttatagcaaaaaatgcattctttcctttttgcagttacatggatcactccgtcttcgcttttcttcgttcaaattagggttcctccccgacccctcggggggcaaaatgtcgggggccggggacctcggtgggtgacatgtcgggggtcgggtcaggggcgagctcaattgtcgggggtcggggaccccggtcgggtagtgtgatcaacgaaattttttaacgaaaaactcaatttttatttttaaatgctcgtaaatcttcctttttctcactttaatcatctgatttcgttaagcgccagcaagagttagtccaatctggcctttaaaccaggggctttccatttgttcttatttataaagaattttaattttggggtagcgacaaattttt

SEQ ID NO: 4043 - DNA, 1918 bp, Heterodera glycines
tcaaaagatcatggtaaggaggaaaaggggaaatccattaataataatttgggagtaaaacaaaaaataataaatcaaatttaattattaaacataaatagatgatgatgaattccgaattggtaaggatgggcctgcaaatttaaagtcaaacactgagcaattcaatgatcggcaacaaatcaaagttggaaaaaacaaaaatcatataaatgcactctcggggtgtactatagtcaacccccggaaaaaatagcatacctaaatgctataccaatcgattcgtctggagctatgcacgaattcgcaactggagacctactttttcgtgcatagctcctcgagacgaaatgattggtgtatcatttatgccattttttctggggggcttgactaaagtatatcccattctcgagatttcatattaatttgttgttttacagcaagtttgtgaaaagtttataaaaatggaaatggaattgaaggaggcaaagcacttacaaacgattgccaaattggaatttgaaaatgtgagttgataaacagaggaataacaattataaaattaattacaagtttataaattgcgaaaatttgtcataggattttgggttcgattataacgaatctgacatttccaattgaccaatccctaatccaaagtcgacaaaagtcgaaaattcaaatttttagccaccctttgacttttataaaatttaaaaaactccttttttcagtaacgccaattatttaatttaacatttattcaattttgtcaccggtttgaattagaattaaaagcatgctttaatattaagaaaattattaatttgaaactcattaaagcgtaaaagtttaattttcgatttcactgaaattttgattttagaaggcacttcaagaaaagctaaagcagcaggaaatgatgacagatataaatgcactgcaggcgaaagtggccaaattggaaaaagaacaacaaaaggaaaaagaaggaaaatacggtaaaactgaaaatatactgtaaaaatgtctttagcccttatactgtatttttgaacaatttttattaattattttttgtttagttactgtcgagcaattcaacaaaattttggagagaatcagtgaattggagaagcagcagaaaaatgaggagaaacagcggctgacatcaaaaatggcagcagaaaatgcaaatggtaatgagaaaaagagcaaaaatgaaaatgggagaaaatgaaagcacaaagtatcggataaatttaatggagagcataaataatacttaaaaactaagaaattcaaaaaattctatgtttagcaattgtggaaaaaaccgatgcactttttgaaagggtcgctgaaattgagaagcagcagcagcaaaatggcatcacaggagaggaacagcagaagaaattggacaattttattggcattttgaaggatcgatttggaaatggtaaaaataaaatttatttaaaattaaaattgttcaaattttagaacttttaaatgccgttcatcccaaacttcgtcagaatattgctgaggtgtggaaaataaaacacatacataattaatagggatgtcaaaaatttgtcaaaaattggtcaaaatatgtacataaatatgtaaaaaaaaatcccaaaatatgtacgaaaataagtaaataaaatttttttaatggctatttttggaaaaaatctttgtaaagggttaaatatgcaaaaaatggcagaaaaatgacctaaataggtttagaatccaccttttaacattttaaaaataatttttaagaggacattttaaaaaaaatttaatttttttcacaagaaatttctaaaaaattttcaaaaattctaaattatgtttaaaaaaaaaagaaaaatttgctgaacttttggattttttt

SEQ ID NO: 4044 - DNA, 4535 bp, Heterodera glycines
tcaagggctatcgtatgaaaccaagattgtgtaatttgattgcgtctggaaaagttatgagttgatatagtcaaaaatttagcaaattttgcacttttcggcgatcgaccaaccacgagtccggctggaacgggaatcccgcgggaaaaaacgggaatcccgttcccgcttcccgtcttttttgcctgacgggtatgccgttttcccgcgattctttccatgtgcaccaatcgttccgtgtcaatgaattattattgccttcttcgtcctcatcctcagcttcttccatcactcacaaatccggcacaatttttgaccaagcccagcaaattgccaatgccattcagatacaacagaaacaacagcaaaaattgctgcatatttaaataattgttgttttcacaatcagctttttgcaattgttgcaccgaaaagcgcctttttggcatcgatggtcattggatgggcatttttggaaaatgctttacatgtgttgggccaggatttcatgaattagccgggaacgcgctaaaccccggcattttctgggtgtttggcgtcagtgccagatttttccgcatttgatagtttagtcgatttttttgggtttttgaatttctatggtttttttaaaaaagtcatagacaaaatcatgattttttttaatctgagttctgattcgtaatcagagtgtttttctgcccctgagaaaaatgctttttaaaattttactatttttccatcgggaccactattctgctcttttgcctatatgtatatacttacatctaaatctgtaaaaccctgcgggttttgatataaacgaaaacaatttttttcattttgttgcttttacatatgtagtatttcggtcctccccccaatgttgtgaaaggcgtttcattctctgcgtatgtgatgggaagggagagagaagggggggggggggcaaagcaaaatggaaaatgatgaggggggggggggggggaagtgtagtttacaaaaaattaggattttcttgaatttttaagtcttattaatcataacttttgatgctgaatcgcttagcttttgcttactaatatcttctaaacacgtagagttttcgaatgataccaattttgaagaaattaacgaacgaacaaaaaagttatggccattcccgtttgaagttgtatgaaacgccattgtacgaactgctaccgacccgttggtggtgctgctggacggaggggctgccacgaccaaaatgggtgaatgggactctcctcttcttctgtgtgtgtgtgtgtgctgtggtggtggtgtgatgtcccgtattttcgcgattttgtgttgtccacaatggcggcggacagtggcagcagtggaaaaatccctcccccccctcttcgccattctttttttccacacatatacaatgccataaaagaagagcaacgaaaaaatgttattttcatttacacattcatgtatatgttgtgttgtttatttttggctttacgaaaacatttttacttttataatattttataaattttgctttttttggttttttttttggattttttgagcatttcttaatattcaaaatacggttcaaaaccgcaccaaattgtcacctttaaatgtcctctcttccctcttctttcgacatttttgagcaatcattttttgtttacaaaaaatattcctaccaaaaactgtattgtgtttttacttcagaaacaccttaaaattttaaacataggtattttttgtactcaccttactgatggtgatctcgggtgaaaactgaaaaagtacatttaaaaaatttacattaaatctgaatttcagtcagctaaataaattgccaaattccttctaatgatcactaacaaataagggtgcaaaaagatcctcggaaaatgggatcacccgggcactccgtcccagtttccgtcccgcttttttagtttttccgtttcccgttcttgctaatttttttttgccgaactcacaatttaaaaaccaaataaatgaaaaatttaaaaaaaatcaatagcagaatgccaaaaattttaaatttccatgaaaacgattttttttttttactttaaattaaatgggccatttcttttctttttaaacagaagcgatttaccaaacggaaaaacaaaatcactatgattaaactaatcaatttttagctcaacaaatacttaattacaaaatatttctaatccaacgcgtcaaattcctcctcaccgtcatcagacaaataagggttggcacgcgttgatcttggccgcacctcataagccggagccacgtcgagaatgcttaaattataatccaatacatttatgagtcaaataaagaacaaataacaatttagaaagttctagactttaaaacttaacaattaggaacaaaaaaattgactgattcagaaaatgcattgaattaagagcaaagccaaaaaccattcctaattcaaaaagcattatttactttttggtttaacaaatttatccaaaataccaaccgttgcacctcggtcttgctcaaagtgccgctgtcaaaaagccgaatggccagcttaacaaaaaatctaattaatttttaaatcaattttgtagtactttcttgaggagcctgcgccgggggtgaaggatcacctccgcttcttcttcggcctgccggagcatgcgccggatggtcttgttttggcttttagacaacggcccaatggccgggaacccagcaaactgcaaaaaaataattggaattaaattgttttttttcaattaaagaacttttttggcaatccgggtggcatccgggatgtccgcgccacggtgaccgacgcttcgtttgcaaaacattcgctccgcgaccttgccgccgagaagggcaaccaattcggcccattgctgacgccgcgttttcgattcgatgacttcagtcaccgttgctccgtcggagccgtcctcgtccggaatgccggtgacctgtaaagcgccttgatttcttgggcaaatatttatgggaattttacatggatcaacttagctcggatcctggcataaaccagatcacgagcgtgtgtacacactcatgaagactgacacgtgccagcgtttgtgaatttcgccggtttccaatttctacggacttattgaagtcattaacgagatgccggtaggccaagcactggccgaatgcggagtaaatgacatttctaaattagaaaaaatctaacaatttgagcaagtgattgaagataaagatcgactttttgggaatttaaaaaaatgcactcttaaaattgaaaatttttaattttttgtaagaacctttggaaaaaatttattttataaaaaatttgattttgtttttgtatagaataaaaatttggaaattcaatatttttgcaattgtctaaaaaaatgctccttataacttgttttggtgcttttaaagtcaattcttaatttatacacaatttttggcattttttgagggttaaaagcaggggtgccagatctgaggatttatcctcattttgtggctttttgataggtcaatgaggatttttttggaaaatgatggatttgatgatttttgtggctttttgagaaattttgaggattttgaggctttgggggaaaatcctcagaatctttttaattttgataaattggcataatgttttgcaattatttaataatttgggtttgtaatagagcatcaaaacgaaaatagaaccaattttttttccaaaaaccacaaaattaagaattttttaatgaaaatctgctaaaaatatggtcaaaattctcaattttttccccggcctaaaaatcctttattttcttaaaatttttgcttaaaattacaaaatttggccatttttgttgacaaattctgttaacaaatcatattaaaatttacaaaaattctccggcggggcctatcggcaccgccgtaccccttgttccccaaaaaatttttggaaaaagcgccgcaaaaaaacaaccgatttttcatgctcataatcccaaaaaatgcttatttctaacaaaaaaatgctcaaattgatcatggacatcaaaaatataacatttgaacattttaaacgtgtttagaataaattttgtaaaaatgaggctttttgaccaaaaatgaggtttttttgcatgccaaatgaggcttttgaaaattttaatctggcagccctggttaaaagccatttttgccagtttttatggcatatattttcgtacatatttggttaatttgcgttaataattcttctgtggttgtgccactgcagtgaagaaaaggaaaaatcataattaatttgtgatctttgattaatagggtttgaagttgtatgcactaaaattcgccaaatatgccctataaacccgaaacaaaagagcaaatttttttgaaatgtcgtgcgatattccgaactaaaaagaacaaataataatagggtgaataaaataataataataaatcgtttttttttcccttgtcgacct

SEQ ID NO: 4045 - DNA, 3121 bp, Heterodera glycines
ttcctcgaagcgtttgagaaagatttggttgagtaccctctccagcgagcagttgctcaatgatgcgtttggcattttcgactttgtcaggaggtccagaaactcgtaagggcttctgaggattaaaatttccagaattaaagacttttggtttttttaccgttcccatggtcggttgatgactttcttgcactaacatcattttgacaccaatttgttcctggacaatttattgatgttttaaattaatgtttttttcgaaacctgtaaacccttgatagtttcgccattcttcccaatgataagtccacattttggtcctggaatgctcagttcaattgttattgcattggctccattttgtggcccaggggcacttctattgctgcgttcgagtacttcttgaataagttgtttcgccttactaaaaggaaacaaattggtacatggaaaatttatgtcaggattctcactcgatgttatgtcgtgcgccttgtaaagtgcactgacgaaatccactgacattgctttcgctggacatttgtacacgacagctgctctgctgttgtatgagctgaatttgctcaccacctcgtccaatcactaaaacaaagtattcaaacctaactatccgatctttcttatgcctaggttctgtaaatattaaactcttgccgagcccaacggcgctctcggggatgtccacattttcgaccagcgtctcagctacttgtgcacccataccaacgttagccatgtcggtaccgttactctttcgcttggccggataaactaaaaaaaggacattaaaccgctattgagtattgaccccaaaaccaaatgtcaatgttttaaatcgaaaatgcacatgaaattcaaagtttgcaaaccgtacaaacactatgaaatcgcgtggtaaatgaaaatgaaaaaaacgaaggaaaatgtgtggcaaatgtgaagcgacaaatgttatttgtacgtacaattcaagtcgtcggaaaatgttctcttttgtcctccgttagaagcagcaagctaaataaatgcataatgataaaatggtcgcaacgaggcagacctcgcctgttgtatactctaaataggaccgctcaattttagatatattgtaacaacgaaatagaaaattggagttcaaaaatggaaatgcaatgcaatgtaaatgtataatgtaattccattatcaacacaaatatcatcaaaaacaaatataaaagaaatttcaccaaaattgccgcattctcatatacatatgtgataaaatcaaatgtgaacataaaacactcacttattgcaaaatgcgaataacaaacaaaatattccctacccaatgcaaattttccttaaaaatcacctgtttcgatctctgtagagcagattcaatttctggatctgtcagttgttgaatagcagagtctttcatcagaaggcaaaagccggcattgaataaagttttttaagcttacggacactgattttacctattaaaaaatgtcaaatcaagataaaatatataaaacaatagaattcaattacaaaaatgaaacaatcgcccaattttttcatcaatacctaatattactctaaaatctctcctattattgtctcctttctcacagaatttttttttatttaacaaattttgaaatatttttgtaattgacaaaaaataaccgttaaattcatattagataaatagggcccggatttttagtgacaaaaattcccaaaataattaactaaatagtggccaaaaaatgccaaaatagtggcgaaaaagttccaaatttagtggtgtaattttttaaatagctgttttttaatttgaaaataatttaaaattaaggcaaacaattttattcactgtttgcagtcacaaatgaggaacatttcctttccaatattttcttagcaaatattaagcaattaaaaaaatttggggaagaaattttgagaaaattttccaattcttagaggtgtatttttgaaaaattttaggtcgattcttaggggtgtatttttgattttttttaggtcgattcttggtgtatatttttcgtttttattgaatttttgggaaattttccaaaaaaatgccaaaatagtggcaaaaaactattttagtggccaacttccaaaataattttttttaatggcaaagctccaaaatagtgattcctaatgatgaatagtggcgttaaaacgaagaatttccgagttaaaaatgtgttttttgtgcatttctcatcgaaataaagccgcagaaaaaatagttaagaaactaagaatccgggccctatagataaattattgaaaatttttttagcatttggctaattttttttgatttttttgtattttcatgattttggtagttttttgacatttagtcgactttttgctgatgtgacttaaattcgcacctctactaatgatatgctaaaaatttaaagaataaaaatgctatttcatttttattaatgaaaaattaaaatataccagtaaagtgaatctcaattgaaattcaattttagttgttttgcaattccaggacttctttatagtcataaaatggcggatcctttgactttgcttcaggaatatacaacaggaaagcgtggattgcgtgagctgaaacacgtaagtatagtttttatacattaatttgactaacttttgactaataccattttaatagtttaaaacaaatttcagaatgggactttgtattacgtgttcgatgatgctgcgtatccccatgattcgaagaccaatttaagtgtctacaacaagccagatgagttttattccatcgagtcgatcttgaatttttggaggatgcgtgaaatgcaacacactgcgtatgttcgggatgtctccggaaagggaatcgcatcgatcacgcgagttcaacggtaattttgctatattgacgaggaataataaactttgctgtgccaacgagttttagtcgggatctgatcgattttttgcgaggaggtgcattgccaaaagaagcgaatatgttggctccgatccctccaccgatccccgcttctcggcttcaagacgagagaaatcaattggagccgccggaaaa

SEQ ID NO: 4046 - DNA, 2132 bp, Heterodera glycines
ggagaaaaaagggtagctcctaactttcgttcttttttaatcgtgcgttgattagccaacgaattgacaaaattttggacatgtcaacggacggaggagaccaacccgaagtgagaggacttagtaacgaattgccagccgagaaagtagcacaattacgaacactcgtcaagaaaaacttgaagaacaaaccactcgacgacgaaaggtgagtcggttcaattccgacggtcaatgtggaattaaaagcttcgtaccgatctccgatttggctatgccggatgcgagtaacgacgccgtagggaaatttataacggagaaggaacggctgagaaaggatcgcacgacttgccttgaatcacagtccagggacttttcatgcgttttgaccgctttgaaggatattcaagtggttttatccttaattggttaccagtaattttcgaattaggtgcgagaaaatcaagccaaaagccatccccagcatgacttctcactttcttctcaatcgcagtcttcgcgggttcaaaagccgctaatgccgggcgggtacagtcgctacgaccaggagattttccagaaagagacggtggccgactttgaaattgaaaccgatctgagctttcacggtaaaatttctttttctttcttcggattcactacacctgcccataggaaatgctgcgctgaaccaacgcattggcgctgctcaccctcaaaatcgtccaactgcgctaacatcgaacggcgtccaaaaggcggacccacgacgacccatcaccgctggagttgctccgtccgccatgcgacaacaacacggcccgggccaaaaacgtgtgtcacgcgttccaataataattatccctgccggtgcaagttcactcatcacaatttacaatgcgcaggaaattttgcaggtttattcatttaaaaatattataaattaatttatgttaaggatttgcgttacgtaagcacagaagaaaaaaagcaatttagcagtaaacgagagaatgagctgttactgcaaatcccaaagaatggcgtcactgttccgtaccgagtcgtagacaatccaacacgattgaaggacgaggaatgggaccgagtggtcgcagtgtttgtgcaggtgggcgtatggtcatttcaggggatttgcaaaactgctttagggtccggcctggcaatttaaaaattggaaatggaatggcaatccggttgagatatttgccaacattgctgcgtttcacttgcaattcgacgaacttccaaccgatccaaatgtgaaaaagtggaggtttgttcagctgtttattttttggggaagaatcggagcagataaatgccttgaaaacttaatttttgaaagttaaaacaattctttaagtgtgcatgtgttgaaattgtcccgtacgaaaaggcatttggaccgggcggagctgcacaaattttgggaaatgctcgacaggcacatttcgaagagcaacaaaagggaatggctcagatattagcgaagtcggcacattacatttgaaaatttacaaacgattttttgtttgagttttttttttgtataataatttaccaacttccagcatttactcccttaccaaatttggtagtgaaaatttgattggtaaaaagtattagcaaagaccaacatttaaaaaaacatggaatcggcatttataaatatattttttaaatctatttaattttttggcaacttgagataaaaaactggtcacttcaaattaaaaatttctaaccttcgtgcctaatttacctggacaaaaatccacgaaaaatccaggcgttgtatccaagtacaggtcgaattcacggaaaaagaaacaaccattgttaattattttaaaaaatttattattaatcggacattttgtgtttttctttcgtcattagtttctctctttgttgttttgctttaagtcttccatttcctccgtcgctgccaaagtgtttgatcgtcctgccaatttccccctctgttgagtgggtccgatttcttttttgccctcagacggacgtcggtaggcgccgagtcggggcgatgagagaatggcatttcctgggggaggggcgtcgcatcgatgacgcggtcgtagccaata

SEQ ID NO: 4047 - DNA, 1168 bp, Heterodera glycines
tccttcttttctcacggtttgtcctcttttatctccgtccgtccttcactcgttttgtttcctctttaatggagcgtaaatgaccggaaaagggggggggggggggaagaacgaccgaccgacgggtggcacttttttctgttgcccatttatgtcattggcaatccgtcacaaatgtgggacaaatgcttgatgaacgatgggttgccaaagtgtcccccccccacggcgccgcttccgccaaaagcccaaacgatgagtgaattacttagtgcaaattttgcttcgggaaaagccaaattcattgaccaataatcagggaaaaagaaaaatatatctttatggctaataaatacaatatttggccatttttcttcaaatttgatttctctccacgcacatattgtagccacagcccgtgtcacaacaaagtgccgacttggcacaatccttgtcatgatggcaccaattgatcggcttaggctatgcaaagtttaattaaattatgtggcaatagcaattgcaactaaagtcgtcaaaactgaaaacatcctccgctaccttcaaacaggacacgtccaattgggccggcgttggacactctccgtcccccggggcgcagcacgggtcgcccgttatttgcacacacatctgcccgaggggggcgtaacttatacatttttgtcagcagaagagaagaaaacgggaaaaagcaaaaaaaggaaacggaaaaacggcagaaaaacttcggatgaaacaaagccccgtaaaacgcaccctttgcgtgtcgcattgcttcgtttggttgcaactgctcggaatgtatttgaaagtgcagtgccgtaatttgcctatgaaatgccttcattcatttcaaataacgaaaatagaaaaagcaccttttcgttggggatttcgttctatcccatcgttcgctcgttgagtttcgtccccgaccccaaaaaattcgaagccatccgccggttcagaaagggcaaagggaccgtgccgactttcggaagttgccaaagggggttttggcgtaattcgaatgggcggactgagaaattctgagtcaatggaagtgaaaaggagggaaaggagaaagaaaacggaagggaggagaagggaacacatacggaagaagaaaaggagagaagaggaattg

SEQ ID NO: 4048 - DNA, 2214 bp, Heterodera glycines
  unsure (1)..(2214): unsure at all n locations
ggaaggaaataaaaagttggaccaaaaccggggggggggggggaggggaagggggaaggggcccgttgaagaggaaagagtgggaaatggacgaagaaaaagttggacaaagaaacaaagaaaggaaaggaaaaaacattcagaaattataaaaaacgcacttaaatgctgcagcattattaaccaagtgtatttaataaaaatttaaagttgaaaatattttgaaagtgaaaagggcgattcttccgaaggatcgcagccaaacaaattgaaatggaaaaatgagtattgtcaaagccatcgtggcattttccgctccttttgtgccatccatctttttaatttttgtttattttcagcaatagacaatctgtgcttttgttgaacaatgccaaggtgcgattgcgcccccgaaggaccaaaagagtgcctattcggtttttgccgctttttcaattcattcgatggcaaaaagggaatattttgaactcatttcaatcaattgccgtttttgtattaactaaccttttggaaaaaaatcattttcgcgattttccgttccctgctgctcggtgagctccaacgaacgatggacggtgcccccccccgtcccctttggtgccctacattcacaaacccaccgactctttcttatcaatcatccttcccattcacctattctaaaaataacggatcggatggatgaaggcattcataaaccacaaaagcatttatttatccgattttatagtttctgtggcgaaaagtgagataaaagggaattgggcgggggtcattaaggggctgtggggcgggtgaagctttccttccccagccatgctatttgtgatcgtttggttctatctttcccatgccgacgaccttcaatgctaatccgatcacttcccttttaagggcatttcccttcgaaaatcacagcaattttggcgatacggcacttatgccctcctccccacccccgcccattgtcagcggcggatggtcaaaacttgtctttctttggtatttacgagtgctgccgatttgcgcataatgcgctctccgtgcgcataatgcgggcggtcctccgacttggatttgttcgttctgtgcttcaattagtccgtcctccatttgccatttgtctctcctccatcaatccctcccataatcaatcaaaatcaaattgaatttgtgccatttgtttttgttaagcatcgaaatgcctttgtcggtcctcgcgttggccttcgccctttcctttccgcttctgttgccttttgccaattcagctgctcaatgcaacagcatggaaatgttgggcagttatttgaaatgtttgaagggcgaattggacagagattatgccggttttgagcaggaacttaaagagcacacgcggtcagtggcaccgcccaattaatccattggcaattaattaattgcttgttgtcagacgggcgaccggtgcctgctttgcgcagaatattggcgacgccaatcagaacgagcgctgtgtgttggcattggccgatttggatgccaaggcgtgggaccgcaacggccccctgagggaatgttccatttgccgaacggtggattggacttgcgcatttctgaacattaagcaactccgttcagtttgccaccggtgccatcaaagccatcctttcaacaccagccgatgagcagaagtgcattagggagcaaatctcaaaagccattgggtcagaagcggagacatgtctaaagaagaaggtggccgacttcaggtgagccgcttttctgtatcaatagacaaaattggcagttcagtgggccattggtaatccccgacttggaggagggcgcctttgccatcaaagagcaagtgatcgactccatttccgactacatttggatccattcgcgactcgcattttgtgccgagcggaagcccgagagagccggttctacttcgaagtgtctgaagtcgcctttccttggctattatcagaagcattgccaaggtgaccgaggccaaagtcggccgagcaatggcttttcgtatcaaaattcgttttgccatttttttgctcagttctgaacgcctgtgacacggaggctgctggcgcnggagtgtgtggagactctgcgcacttccaaggcgagcgtttgcgaatgcatcgacgaggcacgcgacgacctgaagcgacggatcgccggcatcgcgga

SEQ ID NO: 4049 - DNA, 4574 bp, Heterodera glycines
  unsure (1)..(4574): unsure at all n locations
ccaggcgttaatttaacaaaaaaaattgctactttttccatttttttttgactactctgaaaatttttatgaagagcgaactgacgcatgccaaaagcactcatttttagtaatgctgcatttttctgagccaaattggctgagtttttctttgcttcgccatgggagggcggggcgttctccgccactgacctcaacgccgtccatctccgcgtttagttttcaatcgactcattcatttgtacattcccttttctttattagttttttatataataaaaactcatttttcatgaacaaaaaatttctgcaagaggtccacccataaatggctgagtgtgccaaaaaatgcaaagttcaaattccgaccgaattgttttttgaattggtcgctgttctccgttttgatgcccggtgggccatcgtccgcgtttcagcggcctttgacattttggtttttaaaaaacaaaatgcttttataattgccaaaacagttgcgcaattcatccctttaaaagtattttattttctctaattttagcagacggatctgaacagtgggaaaacagaactcattaaactcgtggccgggcacagtgacgaacattcgcttaaactacatttcaaaagtgagttcttttgactgcttttgcgcaacggcagcccgaggatttttgaaaaaacctttgtagttcaccataaaattttttgccaaattttttttttttgaatttctcaggggaggaggtgggtgggctgatacgaggggaaaaggctgtgtgtgagaaatgaagtgcacccgtcatgcgcggtcaaaattaatcatttaacaaatgcctaggccttcgcaatttcctcatgttgaatggcgttgctgtgagtcagtccgttggtgatttgttctccgtgccaactttcaaaaatgccgttgccgaaatgaccaaaaaattgcctcacgatttgaagacacacaccggcatttgtgagtgggttttgggtcttattattgcaattgttaacatttaagttctgcaacatttcgtacaatcattaacaattgcacaaaaaaaatacatctatgggtctaccggtacgatgaaaaaagactgatgaggacgctaattgtctaattattcgtttagtcttcattcattggatagcgttaaaagatgcaaattcccacgaagcattctttactcgccctggacagcccgctgatgtttgtgaatatttgggggaattctttactcgctctgggcagcccgctgatggtcgtgaacatttggacggaaaaatgagaagcgccaagtttaagctgtttaactatgcttacttattttgcaatcatggtgctctacaatttcacatagaaagtgcgtaacttttactttgcttcccaaaaaactgacagggtttttttttgtacaaacaatactgttaagcactttggaagtgttttggtaaaggcgaaacagtgaagcgctcggacggtcttcagggcggattaccaatgagctatcccatcttcatgaagtcatttgagcaattaatcaccgacaaatgcacatcaaaagaaattgccgactcgttcgccagctgtaatttattatatgccaaaaacacccttaatcacatttagttgtggagtcattcactgattccttaatcgatcaaagtcgtttgttcaattcgttatctgtgaatctatccgttgctggtaacgaggaactgctcaccggtccgtcgtcatcgaattcgtccagcattgatgcacagcagaaggcatcgtccgttggtccgtcattcagttcgcccgttgttgatgaacagcagcagcagaaggactcgtctggtgtatcgtcggcacaacagcatggacaaagttggcaaatgcatcgaaatttccaatgattttcaacttttgttctcagagcgagccaacactactaatcagtgccagcatcctccgaagaaagaaagaggcggaaacaaataaagtggaaaggcgacaaatgaaggaaggaaattttgttggatttcgagaaatttgtcattggaggcactttttgttgagttttaaatggacaacgaaacggcgtattttgttgtttttggaaaatgttcagttatttatattcttttaccaatatgcataaagacaatgtttaagaaaaaacatttgtaatcgcagagattctcacgcaaaaagcaaagtgcaaacgcccgctgcagtgggtgtggcggggcgaatttggtcagtctcatcaattagcgcgctaattacgcncaaaaataagtgccctcagtcgcttgacattgggcgtcagccgaggcggtccataggggagaggggcgggggagtatttggatggcatttgagggcatactgtaatcatgggctaataataagtttatccatttttttcaaaatttcaaatgttgtaaatagacaaagagagaaagagcaaagggggaggcagtgagagaaaaagttgagggatgacacgtgagagagagagagatagcgaaaataaatggacagacagggtgagacatagcgagagtgagagaaagcgaagagacaatgcgagagagaaagaataatgcgagagacagaagagagagaaaggggaagagagacaaagacagtgggtttcttcgatttttgttcctactgtatgcacttggcggaatgacaccgaaaagggcacacagttcaaacaaatttcttttattccgctaaagaactgtttgttctttttaattatctattggaacatttatggcacaccatttcaattactgcttttgtttttatgtattgtccttattatgtttgattgtacagagagagagagggagaaagtgaagtgagagacagtgcgggagataaatagacaaagagagaaagagcaaagggggaggcagtgagagaaaaagttaagggagagacaccgggatagagagatagagaaagtgaatagtggtgagacatagagagagtgagagaaagtgaagagacaatgcgaggatggtgctcggtgctatgacgttagtcaaaaaccatcataatgggcgttagtcagaaaaccatcaaatgaaaatattttttaatataactttgctcaaaagcatctaaatttttaattcttgatatcattagatagcactaagttttttctaacagtctacaaaatttcaaaaagtttcgttaagtttcaagaaagttatgactaaaaatgttcaaaaaaaacttgggtttttgagcttctcaggtcataacttttttaaacttaaagaatttttaaaaaattttgcaagatagtagaaaacacttagggctatcgaaaaatatctagattataaaatttgatccattttatgcgaaattatgaataattttctgtcaaaaatttcccatttgatggttttttgactaacgcccattttgatggtttttgacttaacgtccccagccccgttttaatatgttgaatgatttagtccaagaagaaagaaagatcacaaacagagcagatttgatgtaattaacttaaaaaaaatttttgttagcctccgaccggggtcgaaccggcgactttcagtttacaagactgacgctcttgccactgagctacgaaggctacatggggttagcttaagcattaaggaaaaagcataaaagcagtgggtacattaaaaataaaaatacgaatattaaacaaatagcaagcgatgctaacatccgactggggtcgaaccgaagacctttagttttacaagactgaaaacatttaccagtaagccatggaaattatgcaaaaaggcaaagtcattaaaagaaaagcataaaaacagaatataattattacaatttttagaaaaatgatttaaaaataaaaaagctgctcaaaagcaacgctagcctccgaccggggtcgaaccggcgaccttcagtttacaagactgacgctcttaccactgagctacggaggccatacggaatgacacaaattaaaacttaagtagagggtctttttagcaataaatgatgaattaacacaaacaaaaagaaataattggtaaaggaaaattcaaataaataaatttgaaaataaaacaaattaattactcaattaaattcattttggctcaccaaatgtctgatagatgtccaatccgccggtcatttgcggcacagtccaacaacaaattgtgccatccaatccgcccgtgtagcaagtctcgcccaagggggccaaatccaacgcgagaattggacctctacaaagcaaaaaaaaaggtaaattaatcaagtaaaactatttgtacaacaaattatagtgaataacagggcattaaatgggagaaattttgtaaaatgattttgtcagtaccgatgcccacggaatgtgtacagcggttcaatgtccacaatgccagtggccgccgattgggctgcaaaggaaagaaaacagtagtaaattacgaccaagatcgctggactttaaccctcgggtaaaacacttcattttgtctcgtcaattagcaccctctgagaattttttgtttat

SEQ ID NO: 4050 - DNA, 2838 bp, Heterodera glycines
  unsure (1)..(2838): unsure at all n locations
ctgcannggtcacaagttaaagtgggccaaaattggggggacaaacgatcactgacaaattatccccgacaaatgggcgaacgaatgaatagacggacagtgccaaaaacaaaggaaagcgaagcaaagaaatacttaatggtcccgagttttgccattttgtaaaggcgcggcacagcaaaggtattggaagaatattaatgaaagttgaggaggaattcggattggattgagggagggataaaacagggaaagccaacgcgggagaagaaaatgggggattaaggatggggggggggcaaaaccaattcaattaagcaattgaaatggcacggcacggaacaaccttaagagcatttgaaacggaatcaattggaagaggcgactgattgggcatcattaaattgtggaattattacaactgccaaacaaaaaatgaatagcaagcattttgcatatggataactttggataaatttgatttttcgattaaaaaatattttaaaattcatttaaaaagggagtttcaaaaaaaaatttttcaaaattgaaccaaaattgtatttttgcatgtatggcctagtggttttgtaacataatcaggggattgaagacggaggttctaaaccaggggtggggcgcgcacagaaaaatcccgcggtcgcggatcgcgcatcgcggattcaatttgccgcggtcgcggatcgcggatcgcgcaaaaaaaatcccgcggtcgcggatcgcgcatcgcggattcaatttgccgcggtcgcggatcgcggatcgcgcaaaaaatgccgcggatcgcacatttgtaaaagcataattagaaaattcccatattatcaataatcaaaattgtaaaggataatattatgatgaagaaaaataagccgttcgagattttcatgcgagactttttcggaggtcattcaaaataaatcctgcatacaaaaaagtagagtgccacgggaccgggaatttttgccaaaaccgggaccgggacctgagaagccgggaccgggacctcgattttttttcgggaccgcaagaaaaaccgggaaccgggaccaaccgggaaattttaaaaattcaaaaaaattttaaaaatttaaaaaaaaattcaaattttaatttatatcaagtgaaaataatacaaaattatttggttttttatttaataaattaaattaatgaaaattttcaattatttcaaacaattaatcatttttggactaaatcatcgaatattaatagaaattcagatttgattttcacatcactttttttcggagcgctttttcaaaaaacttttgggaaagaaaggggtccggcggtgccgataggcgccgccgggggaaattttaaaaatttgggtgcaatttgttaacagattttcaacaaaaaaaggttggtttttgcgattattaagctcaatcttacatttggcataagaagaattgtgaattttgtcaaaataaaaccaaataaagtctttttcgttggtcatttggtctaaattacaaagaggaaaattgtctataaaatgaacgatgaatgtataaatattttctgattgcatattccatttaaatgcgcgagaaaattggaattttggtcgttttcaaaattttataccttcaaatctaaatattcaaaaaagaaaatcgcttcaataaattttctttataaaaattttgccctaaaaaatgcgcggcgcgccgcgcacagaaaaatcccgcggtcgcggatcgcgcatcgcggattcaaattgccgcggtcgcggatcgcggatcgcgcaaaaaaaacgccgcgaatcgcggatcgcgcatcgcggatcgcggtcgcgtcccagccctgtactgtagtcatgggctaattgtaagtttttccttttttcaaaattttaaatgttgtcctcttaaaatgagtgtgtacattttgcaggattttgtcggagtgcgttcaaacggtcaaatgctgaaggtgtgctgcagggagtgggaaaacattattgaaaattaaaaattaaagaattttggcacaccattccttccaatcactgtttttgttttatgtattgtcttattttggttgtacagagagtgagagaaaatgaagggagagatagagagagagagagagtcaaggttaaaggagagacagtacgggagatggcagactgaataaagacacttattaattattttcaattttaattgaaaggtattttatagtttctcattttgttattttgacctattattatatttttaattatttggcccttctctgttgaccttctttattattattattattatattgccgttattcatttttatacaaaatatgaagtgcactttttgttgttgttttcataataaaaattagacaacaaaagttcgctgacccacgaaatgtccaagtctcgaatttgagtttattattcagatgggcctaaggttaggcaaggggtaatataaaggatatattcgtattcagcgaccccgaaaaccctaaaaatcctaaattagactcattttgtttttataaattttggacatttcgtggcttggacactttgtgggggtgcccaaaagtttggtttaattgaagtgtaaaataaaagattttgaaaaagcaataagttaggcaaaaaatagaaaagcatctcttatggacaattaatggctctaatgcactttatgagtccaatcaactgacaatacctgctttttatacaataactttgttcatgctcgaacaaagcctatctttttggtagcattcgaaagcacaaagtctgaataatgtaataatacgagaaaacaagag

SEQ ID NO: 4051 - DNA, 1920 bp, Heterodera glycines
  unsure (1)..(1920): unsure at all n locations
ttcaaattttaaanatttttgaattttatacattttattactttatgccattatntggtttgatttgaataaaaattaatcatttttcattacttattataaaatttttacgtgtctttggttttactaatttttcccgttatttacttggaaatcaatattacccgtccttgggaagcgaatttttctaatggaaactctatattaaactcatccccacaaaaagcattacatttaaatctgttgagaaaaatactcataatttgtaaattctttaaccttcccttggattatcatcccatcaatccgaggttttccgaaaaaaatgccgaaattattttttaccagttgaccacttatggaccggttggccccgtgtgccgtccgttacccttcccaacaacagaccgccggtccgcaacagaacagcttatagttgggtgcacaacatgccacatcgccggtataaccgcggtgctcagtgcaggtagcccaatggcatccgcacgacttcagaagcatatcacaggctaaatatatggccatggaaaaaatgatttaatttattgacattttttaacgattgaaataattttttatttttaaaaacctatttttaggtgtgtaaacaagtcgcggtctcgagtctaaaaaatcgaaactaatgacaaacatccgagagaagtaagtcgagaccgagatttgggaaaaactgaatattaccaaaaaagagtttgaactattttttatggttacctaatttaaattagaaaaatgtttagttgttccttcataacccctaaaattctccttaacctgattagtctattaacaattctaattgctgtttttttaccccacgagctgcgccgaactcgcccaacacgccgttccccatcagattgatgttcaaataatttgccatcattggtgtgacttggaaggtcgccaccctcgacgagaattgcaaaaaatggaaggaaagtggcaaaaatgatgaaaataattgagagaataaggacaaaccgattgtggtccattttagcgaaaataaaaaaatggaaataaagaaaaatgaaaaataaaaaataaaagtaaaaagaatgagtaaatgatggaaatttggaatttataacaaacattaaaaaaatgatgatgataaatcaacaaattgaatagggaaaatggagatgattcaaccccttccataggttcattagtgagaaatggatgttgatgaataaaaattgtctgccgatatgaaattgaaaaagtaaatcagtggaataaatagagataaattaacttagaaataacgttttatttaaacaatattcagcataatcaaaattagatgcctaaatccaatgaccaaatcaattcagtttcgatttaaaaactttaattgatgcattaatagttgaattaaaattagcgtgacaggagtccataatataacctttccaaatggattattatcagctgggatttactaaatgtcgtttcgtcttcgtttcgtaccatttttctgcactttttgagtttcgttttcgtgtttttgtcataaaaaaattttcattgttgtcatttccggttttacatgttaataattcgttactgttttcgttttacctttctctgtctcgaggtcagcacttgatctcgagcttagagccattcttccattaattctttttgactttcttattttttccattaaaaaagcaaatttgcttttttaatttatatataaatgtatatattttaaatctttcaaataattttaaaaatttttaaattgaatctcatttaaagttcatatcaattaagttaattaacaaagtgttaatatccatttcacaaattaacattgcatttanaaacgaccgaaatgtaaaagtccatggggcacagacaatg

SEQ ID NO: 4052 - DNA, 3649 bp, Heterodera glycines
ttaacaacaaccaaaaaaaaacatgtttttcgtgcgttttaggcaacggggagctcaggaaaaaaatatgctaaaacctaaaaattgcatccctatttacgtatatgtcagcccgttttcatcagaatttgatagtgtttgagctaaattttaaatatttttgtttgtaccgtaaattgcagttccatcgctaccgtaaaccactggatgagcgacagctgaaccgcttcatcaaaagccatcgtccatttttggtgctgatcaccgaggaattagcatcatcgaaaattagagggactggagacaaaattgcaagaacgcgtccaaagcgggacattggcgcaacactgactgattacggtaggactactgtatggttcttgataatttttaaatctagcaaaatcactattatatttttaccagggaaattaaaaaacatttaaaatagtttttatagaacacaaaaggaacaatatggctgtcctcaaaaaagtggtcaacgaccctttttacgacaaagcccgcgcattttggcgcagttggaaccgacgacatcaacagcaacaacacccgcaacatcaacagcaacaacacccgcaacatcaacagcaacaacacccgcaacatcaacagcaacaacacccgcaacatcaacagcaacaacacccgcaacatcaacagcaacaacacccgcaacatcaacagcaacaacacccgcaacatcaacagcaacaacacccgcaacatcaacagcaacaacacccgcaacatcaacagcaacaacacccgcaacatcaacagcaacaacacccgcaacatcaacagcaacaacacccgcaacatcaacagcaacaacacccgcaacatcaacagcaacgtcaagaacagtgacaacgccgacaacaactacgacaaagccaaggaacaaaaaggcagagttgcctaaggcaaatggtgctatgcaatggcctcaacttttattgtgcggagcccttctgccatttttggcatttgtttggcggcaccaaaggggtttgtttaagtttataggaaatttggtcaaaaaatttttgaatcctcctcaatcaaaaaagggaaattttgtgaatttcaatcaaaacatttttcgtttatttcaagatttgagtttttgagaacttatagaaagtatttcatgcttcctagggattttttcaaaaaaaataaaataattttttagcaaaatttttgtacacatttcgtgcttttttgcatactaaatattatatttacatattttaaaaatatggatgaaataaatatttttccctaaaacctcaaaatatttttttattaatgaaaaaattaattttaaatgaaaaaatttagtgcatgaatgcgttttttgatctcctttcttcaatgcatataagcaaaaaaaaaaaaaataaataaaatcacagtcctactgataattcatttaacaaatttacagacgtcgccaatttgttggaagacacaatggcacaacagcggaagccaactcttgaaccaatggcacccactgggacggcacatcactcgccgattggcacaactttgttggaccaaccggcaacatgggcgctgatgtcgggaacaatccgtccacaatgccacccactggggcgccacttcactcgagcagcagccgattggagattggtgaaagggccgaccgaaagaagaaccaaaagcgccgtgtctttttgtgagtttggccgacaaatttcaaccgaaggactaattaggaaaattcgttttgaaattgccgacgcattgggaagaagtattattaattaatctaatcaatcattgtttgggaatttaactggcaatttgaaaaaggaaccgaatggacgcgctaaaaaaagtggtcaaggaccctttttatgatgatgtgcgcgccttttgactcaattggaggccgtcaacaacataagcaacaacatacaacaacgacaacaagaacaacgacaaagacaacagcaaacaagcaaacttgccgaaggcacatgcagctttgccattgcctcaactttgttgtccgccacccttctgccatttttggcatttgtttggaagcaccagaggggtttgtttaagtttatagataatttggacaaaaagttttttgaatcctcttcaatcaaaaaatggtcttgcgtttgttatttgttgtaatgatccctttctctttgctctccgttcaattgttcgtcattatcgttgcttctgtgctcacactcgtcacccaatgctgtgcttgttgtaagaaaaaggtgaataaatgattcattcattatttatcaaatgaattaatttaatttgttttttattgacagaaaaagccaccgacaacaaacttcgttgatcgtaagtctgtttactcaagtgttttgtgtctccgaacagctccaaaacccttacattttcagcagccgattcgcgctattcgacgcttgccaccgatataaacaaggaaattttcgttcaaaaaaggccatcgcagcaacagcggtcacaaactgtaccctatggaccttttgtatgttggagtgttttgtttgctttttttaaatggcactaattgcgttttttggtttcagcaagtgcgacgcccgtaaagccggcacttttggacgagtacaaattcttgccgacattgcgcgtagacccgcccgcttttccagcgcaggccgcaccgccaacttctgtattggcctcaccgaccatctcggcaaaaccgaccactccagcagcatcggcaccgacaacttcggctaaaatgatcacttcaacaaaaccgaccacttcagcaccatcggactcaccgagcacctcaggaaaatcatccacttcagcagcaccgaaggacatggcttcgtcgatgagtgcgccaatcattgcagaggcgacgggtaaagattttttttggaaaatgttgccaggttccagttctaaaactcatggtttcatcaaatttttgattaggttttccaaaggggaatctgccgagaatttagcgcttgtttcattttcattcaaagtctaatgattcaatttgcggtgttttgtgtcatacacaattgcttttccaacatgacattcattaaagtttttcaacagccgactcgggatactcacaaatggatcaatttggtcaggacatgtccattcgagtgctaacgccggaggaggcgaagaaccgaagtgagagagtgcggaaaagcattgcattgattctgatcactcatttcagcgccagagacgggccaatccatcttgatttttgtgctggtcagcagcagcagtaagaagggggacaagcgccgctgagatcgtcgacggtcagtcaaacaaacgaataaatatgtttttcattggataattatcatttttcagcactcgatcggattatttgtgtgatgctgttggccaattggaccgttaatttaccctttgaaagcgttcgctgtgttcagatgaaatgtgacctttcgataacctttgtttatcatgtgattgctgtcttattattcccactgtttctgcccccttaattatgttcttgtcattgtcatgtgattatatgtattatttacatgaaatgtcgttgcatataaat

SEQ ID NO: 4053 - DNA, 5421 bp, Heterodera glycines
  unsure (1)..(5421): unsure at all n locations
taaacgagcgttgtgccgaattgcaaagaatttttggtttgtctgtagactttaaaatcactgcattttaataatggattaattgcatcctttttaaagtagccgtggaaaagtgtcaaccaatgccggtgccatcaaaggcggctgctgacgaatgccgcccacctagcccagagaacatcccactcccgacccaattccgcagttttgtggtaaaaaaaaactgatttacccgattctttttactattgacattctaatccaatccgtactaatatttccattaaattaaagtaatttactgattgaaaaaagctttgtaattctgttccaaattttaattaatttttttttgcccactcatttccaagttattccttttcaatcataccgaccttcctcaaaccggacagaaaactggagagataagggcccggtcgggatttttgggatcctgtcccaagtgcttgatcccgaaaaattgaagtcgggatcccgctcctcgacattttctcgagatatcattttcttaagactttaattataattggcaaaatttatttttaattagctgaaattttaattttaggctatttaaagagaataaatattggattactctctgttggttagccattttttgacatttggatttttcaattctacagtaagaaatccctggccggggtcttattttagtttcaaagccacacatccctaaaccagcaaatcatttcatttctaaatctgaacctgcccttacatatcccttatcccaattttaaaggcgaatgacggaattagtgcgcacaacaatggtttagtctgatgatgttcatcttttacctgctgatgttattaatattgttactaattaccattcgctgtgtgaaattttcattttcaaacaaattttatacacatttttatgcacgtaaagtatttatctttaattttaccagtatccaattgaattgaatgtttttcattgtacactttcttttattgtaatgccttttctcccccattgaattcacacgaattggcccttttctcatttcattattttgtcattcaaaaaaaggatttgtcaacagcagcagaggaagaacaccgaacaccccctttatctgctgctgatctctctcactttttgttattgttttgctctttctttcccactttttttttggtccgtcctttgtgcccaatgttttcgtttcgtttcgctttttctgtcatcccccccccgcgccctcccaaatccaacatttttccattttcaaaaggttttgagcattttgataaacactcgaaaaacattttaaacaaaacgatttaagcttctcatttgcgtcatcgccatccctttctaatgttccttttttatcataaaggttaataattagtcagaaattgcattgttgatggacaattccttaacaaggattgataggcggagatagggaagaatcttacaaattaataaagttaaataagattcacgatttaaaaaattttgatcctacaatagaataaacatggaaaaatacgaatactgacgatttgataaaaaaaaacccggacgaatatttttcacttataaatattataatacctgttttttttactttaatgggcttaggcttaacttccttcctcttttccttgagcactttcacaaatacacattttgttgaccaacaacttgttttcttaaccccccccccatttcaaacggagaaaacgtcgacatttatttatttgagaggaaagggacacataagtaaacattttcattttccaccggaggaatgaataattaaaatgccaatttagattcattttgcttttttgtttcttcctacatatattccatgtaatgtgtttctctactaaaaaaacaatgacaagttttctcgcaaaaacgaaggcaatgtttgccaattcttccgattgtttttctgcgtccgaaattggcgcgtttgaggcggagcattgctgtgcatgcggcacaacgcatctttgggccgacaaattttggaaggtcaatcatttttttctttttgactcaaatcaaatttaattgatgcctaattaaaggttgcatgttctgtggactctgaaaagttggcatttcgcggacaggcgacgacagccatcggcgccgcctattggcatccgatgttctttaaggaaactcgtgggtttttgaattttaaagaaatttttattactcaatcgcatctaaatgcatttcttgggatatggtaggggcggagtttgtcactcacaaatcagagcagcagttcagcaggagggttagggtcagcgtcgggttagccatcggtcggtgggtccgagtttagctctttttagtttaattttttgcctttgccctacagtttaaaccccgcctacatccaggaaagaaagtcataaaaaaagaaagcttagcagtataaaagttgccgccgggttggaacgcttttccttaaaattggctgagcctaattgccccctccctaccttttcaaatcagttgcaattaaccctaggattggtttttcgttaatttagtagggcttttgaggccttgggtgagaagagttcaaacaaatgtcattcccaccacatgtacaacgttttgtgtttgtttcaggtcgttcacgcagtgcggtccaagcacatttaaaatgtgcctcttgcgggaaggaagtaaacaaagtttacgaagggacggacgacgccggcggggggtcgcgcagcgcttttggccattacaccgacacggaaaagcggacggagctcagcggtttgggtggcgtcgcttatgcggacattgagcgggcatttgccgtcggcggcatgcggtcggggcacaggcggaatgccgaagatttggtccgttgtctccgtgattatgccaaagagaaggaagaggcggcactttgacagcggaaagatcccaatcaataactgggtcgctgatctcgaatttgacattagatttcaatgtgacatacaataaatatcccgtataattgattaaaattggaattttaaatgatttttcagaaaaaaacaagcataattaatttaaaaaccctctcaggattgccttgtttagggcaagtcataaatttttaaatttatcaataattttaagaaataagaacaaaataagaacgatagcccgaaataagggcaaatcttacaaataaggacagatcgcacccctggtttaatcttgcttgtcaaatgttaagcaattaattttaattcattgtaaatcccccttctcttttccttcctcctggccatttttggtgaattaccattcgttcattagtaaagctacttataattaataagtgcagcacaaaaacaatagtgggccaaaaatgccataattttaaaaatgccaaacaaaaacaacggaacaggtgcagcgccaaaacataacattaaacaaacaacaacaaaattaacaacataacacctttttttggtttcacctgtggcccacgcattggcaaaaaaacatcccattcacagaatgccgaaaacaaaatcaaaaacaatcatttaaaaataaatcccttggcaaatttggcaccgaaaacacgaaacgacaaacgcacaccaacaaaggttgaaggggaagggagcatttcgttacaaatttattggcattttattattacagaggaaaaagaaatggagttgaaaagggggggggggatggcatggccaattcgggacaattattaattgttaattagaatgggtattatgtttacaaatttaacaataaaacgttagaggtttattgttaaaattgatgatcaaataagggagagggaagaagtggaatgatataattagatggatactcttcactacaattaaggactcattgtcagatatgttttttggcgatttgatgagtgattaacataataaaagtgctagtgtaaaatatattattaattttcaattaaaaatcatttaccataattatggaattgtgagaagaatcagacattttggaaaatttaagattaaaatgaaattttacaaacgatatataacgggcgggaattggttatgataattaaaaaagaggaggataaccggaacttcaatagaaaaatttagttgaaatatttaattcaaacaaacttaaaaagggttaattcctccttaaagtgtaatatgtggcgtgctgtttaacacaaaaattaattaattaatgatgcccaacaaatggatgaaattgacggattgccatttttaatgactcattataatgatcaagcttttctgccgtgcaatcaaaaatcgtcatcggttgtaattgggttcagtttgatcgaacaattatagaagaaaattgactgggccattcagcgctctgatcagccgaaaatgatcggacctttgcctcggaacaattgggtccagcgcagcacgcacaagcagtccatcggcaccaacacatcgtccgcaaattcgaactcggacgtgccaaggcggagcagctgccgctcaatgcttttgggcggttggaccaacgcttttgtccagcctaatgcaataggaaattaattaacaaacattatgtgagaaacaaaaaaaacaattacgataaacggtggcacagtttgagccgaccgcgcactgttccttctcggcactggcactgcccgtcgtctgctgctcacagtaagccactttgaagcgctgttgcggaagcaaaaggacaggttggccgctggttttgcctaaaacaacgaattactcacattaaaaaaaataatgagtccgcccgacaaatgtttgtttagggcaattgtaaagggcatgaaagggaacaaatggcacggctaattagggaaaagtgtcccagtacagttgccaatggatggctaattgactttgacctaacgaaggtggtgaacacaaatgaaaaggaacccgcggagtaaagagccgcattaagccgaatggaaagggaacggcacgcaaataacaatcgtaatttatgccgcttttaattatggggatgcgcaagggacggaaaaagtacaggaaaacggatttccggctaaattagtgcagaaacagcagtattaaaatatcatcagcttatgaatggatggacaaaaaggaaggcatttttaatgggaaataaaggtcatcttcttcattctctccccaacagcagaagaggaggtggaagtgagtgatgcgatgttttgaagagcaaaaacaaccaatccaacaccaaccactgctcccccctccggggatactttcgttgtcctttcagcttccaaattaggagcactaatttgtgtggttacacataatccattcattcccagaacatccgttttatttanatgttatgccata

SEQ ID NO: 4054 - DNA, 1483 bp, Heterodera glycines
gaatcaactcatttacgtgcctcattccgggtttttaatctggagattttttaagcttttcttatttttagacttttctgaaatcaacacttacctatgtcgataaatggttccgggttgagcgctttccaacggatttggcatgggtttctctcaaagaaaaaaaaagtttctcgcgccgaagtgatgagtttggctgaacagattgcttcggaagtgaacgacaatgagctttttgacgaaattacggcgctgaatgaaatacttgaaagtatttctgacgagaaatttggtgaaatgaacgcagaacagaagtggatgaaggttttcgaggcggaattacccaatcttgtgttgctcgtcagcaaaattctttcaatttcggtttccaatgcatgcgtggagcgcgtcttctctctttgttcagctcagtggactgatgtgcgcaatttattgaaagttgaaaccgtgaaaagtctggcccaaatcaaatcgaattatgatctcacttgcactgaaatatacgatttgctcatttcctcaccaaaattgttaaaaatgatcatgggaggtgaaaaatataatatttaatacatttttgatcgaataaattgtaaaaataacgatttgaagcaattttgcaaaatgtccttattttggacccaaaaatcttattttttggccttgatgttcttattttgaaaaattttcgatccgaaccctgccttaaacatctaaagaaatcaaaatttggcataaactcgcaaaaaatgttttgcattccgaaaattaccaattgaagacgccaatcgccaataagttgttgagggagttgaaatacagagcattttgaagtgagaaggcagtacgcaatcagaaaaacccagttaggttagcctaaaaagaaaaaatgaaacaaactcagatttataatatattcgtttttttaattaaaatttatcagcagggctgtaaattttatgcaaatgcatttttttttcctggattctacgtagtccaaatagtacgaaagacaccttctttttggtatttgcttataaaaatcgggacttttatttgcatatttttgcatatttctggttttttatgcatattttggctttatgcatattttgccattttttatacttattttcagattttttgcatatttgccattttttgtcaaatattttccaatttgaatatctcttaggaaaaatttttgattatgccctaaaattaaatccaaatttgaatggatgcgcgaatggatcaacagcagggcgcggatctgtcctgatttaatataagatttgtggcaatcggcactgccggacccctcccctcgcccgttcaccagaattttttggaaaatgcgccgaaaaaaattgctaaattcaataatggaggcgaaaaatataatatttaatacatttttgattaaaggaattttaaaaaataacttgatttaaagcaattt

SEQ ID NO: 4055 - DNA, 1439 bp, Heterodera glycines
cgaaaatgcaaagactgacgaagtcaaaatatatataatagcagcgttcaggcaattacaaaaaaagatttgattaattaagcatattgttgattattttggtttgtaactttcttgaaatgttagaattctcttgttttctcgtattattacattatttagactttgtgctttcgaatgataccaaaaagataggatttgttcgaacatgaacaaagttattgtataaaaacacgggattgtcaattgattggactcataaaactcaattgaactcataaaagtcgattggactcataaagtgcactagagccaattttattctttcgaattattcaagttaattcaagcataatgtaatcttatgatatttgtggaaaatttaaaaaaacgtttataaaattattttttatataattatatgatttagtgagtcgtataattaaatttaaatatttttattcacactgagactatttgcagttcgcccacactgagaccattttcggttcgtctcagcacgctgtttatcactacttgttgaaatcattctttgtcgaattcacaatttttctgatattgtcgaaatcactcactgtcgagatcacataacatccattttatcatgtatttccaacaaaaaactaacaaaaacattgaaaacatatgggtgagaaatcgtaattttgagggtcaaaaaaccggtaaaatttacgaggaataaaattttaattaatttgcacccctagttttcaacttttttgtgcatatttggtgcatgtttcacgactttattgcattattttgttttaatgtttattaaagaataaaattattcctttgtactatatgcaagatcaaattacaccaaaaaataggcaaaagctacagcacggtggccatctctacacatttgccaagacaagtgccgatggaacgattcattttggcgatggaaattcaagaacggtgtcgataaattcaaaagaggaatttggacatacacttcgagatgaatccatgctgtttctcttcaaagtacatgttcgcctgcagtttcagaaatgaccctcaaaaaatgccaccaatttcaggttgatgtgatgaacaattatacgggtcgtcagcgcacagatgggtcgagaatggaaccgtgtttcaaagttgaagcttggaatatctacgagagaacgatgcgcaatgacgacacagcaataatttttcagaagctacagaattcactatttggcattttaaattatttttatctactttggcgttttgcacaaaatttatggcactatatgaaaagtggtcgttttgaaaattttttgcactttttttggattaatttttttcaaaatttttttacacataatgatgaataccacccgggggtttttgaggtcgctgaacacgaatatggcatccatttcgac

SEQ ID NO: 4056 - DNA, 7507 bp, Heterodera glycines
cagacagtgcactatttccttctttatttttctcacctctttccttttcccacacacaatgctgctgctgtctacccttccacgcgccgcagcccgcgtagacagacagtcagacagtgcactgtttcttcctttgtgagaaaaataaagaaggaaatagtgcactgtctgactgtctggttacgcttttaaaaaatttgacccaaaagggggacccaaactgaaagagtacctcggggttcagaataggacaaaataattgtcatattcgtgatcagcgacctcgaaatgggacgcgaagcgcgattcgcggcgttttttcgcgaccgcggaattttttttgcgcttcgcgtcgcgaattttttgggacaaaatttataaagaattttttttgaagcgattgtctttttgaatattcaaaatttaaataaaattttttttgaaaactgattatttttctcaaaaaattcgttccaaaatttatagtcgaaatgtcggaaggaaaaggcgacgctgttttgccgttggattcggtgccaagttcatcccactcatccgagaagggtctgtcgttcaaaaacattttacaatgggtctatctagtctccgttctcccctctatagacccaaccaaaatgagcaccaaagagcgcttgcggcgtctgcaagcgatttgcaagccgggcaaaacgccattggtgcaaaaggacgaattgcgcaatagcaggacaaaacggtgggggaattatcagcgggagagagtcgataagcacgtattttagtttggttgaaatagggcaacaaaaactgtaacttagtcactaaaaattcaggaaacaaaaacggaaatttgttgaggccttcaaaaatgctaggattttcaaaattcgtcccacatattccctcccgttttcaagacgacgtgtcgatcatttggacagtgcgcacggcaaacggttcgcttgctccgccggcagtggcgtcgacgcgtgccttcggcgttggatgctgcagggcactcgtgtccacgtcaaattgcgcgccttttctccccatcaagagccaaaccggttgttgcaggtagtcaaagtgtccaagccatttcccggggataaaatgccgggaattcccgagattggtgtgttgaaaagtgctaatttgtcggaaaactagcactcattatgatggataaagtgaaatgaattcattagggagcaattgtggcgttcgacaaacattggaacattgtgctgcgggacgttgacgaggtgtacatgccagcgacccgacttggaaaggtctaattgttagaaacgacaaattgttttggaaaacgaattcaatttccgtcccattggacaggtgcaatcaatgcctggtgccatgccccaatctgtgcgttacaccgatgacaaatcggcaccgaagggccaacgccggctgctgacccggcatctgaagtgctcaatggtcaccggaacttcgctaattgccatttacagtgggaacacccattgattggcggggaaaggcacttcccactcaatgctttttgaaatggaattggacagaaaaaataaaactttttaaaccaaccgcctaatctgaacaaaaaacgggtaacaaatccttggatttttcgatggccataaattttacggctcccatgcccaggccttttctggcaacctgaattttggttaagaaaaaccagatccaattccaccatagaacccaaattcaggcttttctcaaaatgtctaagttgttacttaaacatcatttctttattaacatttgtttcttgtatattgttatttttgatgttttataaacaattattgcaagagattttcgcatttttcattttatactaaaccaaaatggaagtggaggagatatgcacacaattcacaaatcacatttttcgtccccataaaaaccgttccgtttcaccgcatcaaaaagtagatgatgaggaagacgaaaaaggagaacaagaccaaatagcagagcacattcttaccttaaaaatgaaaatttaaaaaggctagcaaaaatttacacatttccactaacctccggccttagacacaatgccaagctttttcattgtggaacccaaaaggcctcgtgtgctgtcgaatttggtgtcctacaaaagcgaatttcaaatcttcaatatgaattcgctcgaaatttgaccgatttagtgtatttttattcctggatcattctatttttaattaaatgtgtagccaatcaaatcataaaaatttccattattttttgaactgagtgccaccagaaaagacttgccatttcgtcgatcagtctattctgcccacgaacatcatccccaattgcgatggtcaccctcttcagttgggacactttgttgctcaactcttccaccatttcgtcattttgctgctccaacagaaagccgccatccgaaaaaggagaaaaattggattaaagagacattttgatgatagtttaaagaacctcacttggtctgtaggccatttttggatgagttttttgtaagttgtaggtcgattgatgaaaaccgaaagagtaatttgggatggatatacagcacaactgaaaaggccaaagaaactaaggaatacagagattatatttttaatttatgttagaaaatgcttaaggtattttatgagaagatgaagcaattccattaagaattttgcaaaatttttcctcgtttaataaagtccacgtgaaacaacaaaacgccatatattttaaaattacaaaaatcttcgacttgaatttctaggtgggatttcggaatttaggtaactctttctcggcatttttcctgaccttaccgggtattacccaaacaataataagatggggttttggcagatttttgaaataaagaaaatctataaaggtgtttttatgaaagtttgagtctgggacctatgattgatatttttacccgacataagttcaaaatcctcgttttattactagttttctgttttcctttcatttaaatttatttagaatttccatttataatggccttggcccattacggctttttggcacccaaacgacgcattgaaccggccggcatttcttatgaattctcgttgatcaaagatcggctgatcctcggcctttccacacttcccgtccttcaaattgtctttcaaaacagcaggacgacggatggcgacgacattgacggagccgctgttagtggaacaaaaaatggcatatattggccgctttattttcttgatcaaattttttgtttggatttcaatgcgttaaaatcataatcaacgcggggaaggctcaacaaattggttaaaattaagggtactttccagttctggggccccaattcattcgaatatttgtcttacattcaaccatatcttctaggacagtgtcgattggcttgaccgagatgactccaagttccgcaaatacatttcccggttggaccccaacgagtggaaaaagcaagaccagtaagttatgcactgttcgctttagcaattaaaattcaaatgcttttcagctacaaagtgctcggcttgtcaaagttgcgctaccaagcgacggcggcacaacttaaaacggcgtgtgagtgcaataaatttgtaaaaatagaattcgacttggacccggaccaaggcctggattttctctgtccatgtcaaggcttttttcaaataatcgaaccttaataaaaaaaaatctagaaaagtaaaaaaatgttttagacagacgcaaagtgttgaaatatcatccggacaaaggcaaagcgacggagactgaggacaagttgcttcgcaatgaagcagtttttgcgtgcattcaaaaagtagggaattggaaaacattttaaaaaagtttagccatttaattttttaaaccatagtatgacaaaatgttgcccgattcgtacaaaaatgtgatttttcagaaaaaattaattagtccaaatggttgtcagattactcggctccaatatcatagccttttatttcgttcaaaaagggcccgccatttgcggtactcccccaattttgattgtcttcaatttttaggcctacgaacaattgggcctttctgaggagcgtcgccgtgccttcgactcggtggacccccaatttgacgactcaatgccggacagtgtggacactgccaatttctttgaactgcttggacccgtttttgaacggaatgccaggcaaaacattgctttttattcaatttaatactcaattccggtgggttttcccttaaaatccccgatttgcttaggttttccgtcaatcagcccgtccctttgctgggcgatgaacacaggtaaattttcattctgtcccaaaataccaaaacaaaacatttggcatttatttgtttgcgctgccccttttctagcgatcgcctccacgtggaacatttctacgaattttggttcgattggcgttcctggcgagaattttcctatttggattcagaggacaaagccaagggggaggaccgatgggagaggcgggaaattgacaaattaaacaaagtgcgaatgtggtggggtgggggcggaccaggaaaaaacgtcgccgccgaacttaatacgaaaaatattctagaaaaattcaaaaaaaaatgttatcaagaaaattcaaggaaattttaaaaattttaaagtttttggtttttttccgaaaattcagcaaatttagtttttattaacacttagattttcaaaaaactaattgtaaaatacttttaagtttttttgaaattttgaaaattttttaatttattttaaatgaaagagcattttagggccaaaaatagaggattttccctggtcttccgagtctgtacgagagggaattagcaataaaacatttcttgtattaataatcgcttcattgttcaggccgaacgggaaaagcgacggaagcgcgacctgagacgcatttcggcactcgtcgaattggcctactccaaggacccgcgcgtggcccgttttaaagtcggattctgacgcgtctataaatattgcatttacaaattaacaatttctttttaaatcattttcaaaatgtcttttttatattctttaggaggaggacaaacggtcaaaaaatgcgcaaaaagagcggcggcggatggagcgcgaggcgcgcgagcgggcggaggcggacgaacggcgtcgcgcggaggccgaggcggcgcgggagagcgaagcgcgggcggaggagcagcggagggaggcgcaggtcgagattcaaaataacagagaaaatgccgcggcatttgtggactgattactgacaatttgcaatcatttccattcagattcaaaatttttgcgattttttcaaaaaacccattcaaataaaagtattgggtgtgatcaatgctttagttttccaacatcttttttgattaccgtacgagaacttgaggttactgtatgctattcaaaaaaatctttttttgttttaatttatgtaaattttcattttaagaaatatttgtccccgttttcaggtcaaacagcaacggaagaaggcaatggcagcacaacggcgccaacttcggacgatggcgtccaatgcaaattattggatggaaaacggcacggcattggacaaccgacggatggcatcaattgctgagcaaattgaaaggtggagaaagtttccaaaaatatcacccaattatgtcaaaatagcatgccaaaggttgtgactgatttccgattttttaaatattgttcgtgtgaaaaagccggcatttccatcgtctaactgaattcaggagtttcttgtgcccctcttttcccaccccttggctcattcccaaataattttttagaatttgtctgtccgctgaattcgacgaattgacggcactctgtgaggggttggccatcgtccaaacatttgacgaggcacagaaactgctggtggaatgtgtatgttgtgtttctcaattctttttcaatgaattttattaaatttaatttttaaattttaggcaattaaaaaagatttcgccgatggaaaggccggcggcgaagggccgtcgacaaatgcgcagaacaaagcgccggttgcatcgaaaatttggtcaatgaacgaattgcaacttttgatcaaagccgtaaatttgtttccgccgggaaccaacgaacgatggaaggtgaacggaacggacgaaactgaattggaaggggggaagataaatgggtagtaaatgattaccagacccggaaaatttggtccaccgattaattggtcggatttacactcccaaccccctgaatcataaaagccctagaaaatttcataggaattttatctatttttcttgagatttcaatgtaaaaattcaaaaaaaaatttcgggggaatgaaacgggagaaaatgacggatgggcgcacgaacagcttccaaatgaaatgcaattagaaaggaatttcggaactgttaattttaccaaaaaacggacaaaacattttttaaagcaagtggccgagtacgtcagcagccatggtgaccaacagcgcactgaacgggaagtgatcagtcaggtaacagtttaattgcactattttagttaattgattacccattttcatcgacaaacttttcaggttaaactgctcaaatcaaatccatcctcaaatttggcgccgccgccgaccgtagtgactaaaaatgccgaaacgaatgcctcggcgacattgacggcaccgtccgctgcatcggatgaccaggaatggagtgccgaacagcaaaagtgcgtcgagtttatttttggaaattctcggaaaggcttgaccacgataatttacaataaataataaacaaatagtgacatggagggaaattttcaaaaaatatttcgcaaattgattttgaatttattattttttaattttatagaaggggaaccctctagatcaacatagcctgatttttggtggggcgtacaccgttccaatttttccgtgcgctctttcgttcatacatattgggtcccaattttggcattttgtccgttcattaaatttttttaggcaattagagcgcgcattgaaggcgacaatttctgtcgatgcgaaagagcgctgggacaaaattgctacgatggtcgacgggaaggacaaaaaggagtgcatccgacggtacaaaatggtggcccaactggtgaagaaggcaaagatggacggtggtggtggccaacaacagcagcagcagcagaaataaatgcgcgcgggtttttaaaacattttgaaacggatttatggccaatttgcgtatgttgtttttcgactcaaatactctctctgttttttgttgattattgttgtcgcttttttgttttgcgttttattattgtagcttttaagagtaaacattacaacttttgttgtttaccgggtccacgcactttatgggcaaaaccggaaatcgctgcacaaataat

SEQ ID NO: 4057 - DNA, 5380 bp, Heterodera glycines
  unsure (1)..(5380): unsure at all n locations
tgcgtttgcgtacacatgtccgctgcggttgccngagctgtttgtggacacgttccgaatgcccgaggcggtcatggatcgcatttcacactcattcgtcgaccatgttgttttacttctaaaataatcagcccgggacggcctttttttaaaaattctgtccttaacaggcactacaaaaaaattttttcccgttgcgtgtttttgcttccggtctaaaaaggccgaatcttcccaaccacacacaaaaaaaatttttttcacctaacatcgaataataatgcgtgtaaaattgggtaagctgttccggtttgttgtccaacaacccccacggttttgactatacttcatttattcgtacccttgctatttaattatattttcctcaaattttccaggccattcactttcttgaccccatcgcgaagcttggggccctgcgcgagaagtaccgacaccattttgtcagcaccaacgaacagttgtgccttctcagcggccttggacacaaccatccttagacagaaaaatgacggactgctcgctgattttgccttcattctaacctacgctgagttttttcgcccacatttgagaaactgtccaaacccttttcgagccgtttttcatcactaattggacgctaagtttggggaaaaacaaataaatgaaaattattgagaaaaaaataaaatgtgtcactttaaatgtgtttttcatctgcctttgccactctctactcttcaacctttgccattctcgcaacctcaggcttttttcccaaggcttctttctcacttccttcttttcactagccaatttctcatcccctgccttcttttccctagccaatttctcatcccctgccttcttttccctagcctcatcccctgccgtcttttgccttgccaacttctcatcccatgccttcttttcccttgccgttttttcttctgccttcaatgtcctattctgccatgcgccacttctcatattcctcgagctgtttacgttcatttttctcttagttttcttgctgctcttcattttgccttcactcttcttgtgtctgtttgcccctctcatgcaattgtggcgacagaaagcttaccttttggtacacggaaacggtatttcctgctgctgtataggtgaactattacatattgtgggttccatgtagccaacttaacacaaaaaggaccccaaagccatgtttttccccagcctgtttgggcaaattatgcctgacagtccaaccatctacccggccctatcgaacaccaacttcttagtcaagtgtaccttgaatttgtttgttttatttccaacaaagcctggcgtattgctcggcagaattacaaagaaaaagtttgtcatttgatcaacaagtataaaattttcaaaaaagtccttatatgtggtgtgccaactcggttcattttcttcatccttggtccatcggaaactctttgccatcgttgtcgttgccgactcatccttctttttgtgcttcatgatcagatcggtgcagtcaaagttcagctttgcacagtcttggcaaaacgattgggcgaacacaagtcgctgctgttgctcgccattctgattgatgagtttgaaactgctctttccctgccggaaattttcgccacgacactcatcgcacatgaacgtgaacacaccatactaaacattttgctaatttttaacaaaattttgttaaaaacctttgggcgacccaatttccaaaatatggaagggtaatcaaacacatttttcggttgttttttgggcgattcatccactaaattttgcgaatttgagcaaattaacagaaaaagctaaccaccttcaatttccatggccttggctttcttcactgcagaagcaatttcctcatggattttgtccaggcgaggcttccgtccccttttcgaggggcccggttgtaggtcaagcagtgtttgggtgatgttgttgttgttgttgtctccaatgatgctgacgtcatcaccattttgaggggaaaatttttcttttttcagctcatccatatgcaattcttcaaatttaattattattataagaaactcaaaaaaaaagattacttttgttctcaaacaccaattgatcattgatttttctcggggccattacgattaggaaatagtttatgattataattgttaaaaaacataaaatggacctgcgaaagaacgcataattattgattgattgtgtgagtgtgttagcgcgcagcgacctccagacgggcagtcccttcttaatcgataggccacgcccatccagaaacacatggactatagagtagtggttagagaaagataccaaagggcactaagttaaacacacactgtaaccccaagccaacttattgatttttacagactatggtactccctctgactgccgccctatccaaattgctaagctgtaaacccgaaaatttagcagaatatttgaacaaccccgaggcggtgaacaaagcgaacgcctacctgtgtggcaaaaaactcaaaacaacctatcagggtcgtgattgcaagaccaaagatgtcaaatttggcacattttcgctgaaacctgccgctgaaacctacgcctttgagggatttcttggcaagtttccgaaaattctgtttcggtccaacaccatgcgttcagatgtcaaagtccaacagtatttctacataaaacaccggattcgcctactgtaccctcagctcaagtgcattgttgagtaccacaacaagggccattgcaaatactacccattgggtacaaatttttgtccgaaaaaaataaaataaataaataaacccccttaagagttgttggccattgaggagggctgtgagagtgcacccatcgaaaaacctgccgctgaaacggactatctggactacttgaactttcgcagtgggtggcaatcagcactctactgatcaatgaagcgtgcgagacaatcggaaaagttgggcaccttccctgagattgagttcgccgtcaacacaatgggcgtcacggtgtattgcccacggcacctgcaaacgcctcggtttgtgccatgggaccagcccgggcggtgctcgagctgcagaagcggaactgttgagctggactacatcatccagcccgagggggtgaccatcttttcgaatcggctaaagacggacggcgagaactttgtgccatttgacgcaattggtaagcttctgcatgtgtttgccaaaaacctaacccttttcttaagtggattttgccgatcgtgctaaattccgcataagggcacgaaataaggtgttcactttgccgctgcgacacccggaggtccatgccgcaggcccgagcttggaagaagccgtaaaagaacagaaggaaatgactcagatggcataagcacttgtccattttttccattgtttttgttcttgttctgatggattacccaagaataatcgaaagtgaactcgcttttcccatcccttcggggattattgtcagcgggccttcctcatcaggcaagacccagctggtccttcgcctgttacggcacgccaacgtattgtttgatccccgccaaaggcaataggcatgtgtaaaagggttttatgtgcagtcatttttgtgtctagtgtgggcatacggtgagtactcgacgcagattcccgagctagagcggcaggaagttgtccctcacgcaggtgcgccgtctgacgaaatgttgaaaaaaaagctgccaaagccttgtctgattgtgtacgatgaccttatgggtgacattgaggccaagaagcaggctgacctgtacacgaaaaaaattgtaccacaacaatttttctgtgattttcctcacccaaaatttgttcgataaggcactacgggtgccaagatccaacgcccagtacatcttcctgatgcagccgcccaacgccatgttgagcacacgtaatttggccagtcaaatgttccctcgggagcagggcattctgatcgaaacttaccgacatatgtgtgctctaccgtacggctacctgttcgtgaaccttcactgagccaaaaatgtacggcctgtggctaagcgacaacgccaccggtaaggacgagtacaagatcaagctgcgagggaacacccaggacttggggtgatcaggaataactgacaaagaaatttgtatgatgaataccccaggcgcatgtatttgtctgtacaaccctgacctcgatatgaacctgctctcagaagaagagcacgaccccgaaattattccataatttaatttttatttttcaattcatttcattaattttgtaatattttaacataattcctacttttgtcacctaatttttcccaaaatacaataatttcattaatatttttttgaaatctctctcgttctttgtacttcttttcatttttggtatcgtatttgcatccccttgtacgtagtttaattctggcaaataaaatttccgtttcagctttgaccaattggtgcaggggattggtttagtgggccccattcatggtgtacacgtgatcagattaattttggatatggtatacccttaaaattcaaaaaaaaaatttttaacagaaaatgttaagactacagtacccttctcaaaaatgtgcttatgctagggaacccgcacaattttcaggctaagcttttgtatcatattcgttttgttgagtatttcaccgtagaccccgtttaacacctccctcgcacaggggtttcagcagtcagactaagatcagtcgtgcgacagatctaatcctttagggtatttaaatctttggcagcaaattcggtggctttgatacaaaatcctgctcccaattgggtaacagtcagccggtaaaaaaagactgatcgtacacttgtataaacgaaacacgtgcaaagtgaaaattttttcaatataaagccaatacctaagcatgtctaagcctaaacataaagcagttctaagcctatgcctaagcaagcctaaagctgaagcctatacctaagcaagcctaaagctgaatcctatacctaagcaagcctaaagctgaatcctatacctaagcaagcctaaagctgaatcctatacctaagcaagcctaaagctgaatcctatacctaagcaagcctaaagctgaagcttatacctaagcaagcctaaaagctgaagcctatacctaagcaagcctaaagctgaagcctaaagctgaagcctatacctaagaaagcctaaagctgaagcctatacctaagcaagcctaaaaagctgaagcctaaagctgaagactatacccaagcaaacctacaagctgaagactatacctaactaagcctaaaag

SEQ ID NO: 4058 - DNA, 4432 bp, Heterodera glycines
  unsure (1)..(4432): unsure at all n locations
ctagagtcancaagccctatcgagttcgatggatctggaactcctctgcctgttggaccagtgtgcttgcattcgaaaaaacacgagacataagtgcccgaaggcctttggactgaggaagtggcctaatctcgaactccggagctgtcgtgtgagtgcctgtgcactcgaccacgattgctgatgcagctcgccgtacggctcgtctgcttaccctcgcaggacagcatatggtggccccctgctagctagcatccctgtggtgctgacaatggacggccacccggtggatggccgtgtttccgcctatcaccatgtgagctccaacatagggaccccatcaggacctaaagacactatcacaacaaagctcacttcaattttcaagaagacaaccgctcatgaagacgagtacccgcccaagactgagcctttcctgggaccggtggcacaaacggatcgccaacgggagttggaagccgttccggtggtggacaggattgaacggatacccaaagggttggtgaagtgcgaaaatagtcataataaaaaaagaaaaccttttttggtttatccatgttggggtggggtggtctcgacaactaacacgggaaaaagccggccaacttttatgttaaaaatgcaaatgttctggcataatagacttcgactaatggggaatgttagagccatagaattttgaaaaattttttgatcacggatttccagcttctacgaggaaggcgaactgcatccagtggtggtccatgaggagaaggaattgactccgtctgaggcggagaaaaggccaggaacattggagcgaattacgcacttgttcaagcggacagccacagagggagagtggccaatggtcaccgagccgttcactggaccgcatgctgagacatcccgaaagggggagcttgaagcacgcccgcttggcgaactcgtggctgcctatgcttccggccgttctgacgaagtcggtccaatgcaaacgattgagacgcaggctgcgacgacaactgcgcgtgaacattacccggcaacagtttcctatgaaggaccgctgagcgcaacaacacggaaatgggagctggaaggcgctccgctgaactcacatgtgactgtgtaccatcatggccgctctgatttggcagcagctgagcaacaacaaccagtcgctgagaaagtcacaacgaagataagctcattgttcaagaggaagccacaccatgaggacttcccagtctcggagcccttcactggccaattggaagagacggcaagggtttcggagctgttccacgaaccaatcgacgcaagggtcagcgtctactcggccggaagatctgatgagcatgtcgttgtccagccaacaacaattgctgaggcggagcccgtaccgctcgttgagtacccgcgcacgacagcatatgatggtccactgcaaagcacatcgaaaggagcagaaatggaggggcagccgttggatgcacatgtttccgcctatcaccatgggcgctccgacatggcacccccagcagcaccgaaggagacaatcacaacaaagctcacttcaattttcaagaagacaaccgctcatgaagacgagtacccgcccaagactgagcctttcctgggaccggtggcacaaacggatcgccaacgggagttggaagccgttccggtggtggacaggattgaacggatacccaaagggttggtgaagtgcgaaaatagtcataataaaaaaagaaaaccttttttggtttatccatgttggggtggggtggtctcgacaactaacacgggaaaaagccggccagcttttatgttaaaaatgcaaatgttctggcataatagacttcgactaatggggaatgttagagccatagaattttgaaaaattttttgatcacgacaatcgatttccagcttctacgaggaaggcgaactgcatccagtggtggtccatgaggagaaggaattgactccgtctgaggcggagaaaaggccaggaacattggagcgaattacgcacttgttcaagcggacagccacagagggagagtggccaatggtcaccgagccgttcactggaccgcatgctgagacatcccgaaagggggagcttgaagcacgcccgcttggcgaactcgtggctgcctatgcttccggccgttctgacgaagtcggtccaatgcaaacgattgagacgcaggctgcgacgacaactgcgcgtgaacattacccggcaacagtttcctatgaaggaccgctgagcgcaacaacacggaaatgggagctggaaggcgctccgctgaactcacatgtgactgtgtaccatcatggccgctctgatttggcagcacctgagcaacaacaaccagtcgctgagaaagtcacaacgaagataagctcattgttcaagaggaagccacaccatgaggacttcccagtctcggagcccttcactggccaattggatgagacggcaagggtttcggagctgttccacgaaccaatcgacgcaagggtcagcgtctactcggccggaagatctgatgagcatgtcgttgtccagccaacaacaattgctgaggcggagcccgtaccgctcgttgagtacccacgcacgacagcatatgatggtccactgcaaagcacatcgaaaggagcagaaatggaggggcagccgttggatgcacatgtttccgcctatcaccatgggcgctccgacatggcacccccagcagcaccgaaggagacaatcacaacaaagctcacttcaattttcaagaagacaaccgctcatgaagacgagtacccgcccaagactgagcctttcctgggaccggtggcacaaacggatcgccaacgggagttggaagccgttccggtggtggacaggattgaacggatacccaaagggttggtgaagtgcgaaaatagtcataataaaaaaagaaaacctttttttggtttatccatgttggggtggtctcgacaactaacacgggaaaaagccggccagcttttatgttaaaaatgcaaatgttctggcaaaatagacttcgactaatggggaatgttagagccatagaattttgaaaaattttttgatcacgacaatcaatttccagcttctacgaggaaggcgaactgcatccagtggtggtccatgaggagaaggaattgactccgtctgaggcggagaaaaggccaggaacattggagcgaattacgcacttgttcaagcggacagccacagagggagagtggccaatggtcaccgagccgttcactggaccgcatgctgagacatcccgaaagggggagcttgaagcacgcccgcttggcgaactcgtggctgcctatgcttccggccgttctgacgaagtcggtccaatgcaaacgattgagacgcaggctgcgacaacaactgcgcgtgaacattacccggcaacagtttcctatgaaggaccgctgagcgcaacaacacggaaatgggagctggaaggcgctccgctgaactcacatgtgactgtgtaccatcatggccgctctgatttggcagcacctgagcaacaacaaccagtcgctgagaaagtcacaacgaagataagctcattgttcaagaggaagccacaccatgaggacttcccagtctcggagcccttcactggccaattggatgagacggcaagggttacggagctgttccacgaaccaatcgacgcaagtgtcagcgtctactcggccggaagatctgatgagcatgtcgttgtccagccaacaacaattgctgaggcggagcccgtaccgctcgttgagtacccgcgcacgacagcatatgatggtccactgcaaagcacatcgaaaggagcagaaatggaggggcagccgttggatgcacatgtttccgcctatcaccatgggcgctccgacatggcacccccagcagcaccgaaggagacaatcacaacaaagctcacttcaattttcaagaagacaaccgctcatgaagacgagtacccgcccaagactcagcctttcctgggaccggtggcacaaacgaatcgccaacgggagttggaaaccgttccggtggtggacaggattgaacggatacccaaagggttggtgaagtgcgaaaatagtcataataaaaaaagaaaacctttttttggtttatccatgttggggtggggtggtctcgacaactaacacgggaaaaagccggccagcttttatgttaaaaatgcaaatgttctggcaaaatagacttcgactaatggggaatgttagagccatagaattttgaaaaattttttgatcacgacaatcaatttccagcttctacgaggaaggcgaactgcatccagtggtggtccatgaggagaaggaattgactccgtctgaggcg

SEQ ID NO: 4059 - DNA, 2732 bp, Heterodera glycines
tgatctccaaaattgaaggccgaactgaactcgagcttacaatgataaaaactttgtaaatttgccggacattcatgcttggacccctgtaatgttggcgactattcttggacattttgaatgcgccgaagtgttgttagaaaatggagctgatgccaacactcaaaacaaaggtggacttattattttttaattgcttctaattaaagatcatttttgaaaattctttgaaattgaaatggattttatatgtaataatcatggctaggatttttaaatgttaaaaacctagaaataggtatctaaatagttgtgaaacaaaagccaaaaattggaaaaacttgtcaataaatgtgttaattttctaaaattgcctcattctttatttatttcggtggcacatctcaagattttcaggcataaaagttttgtttgtccgcaaattatggccagtatttttgctttatgaaaagtcgtttcttaggggagtatttttggaaaatttaattcggttctcaggggaacatttttatttttattatgtttttcataataattttgttgtttcaagcaaaaaaggttgaaaaacagtttttaaaaatttcacaagccaaaatagttggtaattgcccaaaaccgttgcgctctaattcgaaaactgttcgtagaaagtgtgatattggtgctcttctctcattatgaactatttcggcctttacttgccctaaacatttataatttttttccacaaatatggcaacttaaattagaaaagtactgattgacatttttgctcagagatgtggagcctgtcacatgaagcaattcaatggaaggaccacaactttctcaaaaaagttttgactttcaggttgatcgttttattttcacttttttaatcattttttcctcagggattatcaaagagcaattcaaaccataaatgtgcttcttgaattaaacaaaagtcttcaagtaaaaacaatcattttaccttccctttaccaattttcacaggattcttctgattttttcgtcgaaatgagatgggaattcacttcttggctaccttttgttaagaatatgtgcccttctgacacttacaaagtaaataaatcactttaaattcgtttctttttggaaaactgatcccaaagatttacaaaagtggcaccaatgttcggattgatgctaacattctcgagattggacgtggggaaactccgtcaaatacgcgtcagcaatctttcatttttcgatttgttaacaatacaaccgcggaagtcatttttattgacccaaatgaacaaattgtgaggaggagaagtccagaatggaaaggggtaattatcgcacaaagaaagtttagcgcttttaaggcttatgcccagacgatggacttgcaaagtgaaccgtgcattgaagacttcgttcccgatgacagtaccgttgccgaaaaattcaggtcgccgataaatgccgtgagttttgtaaatttcaatctctaaaaaattgaattaattggtgatttcggaggtaaaatccaaagaacagggtttctgtaagtatttgtatttgccagacttatgtcaatgtcgacaacgttggctttgagcgtaccacaaaatcgaccggtctcttttcttggattggctccaatggaaaagaggaggaggtcgaaggcttcacttgccgtttgatgaacgcatcaaacgttgaaatcgtgaccaagacgagacttgaccatctttcgattgcggacagagaagcagcggagaaagaggtgcacttttgacggacttggggggaaatgagtgggaaattttaaacttccggaatttctgatcgctgaaaatataaaacttttttgacctcataagttttatttaaaataaatgaattttcgttcagagttcaatcattaggaaatttgagtaaaatattgccgattattactaaatatttaccattttccaaaggtttccgacaataagacgctttctttgttgatgagtttatttgagaagaagcgggtgatgaataactctttgcccgaaaatacatcgaacagttcggcggacgatgtttatggcggcgtctccgccattgaatatctttcgagaagagtgggcaactgtcacattggttaggctttgctattttttattggctcctttacaccaataattttcttcgtttttaagggaaacggagtgaggagcaaataaaatccaacgcattcaatgcaagcctttggctttccgaaacttttcctcttaaattgcatgaacaaattttcccggttatcgatttgttggccgttcggaatacaaaattttcaagactgaagagctttattcaattgcaattgccttccggctttcctattaggatcaaaattccggtttggacaaacacccaattatttaataaatttttatttccgaattcagattttccacctaatcaatgcacaaattacatttcggaatgtcaatgatccgaaagaagaagctattgaacggattgccgaacactctgaggacgatgggccacaaatgttgcgacttcgccagtcacttttccaaatccccgatggatttgaacgttgtgaattatcaggctccttttctgttaatcgagctggcgaattcgagaggacacaaagaggggcagcggacgaaagatgtaaattaaaccattttttcatttattttgatttgaatgatttt

SEQ ID NO: 4060 - DNA, 1603 bp, Heterodera glycines
aaaaataattgccataattgtgagaaagaagtgtttgttcatttgaaatatttgaatcactgtcgataatgagaccaaacatttaatttatacactttttacatgtgacttttatgtacaataaacaaatgaaaatggatattttactaaattgttttttgaatcgttttgccttttcacttcatattttctcattgtgctctttccacgttcgttaattctgtttctcgatgaccggcacatttccttctgagcccacttttgctgctgcctcctcaaatgccgttgttgacgatggtggcgagtcgcatcaaacggaacgaccgaccgaaactgaagacacttcggccgccttccttccccataacagttcgttacgttctgttatcgaacggtttggggaggaaaatgtgttgaaagaatggacggaggaagactgtgccggacttcttgtccaattgctcaagtcattggatgcctttctttgttcattatttgccctttcaaatttaagaaatttttgcgactacgaaggagcaaaacgaattgtgcgctgtttccgagaaacatcggttgacgaggtgggcaagcagtacggggagcagttgttacctgttatgttcctgggcttaaggttttaggtaattttattacagtttttggagagggaattagacacacaaatttatgacgggagggattgaatcgggaaaataggacaatttcatcattgcaacatttgatatttaagctgctgatacagcattaccttcctgttgtaccaaatagatacgaaatattcgttttcagattaacgactgtttcaacctttgcaaagaattgaataaacgtgccgcgaatgagcgagttcgaatgggaaattgcgtgagttgtgcgccgctgccccaagagagtctgccgacttttccgaattggtcatcggtgttggcacaggcgaaaaaatcacggggaatccctgacgactcttccgctgtcgttgccaaaatgctctcggaaatttccgccaaatataatgatgacaatttcgcgcccgattcccccaactataagttcatttatgagcatctcgcctcactcgtgcggggatacgccatgagagatgcacgaaggtggggacagtgataacggtactcatggagtttaggtccgccttttgggtcaaattttttagaagcgtagccagacagtgatacagcgaaatatttccttgttttcttgcgcttaataattgaaaaaaagtaatgctggtgtgctgagtgagaggaactgtgttcctccaggcaaaaaattctaagaaaatttataagcatttgaagggttctcagcagtttccctgcaaaatttggtgagcttctgatcagtctagaacgatgggtgataaaatgaaaaaaataattacaaaaaaataatgctggtgtggtaagtgtgaagaactgtgttcctccaggcaaaaaattctaagaaaatttataaagcatttgtagggttcccagcagttttccctgcaaaatttggtggagcttctgatcagcctagaacgttgtgtgataatatgaaaaaaatcattaaaaaaaaaataatg

SEQ ID NO: 4061 - DNA, 3643 bp, Heterodera glycines
aaagaaggaaatagtgcactgtgagtctgtctggctacgcttctaaaaaattcgccccaaaaggcggacctaaactccatgagtaccgtgataaccatatgatccatgattaatttttagcattgatgcagcggttatcctcgagatatttgaaaacatggaaaatgtgatcacttcaatgccaaagttgctcgcctttttcaatcagatgataagggacgttcaacatttttcaaacgatgaattcaaactgagcgaagaactaactgacaagaattctggaagactactaactaatcttttcgaacttcctgatgacatttttaccctctctactttgtttcacagcaatgataacgcataaagtttatcatcacaacaacagtctttcaaaacatccctcttctaattcggcaatcacatcattttgcaactcttcctttgcttctctattcttcgctggtttttttgattgcgttctttgccgttgctggtccaagtttgtctccaactccgagttcctcttcatttcgcatgcctttttatatgctggctctgtgggtggttgcaacacatctttgtgactgtatttgtagtcgaattgcttgaattcgttggacagctcctccaagttaagtgggtaagttcggtctgagtcgaatccggagaggtcaccgcaagccatgaaagggacaagagcagcattcattggaccctccaactgagccaagcattcatctgaaaatggcatctaaatcgaaaacaaaagccagctaaactgactgtagtctgatgccaagattgggttgacgagggtcggtttgtaaccctcaggaggcgaatagtttttgcagacgatgaacgcctcacaactgctcagtcgactgctcttgggcttgcaacacgacacctccttgaaaaagcatttcatttgggcgtagagcaaattcacatttttagcccgaaaaatcttaaaaaattaaatacaagggggacaaaaacttatgttctgcatgcctttgaaacaaaagtgccgccattttggagaatatgagaagtaatgctgaaggccttaaaatgggtgttttgtcaaggtcaaaaagaagataacgaattggtgaaccgaataaacgagttgactttgcatgtattcatcaaaggcgtgaagaccggtgactaaaatatgtaaataaaatctgggaagtccgtcaacctttccttaccatccggagctccatcacaaactacaagttgggccagggaaccatcaaaataagaaatgatttgttgagctgtgccaacctaagcaaacaacatttgattaattgtactacacaaaattagattccatataaaattaaagggaaataaacggaatcgtcaaacctcggtgatgtccccttgtagctgaataactcccggtaatggcgccattggctgcttaaacaaagaagtgagtttaagagggacggggcacacctcggcatgccttaccaaatccaccgcaacaattttcactctcttccgtttttcgtcgtccttctcgctcacatataattttttggacaaaacctaaagcatcgattgtatgcaccacctgcaaaccacttctttccacctgactccaactgccgggcgcagcacataaatcgaccaccctaaagacacctaaaattgagaaaagtgccattgttattagtttagggacacaccgtcgaagattttgcaaagctcatcaatttgaagcaatttataagcggaacgagctcgccagccttcctccttcgcaagtcgataataaatgtcacgtttatcctttgaagtctttcccattaagcaaaaaatttgttatgtaaatgtattacctaatcaaataataaacaggcaatataaaagtaaacaaaacgaagaaatattagaaaggttttgtaatgcgcagtttaataatcagatgttaaatgtggcatcaaaaagaacaaatcgcagaaaaaagagtaacaaattacgcatcaaaaatgttcaacgaaagcgaagtgagatgaatgtgaccaatgcgagaatgagacatttttgtaacatgggcaaggaacaaaatgagcacataccaaaaattttgcggctgatttttacaaggtaaaataacggtttctccgccatcaacgacaatttcgaaagttggcggacgagcggaagcctaaaacggaaaccaagaatattatgggaaaaaaatcatttaccaaacgaatgaaatatttctcatcagccaattcatccggcacaatttgctgttttgtcggttgaatggtggcatgcatcagagccaatgggaactttccatcagacgaattaacgaaaaacacattggaaaatggtttgctgagttcagagacgccatcggaggaaggcgaaatgtgaaagtccaaataagtgcaaaacaaatgccaaatgagctcagtgtcggtcggtaattgcggaccccaaccgatgaagcggtcaaatgctaaagcaaagcaaaaataacacaccgcttccccaagtaaaagggaaatgaatgctcgagtcatcattttaaacgcaatttcttagcaactttcacttttctgcagggccatcccccctttttccaatttaccctcaaagcaatcgtttttggctcgactcatatcttattgttagcatttcctcggttcgacggagaaacaatgcatttgttcatacacttacagtcgctctcatcgcgcactgtctgttcgcctccaccgtcccatttgaattcttcaagtgcaatgttttggcaaagcgtgcgcagtcggctcacaacgtattgctggttgctatgaacacgcaaatagggcaacacaaaaggcagaaatgtgtcggaaaagtgctgtttgtgcgtcaacagcatttccatggaggaagtgccaactttcagatgcgaagacgggcacttttcgcacaattccgcgttaacttcatcaattttggcaacgagtggtcgaaggatggtgttgcaaagccaaatgcgcaatttcacttcatacatttccatatcttgttcacgcaatccgtacgtttccaaaacctaaaatgtctcattgtcacctgtctaaaattgggcgcttaaaaacctccttaagctctgataaaaggtgcacttttggtgaatcatcagcacgagaatgttggaacaatcgtttgtccggccttcgtgaatattttgacaatttgtgctcatcaatgaacgatcgaatccctgaataaatggctaaattttatcgacaaattattgagcatcgctcttttgaaaaaatttaaacttttgaattaccattaaaggctgtgtcctcttccgtcagcagatattgaggggtgccaggctggtaaaaatgacttggaccaggcaaattaaaactgaagtaagcagagcaatccgttggatcaatgattgagtcgcaactgaatatacattttgttttattagtttaaataacaaaatccattaaaaccaatgtaaatttacgtttcattctccagaagatgattgagttgtgaacgcgagtgaacactcgaaactgtcttgttgagaggcgagtcttggtatccgaccaaagaggacaatgaactggcatccatttcagag

SEQ ID NO: 4062 - DNA, 784 bp, Heterodera glycines
ccgagtgccgttgttttgcagtgcggcgccgattctcttaacggagaccgacttggcccattcaatttgacgctgaagggtcttttctgtttccatctttaattttgtttatttcaaaacaggacatggaaaatgcgtgaaatttttccgtgattgcaatttgccgttgatgttattaggcggcggcgggtaatactgcgatttttgtttgacagtttgctttttgaaaaaggtacactcctcggaatgttgctcgatgttggacgtatgagacgtcgttggccgtggacattgacatatccgacggttgttctttgacattcgttcacattaatcataaaacataacgacctttaaaataatcacagtcgcatgaattataattttttctaattaccttagcaattttgaagataattagaaccctttcaatctttcagaacttccttacaacgattattttgaatattttgctccaaattatcgcctccatatcgacgcctctaatgaaaccaatcacaacacagaagagtatttaaggacggttcagtatgtatttcctggcatttcatacatcttttttggcgctactttaaaagtggccgtttttgaaatttttttcacttttttttgcataatttttttttttgacacataatgatgaatattaagtattaacagcataattatggcgaataaaaaatatattcacgattttttatctcaaaaaaattttgcaaaacaatagggtcccccctttgattttgataaaactcaaaatttg

SEQ ID NO: 4063 - DNA, 1715 bp, Heterodera glycines
  unsure (1)..(1715): unsure at all n locations
agcgttcaaatgcaacgtgatttttccaatgattatgtaaatttctggttttntcattcttcacatttatagcaattcctcgcgatggcatgcaaatcgatgagtcagtggagcacgacagagcaaacccggacaggagacttccaggtgggacttgtcctgaaatatttccatttaaaatctgattaagccgaagtcagtgaccacatgacagcacatcctggagaattctacgaaggtgaaaatgaaggtgaagaccgcaggaacaggcaagaatacaagcggagaggagggaatacgacgggcgaaccgagcgattcgagggaggacaaacaggacaattcgaagcggatcaaaattgaaaaacaaccgaaggcagagcagcaagaagacggcgaactgcttgaggaagatgctaacaccaactgacgatcagcaggaggaggaaaagcccttttaagcatcaattcgacttattttctcgtctgcgctttgaatttgtcgtccaccgtttcttattgtttcgacaatattattactcataccttttcacagcttatcaatagcgtacctccttcaaattccgaatcctcttccccgtttaaattgcttgggataaaaaaatccgattcattggatagtttattaattgacaattagtaatcatccaacggtcagcttttatttctaattcaagttttggcttttttctaatacaagagaaagtgctttgctgattttttttcagttgaattttccattataaatccactaatggtcaatttgtcttctgattcttccgtcgattattcggaggatccatgtcccggcgaacatttgcaccatggcattttctacgatggaaatgcgtaagtttcagcgaatggaacgcgtaattaatgttcgcctttttcaggaaattttgtttagtttcggggactgaccttttgtcgtttgattcggagaatgggcaacgcttaggaatcagaaggcactccgaccgtgtcgtcggcgtacactttcaccagggaatggtcagtccatcgatagttctaatccgttgttgcaaaataaaatatcattttttccagaaaattttaaatttccataaaattaattttggcgctttcattttaatttttcccgtttcttcgtttgtttagttgctttccttaaccgatgctcctgaagtttacatttgtgaagtgaagtcggagaagttactgtcgaggaggaaaatcgaaatcccccgagggtatcgcatcgtttggtcgtaccaatcgtcggacggagcgatttgccttctcgcgacgaattgcgaagagactgaggaaagggcggagggtcagtcttttccctcttttcttacctgaaaaagcaaaactcagattcgttgcttttgaaatttactctgaatgcattgaccaacgaattcactcaacgaaattccgtcgtcggaggcggtgaccgtccgccgattgtttcgcgttgtgtcgcactcacaggaaaaaggccaaaaacgaagagacatttggatatcgggaaggacttctacgtaaagtgccaggggaaacggctgaccatggccaaattcaacgacatttctgatgatgcaaagcatggaaaaaagggtgacaccgaaaaaacgtaaatggagcggtcggcccgtatccagaaaaaatggcggggttttcgggcaaagggggggggggggg

SEQ ID NO: 4064 - DNA, 3225 bp, Heterodera glycines
tgctgctcaagtacaacatcgcagcagcgaggtacccaatgaagcaaagcggacgaacgaatgccaaagggaaaataacgcaaagtgtcatttagcggcgccggacggtggcacaaatttgaacagctgagtttggagtgccctattcgctcgatggtgctcagtgcggacttcgccttgcttgcgctcatccattccgacaacagcgtttgtattgtccgttccgctggtctttgtattacccacaaagccgaggtaattgaggccgacatttgcggacaatcacttttttaactttcctttttcgtctcattcgcagacagtcaaaaaaccgagagtcaatgcagtcggaattgtgcacgaccccctcaattcgggttgcattttcacaaactcgaagattggttctctccaatggattgacccgctgcagtggaaaacaatcggcgaagtgattagcatggacaatttcatttgacatggcattttgccctctcattgtcaggtggacatttcgcaagagaatgtgccgcccgaggacactttcaaccgacccgacttcctttggctcgatgtttctttggtctgtctgagcattccgcgcattgtaacgtgcgaacaaaggcgaaatgagttggaaaaggtcggtcggatggtcactttgtgggccgattcattcatttttcattgccttcctccacagacttttctcaaattttggcgccgttcttccgccgaccctggcaaattgcaaatggaaaattgcgtcgtcgtccctcgtcggatttcgtttgttcggtcgaccctcgaccaattttgggactgctcggcattgactgttcccatgacaaatggacaagagtttttggtcatttactcaaatggtgaaatggaagtgtacatccaaagtgaaaatagagggtaatttggtttggatttctgtcgattgttccattgtttttccattagttccctttggcattgcgatttaaaaaggcattaccaaaattggcatcaatttgtggtgaagcattgctcaacaattgccagcacaagtggacgttttgccactgtcaattcccttgcggacaattcccgtgttttcctatggcatttggccactctttcgattgtcaaaatgatcgacactttggtcaatccttcacaggtccctccccccccccctccctttgattccattcgaatgttccgtcaggttgaatgggctacaacaccctccgttttgctcatcgcctgtcaatttggcgtcgtttcgttcgactccgatgccaacactttcccttgggccatccatcacccaaacctttcaatcgcttctaatcatttggccactttcgcatacgatggacactttggttggtctcccaaaacagtaaaacctttactaattggtccatttgttcctcttaagttttcgttatcaatgctttcaatgggacattgaaaactgaacctttgcgtttttcggaacgacaaaaggaagtcgttgccgtgggcgaaggagggaatgttttgttcgttggcatctccgaacgggtgggcgtgtccttctgaatttgccgtcctcatgacttctttcagggcgctctttccgtgcttacgccaaactcaccccaaacaattggtcactctgccgaactccccaaacagaagggcaccgccttttcacatttaatggcagctaatgggcggacaacaaaaaggagcggagaacaatcggaagaaaggggaggacggacgaaccacgcggttgttctgctggaaatgccgtccataaaacaattcattgatggccccgcgcattcgcttccgccaatcgcacaattaacgcgacagtttttggacgcttgtttggccaggagaagcgacgccaactgacaaagaagggtcgggtcgatttgttggtgcctttttcattttcattctcttgtccgtatgtttcatttgctttttcattcataaatttgtgtttccaactttaatttggctattagccccggtcagacttttcttttgtcttctaatacgtttttggagtgcgtccgcaagttttggcccactcatcggccattttcttttggaaatgcaattcaatttccgcccgtccgctgtctcttcgcccctcccccatttttcgctgtgccaactttcatttccaacttctcccaatcaattgccatgcttttcctcccccttttccgactgtttgtccccctctcttttttgctttttccctcccatttttcctccgtccctccgattcctttcggccaatgcgtccgccctttgcgtgtcgaagaatcgcattcgctttttgtttgtgttttggacaaataaatgcatacaaaaatgattggttcattaggaaacaaagcacggccattacttttcaaatgggtcaaaggcacgcttttcagtgcatttgccatcgtcgggctttgtcgcctccgatgggtgagatgggagctgaacatggcacaattagcttttgaacaacaacacaattgcagaaaataggggcagggggaggaggaacatagggaggactaatgaacacggcacaatttgtgccgaagcgacatttaagccgcgaagtgaaactaatgaataataataatattaagatttcggtaattttagctatccgaatgggtacgagaatcagaagtgttctttggagttggtcgccactccctccaggcacaaaggcccttttggctttcggttaattttttttcagcggtttggtggtccatctttcgttcgtcgatttggatttggaagccgcttactcccgatcagagcagtgccttcgggattacattgtggtcacaattatcggttggaatggcgtgggaattcgcatgcttttgactttttttgtcagaccgcgacggccgtgagtacaccggcgacagaatttgtggggacagacgcccgaaagcgatgcgaacgatgcaatcgcgggctcgcattctgttcatagcctcctctctgtccccacccaaatggaggggttttcggatgaaattcgaattcgttcccgaatgtcattcattaaccttatttaattgctttaaccatggcatttagccaccatcttggcaccgtccagcttttactatgacacggacagaaggcatttgacggagtgtgggggggtcaattcggtgggtgtttttggttattccgttcactatgaaa

SEQ ID NO: 4065 - DNA, 3954 bp, Heterodera glycines
  unsure (1)..(3954): unsure at all n locations
gagtgtgggggggtcattcggtgggtgtttttggttattccgttcactatgaaacccattccaatttagcccactgaaatgagtggggagattcattcgccgggattcccgtaatatttttcggtttcctttctctcacattcgttcgctgtgctttttcctcagttacacttttcctcggaatgtcacgtgtaattggcttctgcgggttgcgcccgaccatcgaataaatattcggcttttggaaattgaactttcgtccgctttcggttcgtttgggctgtgtctccccattttgcttctttttcccgtccgttttctcctttttctctttttagaatgcgaaagggcttcccttcaatttttcgacggctttcggcacggtgaatttgctgtgcagctttttgccgaacacttttcattagatttcgaaatggacgactctttgggcactttctcttttcggcattcccaacagtcaacggacgcccttttctgtgggggcagtgcctattaccgggaggagggaatgaaatcgttcctttcggagagaaaccgagtgtttgtgcggtaagagccaccaacgaagataagctcattaatgatccaattactcgtaaaggttcaccactcgcgagggaccgacgcaaaagcaattggcggactatggggcgaagagaaaagccatcggattccgtttaatttggacggaagtccgtcattttaatgcttttggcagggacagtcccccgccccccccccccccaaaggtccaatctttggttcacacggcagcggacgacccacgcgcacttcgaacttcgctgggcgaagtcgcgcagcagtctttcgttacggccgatcaatgcgcgggttttgtgtgcagcgggggcgaattttgcgtggacgcgacagaaaacatttgcgtagaaagaatgagactttgcatcaacgaaacattacgatgcgatgggatagccaactgcgcagaaaatgacgacagcgacgaaacattttgtgggtggaggggggggggggtcgactgatgagaaggttcatggggggcaactaaaaatgcaaaaaactatatggaaaccgctcttttttcccactttgatcccatgagacaacaaaataatccgagggtttcagtggaccgtaataattttgacgagtgagggaaagtgaatcggtcggtcgaagatcgttctgtcccgtcttaggctttgtccaaaaagtgctgcctttggccactttcgtaccgctgctttttctcctttcgctgcttctttcgctgttttgcttttcctatcgcattttgaagtgtttgaggacaaaggcagaaaagaatgaattgaaaagagaaagaaggaatggaaacaatgaaaaaacggaggaaaaaagggaaagaaggaaaaaagacggaagggaggaagaaatgggaggagaaaagggaggaaaatgcgggagaaaagaggcggaagggacggaaaggaaaagagacggaaagagtcggcggaacaacgaagtcgcagcgaaaccgcacggaggacgaaatgcctttcgcaattttaccgactcaaaaaatactccgagaaatgggtgagttcttactagagttgagcgggaccggggcgggaaatcccgggtttttcaggtcccggtcccggtttttggaaaaacagaaatcccggtcccggttttgccagtcccggtcccggcgggactaaataagcactggtaagaatgggggtctgggtgagaaaagagaagggaattggtgagggaccagaaatttttgataaaaataaaataaattatttattttcatttatagcatgtgttgacatgtataagtggtcaagtgtctaagcctttttactttcattattcgtctcttcggttcaattctctgatggaacagaaaatttttttatattttctttaccattattttaattgaatttaattaataaaaactattttaatttaaaattattatttttttcatttttaatagtctaaaaacccataaattaaccgaatatttggtcatttttgacaaattctgttaataaatctcgctcaaaatttttccgggggggcgcttttcggcacgggcgggacccaaccccctcccactgttccaaaaaagttttttgaaaaaacattgccacaaaaacagcgatttaaagcaaaaatttaaaagattgtaaatttatttaaaaaaataccgaattttgggactcagaaaattccaagaacccccctgaaaacaaaatttttaaaaattttcctcgaactcgtcccccaaaacgtaaatacaaaattttattggtacatttttgaatattggcaattttcgtaacaaagtgtactttcaatttttttcaaaaaaattttcacttgggaaaagtcccggttggtcccggtcccgggttttttcgctgtcccagtcccggtcgaaaaacttggtcccggtcccgacttttctggtcccggtttttgtcaaatttcccggtcccgctcaactctagttcttacaaacgaacgaatgacttttcaatttctttttatttagtcaccccaattttgcgaccaatgaaaagggccattggccgtccattggtccgaacgaatcgcaaggaattttcagagacagcgaagtgtggacaaaaagaacattcggtggcaaaatttgtcagtgcaacggcacggcttgtgaataaaagctctaaagttcattattgaactttacccaatttgtcaatttcgaaagcgcaccgctaaaactcggccaatttcgtttcgtccgcctctttccccagcgaaaggatttgtctttgaatgttcgccaagtcgcaaagaatcagaagcagctgatcgggaacatttgggacagaatttcgaaatcgtctcactttttgaatgtttttcctcgccgcttttacgctttgactctccaaaacgccaaaggggtggaaatccgttgagtgccctccgttcccttccgcttcttccgccccttttccatcgaatgtttctcctcccctccttcgcaaatcatttcctttttcccccgcacattttgaaggccaattcaatgcgaggaaagaaccgcaatcgcttttcgcagtttcaacccttaaaatggcaaaatgcgatgagaaaaagtgccggggatgttgcgtaaaaaaggagacaaaaacaggacatttttgaggaacaaaaataattcatcgccccaatatgagaaaaagagattagcaacaccctttgcgagtgccttttggccaaccaaattgtcgggctcagttccctctgagaggacaaaagggcggtcactgacccaacgacgaagccgggggaagtgcttctgaaaagcattccgacgaattttaaactttacaaaatgcagcgaactttgctttcattatgttgagccgataatcgtcaagaagacattgaacggatttgttcagctcgaagtattgttcgagcagagccaaccgacgcaccgccaaacgatttctgcaggtcaaaattttggaccgagccaattcactatggaccgacataaccaagaaataaatcacaaacggatgaataataagactaattaaaagggaggggaattatatgccttaagcgaaatctcgaaaatagccaaatatggtacatatgaaaaatctttttagaagaataaatccaaaataaagaaaaagttttggaataaaatcgagtaaaaacacaaagatatcattctcaattattatcaaaaagcaaaaaaaaaaagtaaataaaaaacaaaataacgaagacggtaaatgacaaatgacaagtgaaaaaatattttaataatgaatttttatttaaatggcaatgattcacactaattgagaagcgtctctttgaattgttcataanaaaaatatggggatcgcaaagccatca

SEQ ID NO: 4066 - DNA, 3879 bp, Heterodera glycines
ctgacccacaaaatgtccaagccacgaaatgtccaagccacgaaatgtccaagccacgaattgtccaagccacgaaatgtccaagccacgaattgtccaagccacgaaatgtccaagccacgaattgtccaagccacgaaatgtccaaaagagtaaaaaaccacgaaatgtccaaaagtctaaaaagctcataaaaacccggaaaacgggtctaatttagggttttcgaggtcactgagtaagaatacgacctttacataacccatttcctaatcctagacccagatataaacataaaatagcaaaaaaaaaattcaaggcttcgtcaaagggcgctgatcaaaattcgaacaagttttagtgttcctaggtgatccgaattctatttgtaagcattcgaattatatctctgggctctaggcacactaaacttcatacattgaaagtgaataaatttattaaataattcaataaaattcatcatggaacatgaacaatcgaatcatcaaaattttcgaaatcttttaattttcctgcgtatccttcaatttgtagaccgagggccgtcataaggtcatgaatttcaccgttgttgttgtacgacgcgtccgctaaaattcgcataatgagcgcgtcctgcaggatgtatcgcttttgtcgcttgtgaatgaaatggcgagcagatcgggcagcgtccacctgtctgtcgatgctttcattgactccacagatgaagtccgagagtgccgggtgatgacagagacccttctaaatactctttttcaatttttttttactaaattaaaaagaccataaaatgtagatgagtagcctccagtccattgtttgtacgagcgagtgcagaagccgcctgtgagtgcatgttccaaagcggaattgggaaatggggcgcccgaaagatttcttcctcccacacgcgaactaaattttttattaaatataaacgaaagattcgtgaaaacaacgagttttgtgaaaaaatatatgcctgaagaggctgttgaagtcgatagcgagtcaactaattgaacaagctgttcttgtggagtcacagtggttggccatgtaagagttgatggcgccggtgagccgatgccgaactgtattggagtagccgcgtagctgtgttctgagttgatggtcgaaattgttgtcactagttcagcttaaaaataattaaactttgaaaatcgatgcaaaaatacgaaaacaaacaatggtcggtgctggacaaaaaactgatttgagtggccccaaatgcattagcaccatccaacaactggcgctgtgtcaagccgatgtatgttcgagagaagtaaaggaaaaactcatgcattcctgcaggagcagacgccacaataattgagaaagccattctgacaacgctgggaggcaaaagtggcaaagaaagaacacttctgaaaaataattcgaatttcaccaaaaatttttttaaccggaacgtgttgcgaactgcctccccacgttctgtcttctcaccgtacaaatgcacaagaccaagccgcttgaaatttctgaacaggctttgcccgtaatggaacatgcagcatttgatctgcgctgtggggaatgccgtacgcaccgccgcaatttcggccttttcaaaatcacacatgactaaaattcgaaattttcattttttataattacaatgggttaacttttgcttgggacttcagtagagatacgtccacggagaaaattcagtgcttcttcgtagtagcgtcgttgttttccaggcagaaggcaccacaaacagatgcacatcctctgatgcactgatgcaccaatgacgaagcactgctcccacattgctggagcacatttaaaagtgccgtcaaggtgccatgtgccgcactggcgcaaaatgtccagagtcttaaaaaataaaaccattgaaaaacagaatttttatagccaaaaaatgtaccttaacgctgccgaaaataaggaccacgtccttttcgccttgcctgacattgcgactgtcatacaagacgatgtcctcaccgaccttttcgcgtaacgttgaatttaaacaaacttgttgtttctgaggcgctgggaggtggttgtattctttttgacccaaggttccactagttccggtttcgccattgtttgtgatgtttacataagctgagcaactgcgatttgtgcatctccagcgatttcctgagtggtgtgtgaatcgaaaccctgaatagtttaaaaattaattttttgcggcacttcaaacataccgttcaaccataggcaatctcccccaaaattggtttttccgcgctcaaaagcactgttgagacctcagcctctttcaaattcggttgttcaacgctgtcagaagttctcacatcattcggttcgacgagttccactcccaaattcacggcctcctcagttgtgttcaaaatgtcggacaaataacgctttttccgacttttttgtagactttcaagtttattacgaatcattagttcgatcaatgaatagaaaaatctggagtaaaaaaaagcataaattttaaacaaattttgagattttttcttattcgtgtgggtctaggattaggaaatgggttatttaaaggtcgtattcttactcagtgaccccgaaaaccctaaattagacccgtttttcgggtttttatgagctttttagacttttggacatttcgtggttttttactcttttggacatttcgtggcttggacaattcgtggcttggacatttcgtggcttggacatttcgtggcttggacatttcgtggatggacatttcgtggcttggacactttgttgggatgccatttacatacgttaatcaataactttgaataacaaacggatcgagtcagttggatgaagtcgtaaacaaaaaattatgaaatcaggcaaactattgacataataggcggtcaataataatgaccagatcaaaagagacaatgagaacattttcatctaaccttactattagcttactaacaatttagcaatggatatttttgaaatttgttcacaatttcaaaccaatgagcatacaatcgcatacatgcgaaaccttggtctcttacggcaaattgcccccatctgtggtcggcatagatgcccgcggcgtatgactcaagtcaaaaatccaacctttacgtttgacgggtgccaatggcgttgcccaacacacaaagggcagaaagtgtcaatcagggcggggtcattttttgaagaagcgcgttttccccttcgaatcgattctcctttactcatattgtagttacagtactaagcaatgcatcagcaatatttgcaaaaattgaaaattgaattttttcaaatgttcgaatccgggttcggggttcgaaattaagtcaaaagaaggtcaaattcgttctcagcgcaccaaataacccctagaaaagtgttttttgaatttttattccttttttttgtgggaccaataatcttcacaattgccggcatcccttttttgtcgaacctattttttactcattttatgaaaattcataaaaccttactcaggggttccgaatacctatcgtatttacaagcgaactgaaattgatgaggaacaatttctattggcggacaccggcgtttttcaaattcaaggacagaatggacctcaacggtgaaacatcatttatacattaaattctgatcattgaattggaagagcttctacggcggattggacccatcagatgaaagacatttacgcggacggcactttttcattgacgccaccgattttcagccaaatttatgttttgttggcaaaggaaagttaactgtgttgtcacaatgtttaagcttttt

SEQ ID NO: 4067 - DNA, 1830 bp, Heterodera glycines
  unsure (1)..(1830): unsure at all n locations
gatgctcgaattcttcgtctcatccaccgttataacgcatcaataacaatcacctccccaaaantgatcacaattatgcaaatgtcaatgtgaatccccaaaacgttaacaattttctcactggtgtttcccgaaactatgaaatgcgacttagtttgttctgaaatttgttatttttttgttatacttactatgtatttgtttttataaaattttatttattttttccatttgacgcacatccgaccaaactgacaaattattgtagaaggggtactagccgcaagaaataaaaaaaacaaaaaattcagtttactgctaatactctagtttgcccccccatttttcaaaaaattcaaaaaagtgatataaaacattcttcctagggttttcggggtcgctgatcacgaatccgacatccatttcgaccaatttcgaaccccggacccaattcgaacaaaaaggaaaaaatatttttcaacaaaagtcacatttattgtccaaaattttgcgtacacatcccaaaattttaacatcctctgatgacatattttttaaaatttgggatgtgtaccaggggatggcacggaatcccgatttctgatttccgaaattggtaatactgtcgatggtaccccccccctttttgaaaaagttttttttttgttttcaaaagacataaaagcatgtttcctaggggttaaggggccgctgatcacgaatccgtcatctatttcgaccaatttcgaaccccggacctgaattcgaacaaaagttcgaaaattcaaatttttcgaactttgcatttttagttcaaaaccggttaaatacgcgtaataaaacaggaaattattaatatttgaataaaaaattatttaaaccattttgtatcaaaaatctgaaattcgaaaaattgaattttcgaacttttgttcgaattcaggtccggggttcgaaattggtcgaaatagatgccggattcgtgatcagcggcccctaaacccctaggaaacatgctttcatgtcttgaaaacaaaaaaaaactttttcaaaaaaggggggggggtaccatcgacagtattaccaagttcggtcctggaaaaaagcttgagccttaattacgtgtgatctttttccgagccgtaattcttctttattccattcgggcaattattttgcatttgtgcagaaactcttgttatttctcattgacaaattgtggattttctggcaattaatctgcaaaattttcagctaatccttcctttttcccctcttaaaacaaaaacggcgttatcaatttgcaccaagttttttcggcgcaccatggcgacttttacgttacgtcaaggcattgacattgcgaaaaaattggagcctactggggaaaaccaggttttttcttgggggttggggattttccaacaatttttgtaacaaatttcccccaatttttttttcagtttcttctgcttggacgacaaagtgccatcaaagcggcgcagaatggcaccgactgggccaagtcggtggatgccaaattgggcacaatggttgacgagcacattctgaaacgggcgctggaaaaggtggaaaagtccgccggctctgtgccgctgtacatggatttggccaaggtttttaaattcattttttaatttaaatccgaaaacctccaaaaatagttgctattttaaaatcgggaattttcgggttcacggactatgaatctgatatccattttcgacttattccgaattgcttaacccttgacttgttttcgagttagggaggttcctgttaaaaacagtaagttaatccgaaatcccc

SEQ ID NO: 4068 - DNA, 2072 bp, Heterodera glycines
aagttagtccccaaaagtcgggtccccaaatgtcgggttccttaagtgtcgggctccaaagttagtccccaaatgtcgggttccttaagtgtcgggtctccaaagttagtccccaaatgtcgggttccttaagtgtcgggtctccaaagttagtccccaaaagtcgggttccttaagtgtcgggtctccaaagttagtccccaaatgtcgggttccttaagtgtcgggtctcctaagttagtccccaaatgtcgggttccttaagtgtcgggtctccaaagttagtccccaaaagtcgggttccttaagtgtcgggtctccaaagttagtccccaaatgtcgggtccccaaatgtcgggttccccaagtgtcgggtccccaaatgtcagtccccaaaagtcgggttcccaaatgtcgggtctccaaaagtcgggtccccaaatgtcgggatccccaaaagtcgggtccccaaatgtcgggatccccaaaagtcgggtccccaaatgttgggatccccaaaagtcgtgtccccaaatgacgggtccccaaatgtcgggtccccaaatgtcgggatccccaaatgtcgggatccccaaaagtcaggttcccaaaagtcgggtccccaaatgtcgggatcccaaaagtcgggtccccaaaagtcgggtccccaaaagtcgtgtccccaaatgtcgggtccccaaatgtcgggttccttaagtgtcgggctccaaagttagtccccaaatgtcgggttccttaagtgtcgggtctccaaagttagtccccaaaagtcgggtccccaaatgtcgggttccttaagtgtcgggctccaaagttagtccccaaatgtcgggttccttaagtgtcgggtctccaaagttagtccccaaatgtcgggttccttaagtgtcgggtctccaaagttagtccccaaaagtcgggttccttaagtgtcgggtctccaaagttagtccccaaatgtcgggtccccaaatgtcgggatccccaaaagtcgggtccccaaatgtcgggatccccaaaagtcgggtcaacaaatggggggaggtaccatcaacagtattaccgccttttgtgtcctccagccgctgttgccgttcggtcttttgtttacagggggcggggggggggggggttcggttcatcatcggctgtcagcaatcgaatcgtacctatttctcatttctccaaatccttaatccccaaaaatggccttagaacgattccaaaacctaaacctccccaagttctagccgttctatgctggtcttgcgatagatgacaacgaattcgatcaaaatctcgagaatatggggtttttccactcccggcgaacttgtgcgcaatgcggtggcatcatgagctaccgtaatgcaaaggaaaaccgccgttatgggacatggcgctgcacgacaaaggattgcagacgggaagtcggatatttgggaggcaccttttttgaaggatcacatctgacaacgaaacaagttgtacgtacatctgtcatatttgtggtctcgaaaattcggcttcgccatttcaaaccatcacagattggcacaatttctttcgggacatttgtgccgaatattttgtccgacatccaattcaaatcgggggcccgggttagagcctagtgataggagcattgttctgaatttactataaggagtaatcgtcgagatcgacgaaacatgtattgtccgccgcaaatatcagaggccagatgcggggactcatgaatgagtggctctttgggggcgttgagcgtggcaccaatggagcgagggctttcatgattccagtacagcgcagacgagcccaagacctaatccctttgattcagcaatatattgccccggggtccatcatacactctgatatgtgggcggcttatgggggaattccaaatctgccccagggatatcatcatcatactgtaaatcacaatgaaaattttctcaatcccaatgacccaaatgttcacacccaaaacatcgaaggtttgtggtctacttacaagcgcaaattccgtccccaagctggtaatgttt

SEQ ID NO: 4069 - DNA, 2683 bp, Heterodera glycines
  unsure (1)..(2683): unsure at all n locations
aaagaaaactcaaaacagagttttttaaaagaaaactaagaaaaatatttctcaataaaatttaagcgattttttggaaaaattatttgaaaaatatcggtaattcaccataaacattttcgaaaatttttttcttagttttttttcttgaaaagtctaggttagtaaaatttcggcgctttttggcatgacaacgttttgtcctgctccatatataaatatcattttcaattattcattttaactaatttttgttaagagcctcaattctgcccaaagagcgtttgctttggaagcaaaatataccgagggtaagtttcaacgagggaatatggttgcttaacagaatttttttaaatacgttttggtcaaaatctttcagcggcattggataaaagcggagcagggcggttctcccccggcatttctggcccaaaccggcgtctccccctaaaaattaaaaaaaaattcaaacaaattttcaagaaaaatcgcagtaaaaattttataattttttcgaaaaatttctgttataattttatatttttcgcaaggagggtggggggacgacgcgtgggggacacagcggggaaagatgaagtgcactcgtatacatgcattccatgaacatttatatttgcatgacagaaattataaaacacgagcgtcatcgtaacgaaattgaacagcaacgaaacgccagtgaaaatcatcgtaacgaaattgaacaacaacgaaacgccagtgaaaatcatcgtaacgaaattgaacagcaacgaaacgccagtgaaaatcatcgtaacgaaattgaacagcaacgaaacgccagtgaaaatcttcgtaatcaaattgaacaacaacgaaacgccagtgaaaatcatcgtaacgaaattgaacagcaacgaaacgccagtgaaaatcatcgtaacgaaattgaacagcaacgaaacgccagtgaaaatcttcgtaatcaaattgaacgcaaccacaaagatgaaatgaccaaactcatcaatgagctcatcaaccgcattgctgagcttgaagagcaaaatggccagctcaaacaacaagtggcggagcacgagcgccagcaacggggtatctacattaatattgggatggcccattccctgttcattctaggcaaaaactaccagcaaattaatttttaaagcaaaaaagtgtcagacatttcaccaaaataccctttttcagccgctggtcgtggtgcccatcggcacgccccgtacccaataagaggcgataagtcaacaaatgttgaccaaggccaacgcggtacagcatcagccgctcctagtgctgttcattaatttaaaattaccttatttgtacaaatgcaatttccagatattaatttcgaagcacaaccaccgaatgccaccgattccgcacaaccggagttgacggcgccagcaatggcaacaaatgacggcactaattatgattttgccgaactttcaccgacttccgctccgacacagtctttggcacgtaatgacggcacgggtggccaactcatgagccactcttcttctggtctttttaataccttttagcagtcttttctacaatgtattgtatacaattgccgtcactcattttgccgcacgtccactgacttccgtcgcttctgctccggcacagtctttggcacccaatttcggccaacaacccatggggcatccttcgggtccctttgtcacttggtcttatcagtgatagacttaatacaaattgcagacattcatcttggcgtacgtccaccgaatcccgtcgctcttgatccagcccagtctttggcacctaattacgtcactaattatggccaccatccattcgaccacccttttggtccttttattcagtggtcttatcaagccataaatgtaaaacaaatttcaggcactcattttgtcgggaatccgccgacttccgcagcttctgctttggcaccaaatgacactaattatgaccaacaactcattggccatcattctggtcattttttcactatcatcttgccgtaccaccgaccttcgtcgcttctgctccggcacagtcttttgcgccctctaatttcggccaacaacccttgggccatctttctggtccttttatcactaatttatcagtgataaagtttatacaaattgtaggccatcattttgccactcgtccactgacttccgccgcgtctgttccggcacagtctttggcacccaatggcggcactaattatggccccttcgcccatccttctggtccttttatcactaatttatcagtgataaagtttatacaaattgtaggccatcattttgccactcgtccactgacttccgttgcttctgttccggcactgcctttttcaccgaatttataccgtaacagccaaggacaatgcttccgtctttctccttccggtccttttttatcatttttttatctgtgctaatgaatcattgcaaagtgcaggcacttttcatttttgccacccgccgcagtgaccaatgttcggtggaagtctggtggattaaaagcagggaaatttgtgtttggtggccttaattaatgtcgtttatgctttaattttgatttacttaattaatttgttgtgagttcaattgtctgctgcttattttttacaaaatntttctct

SEQ ID NO: 4070 - DNA, 3086 bp, Heterodera glycines
tggcttcattgtctgctgcttattttttacaaaattttctcttaccctaactaaacaaagccatttgcatttgtcgccctttatttctcacgctttatttagttaatttttttgttatcaaatctttgtctccttttgtttactcaatttgttttctttaaatcgttgaaggtttgtgcttatgcgttcaatgctaatttaatttaatcgataaattcattttggcgctcaatttcgtccaattattcgatttgaaatgtttcactcgtactgtaactttgaagaggtgctgtagtttattttgcttttactcagtttgtaaaaagtatagttagttattaattatttgttagattaattaaatttttaaaaaatattgtattatttaaaattttcggcaaatgtgtcgaattgcaaaaatttgtcgatggcatgaactcattagtaatatttcgtaaaatttcagatccagctaggaataggaatggtccctgggtccttttaccgacatttcaggtcatgagcaaaaaatcccgttaaattcgtggtttgagtcccgaagatcatatcctgctggtctcaaattctgatcggctttctcaaaattacatcgcaaattcatcaatgttttgccactgtttgtcattttacccgccacaaaattcgtaaattaactgcagctggcaattggcgaggctgttttttgcagacaggtgtagatgtggcagttcgtacccaggcagttcttacaataaaaaattctacaaaataaagcctaaaactaagctgatcgtctgcttcgcattcattaatccttattatgttctctacgaaaaacttttgcgtcttaaaaatttgtatttatttgactcaaaaatgttttgagcatcaaaagaagttaaaacaaaacgaacaaaaaaaaaaaaatttaaatgatgagatttcgtactcgtaagatcagtaggttcttaaaatattcagcatttttaataatttttggtgaatattttctcacttttttcgaataaaaaaaatcctaaaaatataagaaatgcaaaaatagcgcgagttaccttttatattcacatataaatccgcgccatgtagataattgtctttttcgatataatgtaattttagaaactattgtcccattttgggcgtcattcacaaaagaaatacgataaaaaatactaatatataaccttcaatattgcatgaatagaaaaaacttagaaaacattgaattatatcttgtgagcggaattatgaatcattttttgtcaaaaaattttctatttgatggttttttgactaacgtcccagcatcaattcataaagaaagaattttaattgatgttttctgtgatcttcttcgccataataataatgttaatgcttaatattcatcattaagtttaaaatgtgactaaataatacgtaataaaaataaataaataaataataaatttagtggacactttaaaatgcgccaacatttcaatcaattgtgaaaatgattatttgcatccgatttaatcagatattttatatataaacttttgcgttttcgattgggaattttttttagtaaatatttttcaaaactattttttgttgctattaccaatgcagagttaatattaaatattattttaaatcaatttatgaatttattatatttcaatattggccatttcagagttagttttaattataaattttaatcaatatatgaaaatattacatttccatttaaaccatttagagttaatagtaaatcaaatttttttaattaaataataaaatataaatgccaacagatacaattaatcataattttattatagatcatttcaatatatatatatatataataaatattagcactaatatttggtggagatggggggggggggtttattgtacattttattgtattaattattaatagagatgggatttttatgtttttacatattttttgcggcttagttataacgagagaagcccaaaatagcattttcccgaacaattttaatttggagtgacttataaaaacataaaaaatttgcacacatttcggggtttggcacttattttggcactttttcgggtttttagcacataaaaatcccatctctaattattagtgatgcgcagaagtctctcaacttgagaaaactctttggttttctgtgctctctgtctcgaacgagaacaagaagtctttgttcagagtctcgggattggacccagactcaagaaaaggtcttctccgtctcgagtcacgcagtagaaaactcctttttcaggcgtttcgttccaggttttctcgcatttaaatctcgggtaagtcaaggggcttaagtctcgaatctcgagctattcggatttgagcatcactaataatttcaatttttgaacattcgcttggctttgttttgtactgcttaatctctttttctccttgcctctctctctctcgccgttttctccctctctcttctctctctctttttctctctctctctctctctctctatctttgtctctctcctatttttgctatgtctccgccgcagtggacaaccgcaacagcaacagttggtgctgcgactgcttgacgccgacatcgccgtccacgtcgtcgcgctcgccggtgtcgctactgccggcgttttgccgcatcgacggtggcggcttttcccaacacattgtgaccaccgaggggcgtttctgtcgcaatgaattaattaattaataatgggtgttttgtgcattgcatttaatgagcatgattttattctgttcgggctgtatatcatttggggttaaaatacagtcttgtctagatatggtataaccgtttctgctattctaaacgtgcttagatatgccactaaaatatagttttgtacgggtacggtattacagattgacattaaaaaaacatctcaaaatgatgttgccaaaaaaatactgtcgtagatggccacagaatcaaaaaaggttaaaagcttcccgaacctgaatgcatctacgaacgaatagcctaatctgaaatctataaaagccgaattatt

SEQ ID NO: 4071 - DNA, 4210 bp, Heterodera glycines
agcgccagtcaaatgcttaatttttgtaaagttaaaaaaattgtacataagtcgatcgaaaattaataatcaaaataggacacattgggggtgccattcaaatgttttttacaataacaacacaatttgctaatcttttttaataattttcgatgtgcaaaaaaaactaagaatgtttaagtcataagttttcctgaattttaagttctaaattttttatttctaagtgtttaaaagattagtataagcttaaacccctaatcatccaaaaatccacaatttgcaattttttagtgaaaatctattaaaaagttacaaaaatttcaaattttgtgcaggcggcgccaatcggtaacgccggaccctcttcttggtcaaaaattaaaaaaaagcgccctacaaaaaaaagtagcgaggagagtcgcccgccggcggcggtggtaccccctcaaagccgaagtcttgggacgtccctgcaccagatttgttggatttggctttgtttaggttttcggcacaacactacctctgccgccgccgcctcccgtcgccgtgccaccaattttctgcaatttgtgcccgctccgccgcccttttgccgcgatttgccttcagcagtttgtctcgagctcattgatgcggttgagctttccgaaatgtcggacatctttttttaattaaaaaaacattttaaaaattgaaataattcaaaaattaaaattaattttaaattttaaaataattcaaaaattaaaatcattttaaatttaaataattcaaaaattaaaattattttaaattttaaaataattcaaaaattgatcacttgcggcggtgcgctgatttttacgcggagtgcgtggccagcagcagaagagtccaactcgggttgtctgaaatgaaggtcaataatttgagcactttagctcaaacaaatggcgcacatttatacttttaaaaattttaatatttatttttaaaaaaaccaacgattttcgacgaaatttggtgtaaattgatgaaggcccactcagttttacagtattcctgaatgaagtttaacataagcccgatgaaaaaagcatgcattgtatggactttgagagatgttttcgaggctcggaattaatcctcgggagagtcgagaccggtaattgattccccgggattgattatggagaattaatcccgggtgaatcgagaccgagaattgaccccggggttcgagatcgagaatattgaaccagtgattcaagatcagactggtccctggattcaatcttgaaaattgagcccgggacccaagatcgatagattaatccctggattaatgatcgagaattgagtccctagactggagaccataatttactcccaaaactcgagactctcgtacagccggacaaaatgccggaaaaaaggtgcaccacctgctgctaccactgctggcattcaatgtgccggtgccgccgtttgtcccccgccggctgtcatcggcggacgctcggcgcgctttgcgtctgtccgtcgtcgtcgtcgtggcactgcttgcaccactgccgctgcttctgctactgcttgtactcgtgctgctaatggtgccattgttgttactgtttttgatgttgttggtccttttgagtgccatcattttgatgcgttgctcgtccccctcacaacagtggacggtgttggaacggatccgctcgtcctcctccgtctcttcctggccaaatttggggtgcgaccaagagtctcgaacattgatcacatgagtacaaagtgccatttgttactagcactttttgtaaagagaattttataaatagggccgcaacttttagtgacgaaaaatcccgaaatagttaactaaaatagtgtcgaaaaagtgccaaaaaagtgacaaaatagtgaaaaaagtccgaaatagtgacgaatagtgacataatttttagccaaaaatgagcaaaaaataatttttattcactgattgcagttgcaaatgagctacatttcctttataaaattctcttagcaaatattgacattttttaaatcaaaaattttgtcaagaaaaaaaatttgggggaagaatttttgaaaaaattttccaattcttagtggtgtatttttaaaaaatttttggtcgattcttaggggtgtatttttttgaaattttttagatggattcttaggggtgtattttttgattttattgcatttttgttaaggaattttccaaaaaatgttgaaatagtgacaaaacagcaaaatagtgatttctagtgacgaaaaatgacgtccaaatgaaaaaattttaacgcagaaatgcgttttttgagctcctttcttcaaaaaaattgagcaaaaaaaaagttttttcacaagaaatcgcggccctagtgatcagataccgtaatcccctaataggctcacgtggctggattttttaatgtttttcaaccccttcgtaggggagggggcttcactgaggtgggatggcattaatagaagaagaaacggtagaataccattataaaaaacaccataaatgtaaattttttgcggttttggcgctgtgtgccataaaactcttcgttttatcaatttttaagtgccaaaatattggcccatgtctccccataattattgccgggcctctattgctaatgatcaaaaattatatgatcaatcaatcacctcttcgtcctcctcctcctcatcatcatcacagtcctcctcccgcacattgtcgtgtccatacggcgcgctcagtcgtcgcaggaattggccaagtgccagtgccgcggggccggagccacgtcgctgaccttcacaacattttacatataattagtgaccggatttatatgttctttacacattgttgggaatctcgaaaatagcatttttcctgttttcttaccaatcagagcgagtttttagcacacaaaaagcatattccatatttttggctcatttaataatatttttgggccttgataattgtgggcacatattttggcgtttgcaaaaattttctcccaagcccataaaaaattttggaagttggaattccgagcacaaaaatctaagaattccgtgccttaaaaattcaaaactgaagtcgtaaactcattccatccccggtacagtacagtcccaacccaccgtttggtgccgtcgccgcgtagaacagttcaaaccggtgcagtgacagtgtgccgccgccggcgcccgcgttggccaacgaccggcgcagcaccgccgccgatttgcgtttggcgtcgcgccaaatgcgggtgaggaacacgtacagcaacgggttggcacacgagttgatcgggtagaagagcaccaggcaccatttggcactgctcagcgtgatcagcgggcggcccagcgcggcggtaaagccgaaaaaatttttcaaaattttttttatatcgtatgaaagaggcacgcccctctaataatatggctacactaggtgccgcccccgaaaatttttaaagaaaaatcttataaaatgttttcatgcgaaaataaaaattttgaaatttttttttcttgaaatttttttatgaaaaagtttccttaggttttttgaaaattttttgtaaaaaaaaattaagatttcggggagggggaggaaaacgattgctctctaataatacggccggaatgccgtgctccttttttaatgtaaaaaatgccggaatcaaaataattgcgcgaccgacactaaaaattgtaaaaaattcctataaaaataataattttaacaaattccaattgaatttgtgccacaccgaaaaataatgttggcaaccagcacagaatgtcggtgccgatcagcaccagagttctgcgcaaaatttgcttgtcctcctccgccctctccctgttacactgctgttggttactgtaaaaatcgtagaaaatggttactgtaaatatcaaaaaattataccaaatatgcaatttttgaatttttgggatcggtcgccgaaaggcgctgccggggaaatatttgaaaattttgcataagttttcaatagttttgtcgaaggtcaaaatactgaaaatttaaaaatagcactttttaaatttctcagaatgaccacttgaaattcagtacattctgaaaaatctttctttttgattttaatgagcgactgatatgtatattggtcggtcattttatcaa

SEQ ID NO: 4072 - DNA, 1441 bp, Heterodera glycines
aattgggtaaatctaaaggtgatagaaaaaatagcatttggataggcaatttacaccttagtaatggcattggcgccgttgttgcacgccctccgcttgtcgttgccaaaaggtgtggccaaatgcggagaaatttgagtgtcaccgtcattccgagcaacgaactcagagggaggcaaaggctaaaaaagggacaaaccataagcaaacggccgcaagggattttcaaaaacatacaaacaaaattacgaacctccagcggagtgagggtggaagtcggcacaattttgaacaattgcgtaaggattggctgtgacatgggacaattttctgacgaattttgcatcatttccttttaaaaggaaaatgaacagttcgaatgtgaccagaaaacgatgagaaaataatataatacacaacaataaactacaataataaatctgcaaagacaatctttactcagatcagaaaacaatcgcaaaagtcaattagataatgataattgagcagcaaaagcatttggagggttcaaatcggaaggaagcgatgatgaaaagaaagaaaggaagaaaaggcttggtgatcactgatcagcgatgaaaaatgacaatgacaatatgccaaacaaagtgccaaaaagaatggatagtccgaggttaaaactgggaaattcaaatttgaaaaatgcattggttcgtctcggagaaatttccccttgttggaatcgggaagaaaagtgggtggcttttgaccctggctcaattcccttaactgggctagagttgggtcgaaccgagttggttagtagtaccaattttattaaaaaacaaaccaaagcaaataaaatgtgaaaaaaacaaagaaaatgatcaggtgagatgatcacaaaaagatcagttaatccgtgaaaattgaaaattgttcgaaggcagtggtgaagaaaaagcgagagagatgagcattgaagaccgtcctttcttttatagggctcttcagtccatgtggacagtgcaggagggggctccgatggggggcgaaaaacgggaaaatgttcgggattaagggggttagggaatgtgaaagtgttccagtggaaaaacttgaattgtacggttaggaaacaggccaaggtaaaaaaggggataaattttttaaatttaaatctagaaaaaaagaagaaaattttaaagtttatgatgattaaaggggaccaggaaaaaagtcgccagccgaaacgtcgccgggcgaatttttttgaccataacttttttccttctcaaccatattaaacattcttggtattgttccaaagcttatgaaatactctattaacctgcaaattttcaaaattttttattcatatacaaaaaaaaatcaaggcaaaaaaaattcgaaaaactaggtttttgagttacttctgaccataacttttttgaaactt

SEQ ID NO: 4073 - DNA, 1909 bp, Heterodera glycines
taaaagatggaaaattgaactatcataaactgaatacactcaaaaccgtcgttaaacaaaaaattttaaaaaacaagaaaaatctgaatttttaaagttttttttgaaaacctagttttttacttaaaacaaatttgctgaatttcccgaaaaaataaaaacttgagtttttttagtttccttgaattttcttctatttatatattttttgcggccacgttttgtcttgcccagcaaaaaattgccttattccctaatttatgcgtcttttcgcagtttctctgtcttacgcgtttcacgcctccgtctccgtccggaatgttgacgaattgcttcctaattgccgtcacgaatgcgtcgtagcgactgaagcaaatgcgtgccgcccccttcgggtagcgcatctccgagtccacgtcgatgtccacgtgcacaatacagtcacggccaacgcctccaccgatgaggggcatcagcacttggtaaaggtcgacttaacatgggaggaatttgcattttacgactgtgaatgttggcattattttactcgctctggtgggacggggaaggccaccgataaacacctaaaaagggaattattgaaatagaaagccaacagcagcaagtcaaaagtgattgatgagggaattggtggtaaatcagggaaaaacgaacagtccatcggatgttaacgggcaaccccgaacgaggggtgaacacggcgtccgagtgacgccaaggacggacctaaacgaaacggggaaaatgtgaaattggactattcccaactcaaggaaaagtgatacaatttttaccactggtcacaacccccccccccctcattcgtcgtaacgtaaggggccggtgtaaaagagttaggggtagggtaaagaggaaaatttcttggctaatttgctttactcctttcattattaaatccaaaatttttctttctcctgcggcgcctttcgtcaccaccggaccaccaaaactcctaattttcttaaaattgattcaaaatctgaaaatataatatcgacaggcagatgccggagtaacaaaataagagtttgcttctggccgacccccctcccttctcccctcggcctattacttgccgtacggagttcgtgtgggagagattcgtccgtgacttctcggactccatctcccgtcgattttttttaccgttcaagtttcggaaatgagtttcaagtattatgtcacctgtacgggtttgttgtgcaccgttcggctggacagtgtcaggaagtaacgacgcgtcttctccccgggcgctgtcacctcacggcgacatttgctcaacaaaagacccaccgaacgcgggtcagcgaaaacaatgaacgcgtagccgggccctgccggtttgccgtccaatgctgtgaagtgccaccttcggtttccaaattcgaaatgtccactcactcgttttgccctggttcacccgtttggtgggccattctatttgaagttcgccgaaccttggcaaaaaggaaaccatttgggacttaactgagcccatctgtcagctgactgtcgaaaagcgcgagaaagttccagctccgtctgctgcgctatgtccagaggcagtccacctacaaaaacttttcgtgaaaatgtttcgccgccaccgttcgccgctattgtcgtcatttcaaatttattcaaatttaaaagaatctaaatgacaaaagccgcgtacacctttggatacgtttttagatttccggcttcttttatcggtttgactttactttattcgtttgctttataacgtagctcatcaagagcattcgactgccgatttgcttgtccttgtttgaccttcttaaaatgttatgaaattcaggacatttaaaattttttattatatgcaatgaaaaatggt

SEQ ID NO: 4074 - DNA, 2261 bp, Heterodera glycines
atcaagagcattcgactgataccaaatttgtccttgtttgaccttcttaaaatgtttggagggccattttgctcgttttccgcatttttaaccggtttaaatgctttgccgtagatttttctaatttttcagcacgtagaaacatctagtggttttctgaacttttggctctgggccgtcaagtacatatttaccaggcaaaaaagaactgtgtgtgtattgaattaacaaatgtccgcacggaaagtattgtattctaccatataccataaaagtaaagaacagtaaaaaaagaaatgttgaaagctatcatcaattggcttttgttgttcaaaaatcatgttaaaaaaattcgatgttattgagaaaatcaatgacaatcgaacaatttcttatgtaaaatgtatggactaaatcaatatattcttgaggagagacaattggcaggcatttcccaaagtggcaagtgagataaaataaaaatggatcaaatattggatgtcggcaaatatcaaacagagttcgtcttctccccaaagtaatcactgcatttggaacgaacctgaaatcaatttctttcatttcatgtttcattgtcacattcctaatacaattggtctcaccgctcgcagaaattggacccggccccatttcttccaattttctttgcagccttccaccggtccgtcggctccgtcacacggtccccaagctgtttttcgcgaatattcgctgcaacgaatcgtcgactttttgtccgccaacaccagccatttgacaacttcattattttgtgggatggcagtggaggtagaggggcagttctccttgtcgctttcatcagaattcgaaatcagcacaaaacgacccctgcggttagatttaacaatacaaagattgggcattggtgacgacggacctttcctcgcggaattccaagcccaattcttcggccaattgtgcgacatcagtggcaagagacagcaactcgaaatcacctcccttttgaagaataaacctttttgtttttacttgtcatcgactcactttttcgggtgttggaagcagtccctttatgttgattttggtcggctttcgccttcgtaacagtgagaacgaatggttatgttccccggtttggtagagtacctgtctaaaccaagaaaaaaaatgcttggtttcctggtttaaagattgaatgtgtttgtcctccacctttccaacatgtacatcatccgatagggacatttggtcgacccgccgcgttcaatgcaattgaaatatcgtcgtccccccgtcgctttgctgctgctgccgaacacaaggttgaaacgattgatgtaaaaatagagttgcgattcattggtgatgcgttggacaaattcccattgaccaccatttacttgcagcagttccatctccggttttccaatgtccaagcaattctgtgtgtaaaaaacatgaaaattattatgtaaatggcaaactaaaaaatatatataacttttttgaagggcgaagtcggtttacgctgcatcggaatctcaacgcagtttccatcctcgtcgatgcgcagtaaagtccgtccagaatgagtgggcaacgtgccacgtgcacgcgcttcgtcaacttaaattcacaattcacatggtgtacagaaaaaactcagcatatatatatttatattaaaaacaaaggaacatatcagaaaaaatcatgtcttttactggtcccgaaaatttttaatttttaaaaaaattctaataacaagtttctttggtatttcgaggcattgagtacgaatccagcctcatttctggcgaattccgaaccccgcacctaaattcaatcatttttcgaaatcatttttttggaatttaagtttttagtctaaaaatttggcttaaaagatcttttattgaaacactgatgactttcagttataaataaaaaatgaaattcggaatatttgaacttttttcgagttcggggttcggaatttatagaaatagatgctggattcgtgatcagcgactccgaagatcctaagaaacatgttttatggctttcgaaacaaaatttttctagaaattcaagttcgaggttctgaattcgccaaaaaggatgctggattcgtactcagcgcctcaaaatagggaaaatatcgttcatatagtccagagtcacaccaggacgaaatatataccaagacgacgtctctcggtctgtaatggaagaatccgaaaaaaattgttgggcaa

SEQ ID NO: 4075 - DNA, 2675 bp, Heterodera glycines
cccagaaacacgttgctagaatttttagtttaataaaatttcgagaccaataaaagacatgattgcccggatgatcagaattagcgttaattaatttgaataattaaagtctcaccacagtcaaacggctgtttgtgagctgaagttgtagaaatagtcgatgatgaagatgctaatgatgaagttgcttgaccagttaagggttttagtcgtttgcgcgactttttcaaatgtgaaagttttgttgtttttaccatttgtttagcacaggaatctgagaaatgttacaaatgaaaataaagtgaatcatacgctcaattataggtagttaggaatgcaaaagcaaaagggatattttcctcattacgccacacaataaacattaaatacgccaaattgtggactcctatttggtgagttgctctggtgaatagacattcaatccagataaaaatataaaaaacaattcaaaagtggtgaaatcagtcaaatctgaagtctaacataatgaggaatagagatgagatttttccagagatcgcatcgaaaacttgggttttgggcctacaccacaaaatttggtaatactgacttttactggtcacataaaaaatgaacaaaaaggcggttttttacaattattcgttctactcgagggttatcggggccgctgatcacgaatatgacatcaggttatcgtatgacataatctaatctatgattttttgtcaagtctatgatttacctttttaaaattttgaggtgtaggcccaaaacctacaaataccggaaagtgttatattaaaaaaccccggactgtcgtccaattgtcccccttttcgtaaatgccacagtttttgaaaattagtaaagtttcgaatgccgtttttcgcggtggaattcgttggttttatgctaccccatgaaaaacacttacaattagtaatttcataagggaatagtaaaatataaaatggtaatccgcactcattaaagcccttgaaattttcattttctttggaaaatccgaaataaaaaaaaaatttttttttctcacaaaggtccgccaacatttcaagcagaattcgcggattttcttcgccaaaaacaatttgatggccgtggcgttgggcaaatcggcacaggacgaacaggttggagagggaaaccaacctaaaaactgtgacttttacaagccatggcaaaacgctcaatttcaacccaaccccggacacactgacaaaaaaaaaattccaaaattttttggtttgaacaactcataatttgggagtcaattttatgcagccataaaaggcttttattggcagattttttttttttttggtttatctgacgctgacccacaaaatgtccagcccacgaaatgtccaagtctcgaatttgagttttttattattcagatgggcctaaggttaggcaaggggtaatataaagggtatattcgtattcagcgaccccgaaaaccctaaaaatcctaaattagactcattttgtttttataaattttgaaaaattttgacacatgccagaaaaaattaattagcattttgtttaaaattcgtgcctctcccgccctccctctaaactaatggtcgtgcatctgtttaatgccaaaatttttcaaaataaattacgcaaaaaattcccactttctcttaaggacattttcatattgagcaataaattgaaagttgtaacaaaaagagtgatttttgaatgataaaaaaaaataatagcaattttcagaaatttcctcccccccccccccttcggaagtaatttaaatttaaaaaaaaataacgcactccccaatttaggcaaacgaattgcacaaagtgagcgcacttttgcggggccaaagtggactgatgttcaccaatgcgaaggcaaacgaagtgcaaaggtcggcgggggacaattccaattttttcgtaaatttatttttggtcgttcgggagcacattttgagtggaaattcgaggatggcacgaattcgaagccctttcatttttcgtttttttttcgtaaatttatttctttccttttttggcgggtgctcatttggtggaaaatttttttaaaggttctacgaattcgaagcacctcccttttttccattttgtttgcatttgccgtcccaatttttaaaacagaaaattttttcacttttttttttactttgcgacgctttttttaattcattttttttaatttcaaaggcacttacacagaagagacagtaaatttatagtcagtcgtatgtcctcataattctatgattattcatcttgtagcaaaatttaaaaaatttctgagtaaaaaattttcaaattttttagttttccattttcgttccggcgaatggaatgcttttgggcccaaaaagcggcaaaaattaaaaaaatcttataaattaaattttctaaggtttttcgccgagcacaccgaggctgagtttgcccaggcgggcgccgtcgcctcggcggacatttcgctgccggccgggccaatgccggcggaattgcacttgcacggcgccatggaaccgcagctgcgcaagttgggcatgcccacacggctggaaaatggtgggcattttgggggaaaatgggacgaacttttaattgcaatggcccaaggttttgaaggtgttc

SEQ ID NO: 4076 - DNA, 6792 bp, Heterodera glycines
  unsure (1)..(6792): unsure at all n locations
aagacattgtcacagaagcgactttcaatgacactgtagaatttactgtggacgctggcagggccggatttggcaacttagagatggccataagatggaggaattaagacatatttcaattgtttgacatatacctgatagagaccggcgcggacgggatcccgcgcggggttttgcgggatcccagtccgcaatcccacattttttggaaaatgcgggactaatcccgcggaatcccgtcccgcaaagaattttaagttccaatcccgcagcaggatccgctaattgattttttttgcgggattttattgattttttgaaaatttttcaaagacaatgccaaatatttttgaataaattaaataataaatttaattaaatctcatttttcatcgcatattttttagagcgtaaatacagtagaaacgataatttcaaatttttaattcgtaatttgcagtgtaaaataaaagcaaattttccataacaataaattgtttatttttcatgttttgataatctctcacatttttaaaaaaattaatgacttcaggttcgatttattacgtttcaattgtgttttaatataaattccataattattttaatcaaaataattatcatatttgttatagtattaattatcatacctttgcattaggataacttagtaaataatttgatgaacaatttttaaggaacatgcaatgtctcaaggacgtttgacgcgtataaaaacaaaaaataatatgtttgttgtgtcacataataaataccagactaaagtttaatacaaaaaaacgattccgcgtttccatcaaaggttataaaaatatgccccaaggctaaattcgcaaaaataaaaaattgaaggacgtacacctgaaagaccaaaaattttatattaattaccataaaaacatgtttgagaagagacgaattgttgcgtttttaattttttcaaccaatggttttgagtagaattttaataaaattaattaaataaatttattgaaatttgttccttctcaatgtgtcgacttctgccgaacaataattccctacaatactacgaatgcagatgcaacggcattgggtatatttccctacaattaaatactacgaatgcagatgcaacggcattgggtatatttccctacaattaaatactacgaatgcagattcaacggcattgggtatatttccctacaattaaatactacgaatgcagatgcaacggcattgggtatatttaaattttttttaaatacaaaatatttttcaagaacattgctccaatatgcagccattttttacagtcagcggagaattaaggggtattcattatgcctttaatgttcaatatgtttaattttttattaatagagcagtgggtgcacactaacccctgacatgacggttcctgtggtgtctcttagagggaaagaaacttcagttgaaataaatacggggccaatattcatgtttgatatttaaaaaatatttatgccgtaattcaagtttcgaaagaatgaaaacttaggattttgaaaaattacaatgaataaatgttgaaaaatgttaacagtaattttgtatttaatcattcttgcatccttcggtttcaacaatatgtgaaataaatacaccggtcgctaacggttcatttttcggattttaggaattgggtttacgcctacataatattctttaagtgtatttttattgcttaatgtaacctcaagcatttgtttgagtcgattttaaggcatttattttacaataatcaacaaatttattgaagaattaccagaaaacactaaattgttgatatcgattaaaacatatattattcatcatctgaatcatctaattctccttgccataaagcattagtcatgcactcaacaataaaagaatcaagctgattgatggccttaagaattaaataagcattagatgaaaagaagaatatgaattgatcatgaaattatcttataaaatctttatttattgtttgtaaataaattttaaataaacccgaacttttagagaaaagtataccttatctattttaagcatttttaaaacaatccctaaggtcatatttccttaccttatttttttggcgaactgaagaattcgatgagaatagaatattcttaggagcaggtggcgcaattttggtattaaggcgtcggcacactaaaatttggattttaatttttaattttattaacaaacatttgataaattcgggatttgcggtgagccttgacagcacaaattggggcacgcttaggccatttaaggcctccactgtggcattttgatgcgcatttgctgcaaaatccattgcagtgtctagcgcgtccaaatcctcagacaaggtccagctttcacgatctgcatgaccttaatttctaaatattaattttttaaaaataatcattttaatacctttccaatcgatgtaaaatgcgtgccttgtgtgaccgtgtttatcaagcgttgtaaataatgccaagatattttttacacaatatttctggtttttgtccgcttgtacattttttggacgtgggtttgcgtcaatctttaaaagttcaaaggatttatttttgtatttattaccctaacgcttttatccgttccacgacgatgatgttttcgctggcgtcttgctcgaaccccggtttttttatattctttttgttgttgcggcttacgcggtcgtagatttcggatggttggttcctcttggtcttgctgttggctgtgttgtccatcattcccagtgaaatttgattctccatctataacaaaatacgatgggaatgatgatgattatgaagatgaccttgttgttgctgatgcggttgttgataatcttccgtgtctgaatgcacaatcccacttattagttggtcgagaaaatcgttgttgtcgggactcggaaagtcaaattccggttgattcgcagcttcacaattcgctgatgaagaattgctccagttttcggaccgagatggtggtgttcggcccgcaaaattggtgttgtagtcagaatttcccggtatattactctccgtgtcggagtccgatgagaattcaataatatttgtttgggaccataaatatgccctagccgatgcttcaccgaaggtgtccaaaaaatcacgggcttttttgtcagtgagtaattcgaaagcatcttttattgatttaaattgttcgggattgccccccttatccgggtgattttgaagtgcaagacgtttatatgcggagttaatttcagcggatgttgaatgtttgttcaaacccaatgtagaataaatatgactcattgggaaaaaataagattttctttaaataattgtagaaaagatttgatttgatgacctattactgaaaatagtcgcaaaacatggaaaattaaaaataaaactttatcaggtaaaagctgaaaatttcagatgccggccgtaaaaatgaatttaaattaacacggacaaattatacttttgcgaataattgtattttttattaattttattaaattttattataatatttttagtttttaataattaattaattaatttatttatctaatatgtattaaaagagatatgatatggatgtatttgtagttagggactgagctaaatttataactcagttaatccttcgtacaaacacgacgctctaaaggtctgagctatttaataataactcagattttcttaagagaaataaaagacaaataaattattttttattaattagtattaatttaaaaaataaaaatatacttttcttaattaacattaaattagtatttaataaattcattttatttaatcaaataatattttttagctgatcagagttcgtttcagcgttaaacgatttatcatgttttttcgacccgattcattgcttaaataatgaatccaagccttgccatttgggtggtcttgtttatttagcctttctagaactcattaaatttcgctttctactttaatttttacttattcattaatttaatttttcattttattgactcagcttcttttacctaaccatttttcatgcaccaaatgaattaactcgcatggctggccaacttggtggccttaatttttcatttttattaactcagcttctcttcatattcatttcaacaccaaattaattaactcccatggctggccaacttgatggcattaacttttcatttttattaactctcattaagtcttattgctgccgccacttttattttcctcgtcgttgtaattaatttcttatttataactcgcccagccggagggaatgaaaattattattcttgacggttgctgtttgaaaaaatttcctatttgtttcagattttgttttttatagatttgtcatctgctgctgacagaaatcctcaagagtcggcatgtttacgcattggaaaatttgggaatgtttgatcgacaacatagtggtacagcttaaatattcgtgaaaattcagggattttcgtgtaaaagttcttttttaatttatcaagtaaattaatttgaatactattttaaaaattagaaaaataaatggaaatgttttttacaaattttcgggaatcataaatggtaaattttaaaaattgcagttaaattcatcaataaatgaattgtttttcataaaagtaaaagctaacagaattctgaaattaaaaaaatttaaatctcattaaagacaccaacaccgatttggagtgcaattttgctcatttttcaacactgagtaaaaagtaaaaatgattttttaatgtcttttagttcatttttttatgcttttctgctttcatttttgcattatttttttttcttctttcaaacgaataattttttagttagttttagtattttaaggtgaaattaatttaaataaataattgaataattaattctaattactttggtcagatcaaacaattttttctgaggtgcattattctcttcatcagcagcaaatcttgagtaattgaattgcattttttggttattctgcagaaattcactgacaatgcttctcaatttgacgatataatcctaaataataatcattaattaattacaccatttagacattttaattggcagccacctgttccatgccaatccgttcctccaccagtgccatttccccagtttcgtctcgcccactctccggcatccaaatccaccgagttttcggcttcaatggaacgatgccaaagtctcccggcacaaaatcgtccgttttgtacatgccattgaactggttcaacttggagaagcccatcttgccataaattccatgtccaaacggcgctttggctcccaattgtccatgggatgtttgttgttgaacaacattcggtagagcagcaaaccgacgaatcacaccaagtctttccccaatgttgtgcttctgttatcctgaattttatttaatttatgaatatttatttgatttggataattaaatgggttatgatttgttctgggctcataaacagcacatctttcagccaattcatctgctttttttgtctctattctgatgggagtgtcctttcccttgggtctttgaccttttccaccatttcgttaaattcaattttcaaatttcccgccaattgttcgtcgtcaaattcaaattcattttggcgaatcaccgaaaaatgatcaaatgtcaaaatgccatcaaaaattggctcattagaattctgctgcttttttatggaccaattttgtgaggtcaaaacggcaaaatcaaattcagtgcaatttttgcgattgttttcgattgcactttgtgataaaagccgtgataagccacaacagcgggcaaatattcgttgagagggcatttgaaaaatgtttgaaactgtggcgttttgtccacccaattcattttccaaatttatttttggtttaataattttcttttcaattgcttctaccgattttttaggcgctgatttttagaaaaatatttttgagttaaaattattacaaaattctcaacttaaatatgacattttatttgtttgccattaagttggatgatgcaaatcttaacaactaattttgcaatttcaaacaattcatttttttatttttaatcattaaaataaaaaaaatgcaaaaaccataagattattttccataagaatgattttcaagataataatgaagaaattcataaaacaccaattaaattacgaatttaattactgtttgggcgctaacataagattattttccattatgatcttattctgcacaattcatgatgatggagtttttttgggtacttttcggttatgcgtacacagggccaaattttaaaaaaatgcaacaaaggagcgacgtttgccttcgcacataaaaagctaaacaatgatgaatataaattaataaacattagtaaataaaataaatttaattaaaaacataattaatttttacatgtttctgttttggtagcaccgcaggtggccggccacgcattgttagagacggaggcgagcattattaaatgttattgcactctcatttagcgatataatggcagttcattacatggnctatttncaaggacatcccttggaatacaaangactatttcctcccaatcccacaaccccaatttaatactttgatactganttaaatcattgatttcacttcaaaggcatgaagctacttctgaatgagcttgtgccatttgtgctgtaccaaattt

SEQ ID NO: 4077 - DNA, 6483 bp, Heterodera glycines
attttcataaatattttacttcttaagtcaattcgcgctcagagatcattaaatggcccagaaaatatcttaaatcaacatgaggagagagcttctcacgatgatttctataattttcaccgattaattggccctttctgcgcgttgcatttttctcatcggtcggtcgtaccaatccgtcctaccgaaaccaaaagcattttccaatttctgtcccgccaatctttcgaccattcataaaaatggtaacccaaagaatcctttggctttatgtcttgacaaaaaaaaacattggattgcttttatgtactttaagaagcaattggcttaagccaacagaaagaaagaaaaagtatgaaaagaaaatgggagagggaggacaaacaaacggtggaagggaaaagaatttgggcgatggggaaaagtttgacacggaaagaaaatgatggccgaggaggaggaaaagggagtttataagacaaaaagcgagcaaataagtacgactaaactcatcgatgaattgggagcccgacgatgggaaaagggacgacgaattcattactaaaacaaacagaaaattgggtgcgagttattttcgacatattgttagccgtatttcgttcctaattgggttttgagtcgaaaacccaaaaaataaaggcgaaaatggcaaacaatggtgcaaatttggcttttttgaaaattttgacaaaaaacaaaatttggtttgcccaattcctaacgataataccaccggctccaccccctctcccactaaaatgtaattagtttaattaaacattttttcatgaaagccgaatagatatttgaacacaaaacgaagtataaactttaacacaactacaatacaagaatagaatctgatcaaataaacaattcaataattttactattttcttaaaaagtgaagtcattgccctacataaacagtaattgactaaaaatttaataatttaattgtataaaatgaatgtcgtaagaaatcgcaactcattgtcactcaaagactgggctgttccgcaaattcatgctcaggcataatgtaactgatgtcatcccacgggtggcggtacaacggctgcttcagacgacgttggtccaaataatggccttaaacggacgatgaacaaataaacatagctgggtaaacaaccgatgaatcccaaactgcggccgagcacgaacagtccattcagagacccaatctcaatggtttcccgcgcctcttgcggtgtgaacattcccgaatggcgaagaatgtccacgaaaattgtcgcaattgccccatcgacgttcaaaattaagttgggcttctaaacaaattttctgatgaggagggcgtctgggtttgctgtcactttcgaagttgtgatttgctccactttgagtgcgtagtcaaaaagaggcgtctcctgcttgaagaaggtcttgttcttcgctatctctttcagtatttccactcttttgtccgggttgtttatctgaacaatcgccgccatttctttcgtcgctgtgccccccccccagtctcaccgattttactctgtgcccaatccccggaatgagtttgcccagccgcttctgctcattcacaaattgcatggcactcagtcccgtgtccattgcttcactgaaactcttcgcggccccgtccaaagcaccgccaaaacggtcaccctgaaaatgtcaattgtaaatccgtcactgttttcagcctcctctacttttacgacaacccggtgctaggacattcctaaattccgacatgggataataaaataaaataaaattgcttaaagtcaaccaaattaaacaaattggtatcattattctcaatagcttttattctcatcagaatattaatttcaaaaatagagatttcagaatttcattcgaatgataccaaagcgttaaatttggttgattaaaagaatttcataatctctttttattatcccatggcggattttcaaatggtcagcccactgccccacactcacaatggtcaataatccggaaaccagcgacgagatcaagtccttgccagcccttgcacaaacaattgtattgtgggcaccgctaacggcgggcccgtggtcggcggtaagcatcaaacaaatttcgaaaaaacgatttgcatattcgggcaatcgtttctgaaaaatgaagggtcgagagtgagtagaaaggaagggaaagcgacttggaaccaaagaaggccgagcactccgccgacaccgacgttgtcctcaagcactcgcgtgattggcacgccggcgtaaagcaactcctcccctctctcgtcgcagatggaagtcatgaaggaagcgggcttcctgatcagtcctaattcctgaagaagggcattctttttgctgattaagcgatgagttcggaatgctctaaaaaacgatgtgaatacctttgcccatgcgtaatccatcggcaccggtggcgggggttcttcggcacgtggaacgatagaaccattctcgaccaattgcttgtaaactttcgagatcataacaccaaagtcatcgaaagagtcgggcacgtgagcaccagcagacttcaaagcagcgtttttatgtgccgcagtttctttgacggcgttggccgaggccccggcatggccaaattggacctcggaagtgatgtgatcggcacaagtgccaatgcaccaggagattaggggcttatttatgcgtttttcttttaacgcctggacgattttgtactcttcttcgcctcccacttcgccaagaagaaccatcattttgactctaatggaaaactgaaaaaggaaaaggacgagacaaaacacctcggatcatcttgataacgaagaatgtggtcagtgtaagtggagccggggtagcgatccccaccgatggcaacaccctcaaacactccgtcggtgttgtgggaaatgatgttgttcagctaaactatttcgtaattcaaaattagacttcaaaacgacctcattggacattcctccggaacgcgagacataagcgacgctgaaatttttgctagtaaaaagcgttagggaaacaaattccctcccaccttcctgatctgtagagtttcgacgcgagaatattatccatcattccgccagtgttgccaattttgaaacatccgggttttatccccccgacagttgctggcccaatgacagtaacccccttttgtcgagccacctgaaaaccagcattagccggcaaacagtcgaacaaacttttatcagttttcgcgtctgattttcaggaactccttcggcgatgatggcaatcacttttatctgagggtattccaatgcctcgagcaccgtttgaaacaccgaacgcattgacgcaaaagtgaccattacggacgcatcggggtgacttttgaaggccttttccattgacttatacgctgggataagcatttctttctgtccaaagtaatatttctgcttgtggtctccggtgaatgggtaagtcgaggcgaccaccgaaggagcgcttcgcttgcaaacgtagtcaaaatcaagcattccctgaattggataagtcaaacatccattgaatttgatactttactccttttttattatttggaaagtttttaaaaatatatcaaacaaatttttcagaataaattttattataagaaacgttttcagtttcaaagaattttttttttggtaaaatggtgtttaaatagatcaaattttgttaatattatttcgaattttgagtaacttttgaatcaggctaagaatgcccctctaaatcccttcccccgtaagtcacctgaattgcccgctgctgctgtccccagatgatggctttcgtgtccctttcaaaaaggcttcgtatagcttcctttgactgctcttccatcgtttcggccttcgcctttttttccggggtcgtcccattgcttttcgggtaaccatttgcgactttctgctgactggccgattcgttcccagcagaaacagcggcactcttaaccagaaaaaccacactcacagaaggctaatgcaaatgccgaactcacccccctctccggggccaacagaaattgccccgtcgtgtgaggagtcagagaagcttcaggaaggggacgaacgcccaaagcagcgcccacaatgctggtcatgtgagtttcaggaccaaacacgtgaattggcaagtccaatttggtggctatcaataaggcaaactcaaataaaaattaagcaccaatataaccggcttctttgaatttacgaagaccgccttggtaatttgggccaccgcgacggacgtaaattgttactttatgcagtcgaagtttttcggcaaacatttcaagcgcacgaattattccctaaaattaaatggtgaagaaccaaatgcgtcagcaaatgaataccaaccttaaaagtggcggaaacattagtgaagttggcaattgagccgccaattatgagcactttgccctttgggtgggcctctccttccgtcataattgtgagaattgttttggcgtactcaaaagtttgcgtctcgtttgggtctcccgaatattctccgtaattggccaactcagaagcaccgccgaggtcacaaacagtgtccctgaaaaggttaaacgaattgataaatgcaattaaaaggaagaaaattggaaatgccaacgaaaaggctacagagtttgggcaccaaaacaaagatttaaaaatgaaagagaagagcatttaattttcatttagagggggtggcaatatttctgaaaatccaattaatttcttttatttatttatctcacgtgaaaacaacggatgcgcctccaccggccaccatcgtccaaactcggcctttccggttcagtatcgtaagtttgagagatgcgcccgtttttgcgtccaaatcggcgatgtatttctcctgagcgaatgaaccactgattatgcgaagaatatatggaaatttggtcaaatggtgcccacctctgtggtgaggtctcttccaaaacgagcagggaattccacttcgctcccggaccgcgtcttccaattttcagaacagagaaaggcggcggtttcgtccaatttggcagccaaatccaaaatgaatatttttccgtctcgaacaacttgagaaaagtgaaagtcatcatttctccattaaaatcattgagcatacccaaagggttaatctccaaataggtgaaatggtttttcttgtaagtctcatacaactcgcagacgaattgtttgacaagactgaaattcaccaaaagtttaaaagcattgaccaagaatatgtgccttttcttcgtctcttcgactttgctcccaattagttggtcgatggactgctctccaagtgccatttcttcgtctttaagttgaacgggcaccaccaattgacgtgccttcaaatagttcagaattttaccaagtttggcttcgcatttaacaccttggcgtcgacgtccccaacctcaacgccgccctcctcgtaaaacagaatcacatcctcattcattttgctataaatggcgatgtaaagctcatctttggccccgtgtttgcaaagcggctccaaaatgaatttcgaaagacgccccgtggtctttccgatctgaaaatttaagggcaaaacctcttttcacgtgtccatttcccttacctgaacattttgcccctttttttcatcgaaccatttggcgagttcgtcgctcgttccgattttgactaatccgtgctttcccctgcgcttgatcaattgatcgggcttgagaacaccttgctaaaccaaagtctaatttaatgggaaaaattcgaaaataggcctctaattaaagacttttagtttgtttaacaattacatcaataataaaatatataaattaattccaatcgttttatgttgtgcccaccccctctttgctgatccaatcgcaattaattatggcatcttggaaatttgtgttctcatccaattggacagcatttggcttgacgagtgcttggacatggttcagtgagcggtaaagaagctctttgcccgaatattcattcactgctttagccgacattggaagtcaattaaagtgataaacgaaaaactaaattgggtatttgagtgtatattaaaaatggagaacagcgcaagaaaatgagagtgaaagtcaaaagaaaggaacagacacagacgaacatatgcagaagaagtggacaggggcagcttatgcttaaatcaattttccgatatttttcagccggagaggggggggggggggacggaatagacgaaggaagagagaaatacgtaaaacggaaggagaatgtgttttagggtcgaaaatgccaacaatttaaggagagcgaacatccgaggaatggcaagagaaatcttttggatttgaggactaaacatttccacaactcacaaaaatgggttattcaaatgaagaaat

SEQ ID NO: 4078 - DNA, 2464 bp, Heterodera glycines
  unsure (1)..(2464): unsure at all n locations
tatgtacaaaaatantttgccgaaattttggatttttttttgaggatttccaaaaatttccataaaaaatactcaaaatatgtaaaaaaatgaaaatatatatgaaaaaaatccaaaatatgtacaaatatgtaaataaaagtcccggttttaattgacagccctagttattatctttttaatcgatggggggaatctttgtttattttttgaaagtgggtttttggcattatgtcttttatttcatttaaagtttaaaaattttttgtggttttccaaaatttcttgatttacaactgcataagccagggctgtcattggaaaaaatcgtgaaatccaaggacgcataaaaattttatcatactcaatgaaaaattgattaagttttattcaaatggtttgtacttttcgccggaatgaattttttccaaattttttttatttctcgttttcttatttcaccgctttttgccattttgagacaattggcaacgcttttactgaatgtttatttttcaaattttgttttccaaggacatcttggaaattttcaatttttcaatcgtcgacgccctaatccagggacagtaggggtcagttccatctggccagttccgtctcgccagttccgtctggggccggttccgtcttgggccagttccgtctcgccagttccgtcttagtactcaaagggccggttccgtctcaaatatttttggactcaaattttttaaaatcaataactaatttagaaaaaaagtaaaaattcttttacttcgcagcctaccgcagcctaaatatacctggttttttaaaagttgtggttaattaaaagtatattcgaaaataattttttgaaatgaatttaacattgcaaatgtccagtaattctgctcgggattctcagtcttggtcctcgtgtcgggaaatttagcagccttaatgtgtccagcactttgtttgcagcgaatccggcacccattttggaccccgaacccgaatataaagattaatttacataaatttcgtctaattttcaaaaatacacccctgagaaatgaaaaatttcctcaaaaattttgttattttatatccctaaattgaaactttaacacctattttgaggtttttagaaccgaaaacctaaatattttggcagtttttagtttttaacacccaaaaatattaggcatattaaatatcagggctgccaaaaacatgcaaatgtattttttttcctgccttttccatgctataaataataggaaaaacacgttctttttttgtgtttgcgtagaaaaatcggtatttttatttgcatattttgcatatttcgagatttttgtgcatattttggctacttttcgtgcatatttttggcagcactgttaattatatctcaactttctgttcacattctgaaatttaaaaaaatttgggtccaaaaatatttgagacggaaccggctcttttactactaagacggaaccggccccagatttaaagagaaaaacaaaacgtgcaacaattaattcattggccattgtctcttatcggtgttatgaccagggctcggatttttatgtgctaaaaatcctgaaatatgtaataaaatatgtgctaaaaaatgctgaaatatgtgctaaaaacccccaaaaatgccaaaatatgtgctaaaatatgtgttaaaaattgaaaaaataagtgtgtttttgcataaaaattcccaaaaatctcattctttatcatttttagcccatacaacgcaaatcaaatacatttcgaagtgtttggggtaaaattgtctttttttgataaatcatttctataaattgaaagttccagcagagaacttcgaaatccaatgacgaattaatgaattcgagatttcattagtttctacaatcgaagaaaacattttttaatttgaaaattatgttaataattaggaaaaaagtcgatttttaggggtgtatttttcaattttcttgtatttttattgcaatttttctcaaaaatgccaaaatatgtgcaaaatatgtgccaaaccccaaaatatgtgctaacatattttatgtgccaaaacgccaaaatatgtgtttttatgtttttataagtcgctctaaatcaaaaattgttcggagataatgctatttttgggcttctctcgccataactaagccgcaaaaaaaatatgtaaaaacataaaaatccgggccctagttatgaccagggttcgcagatgaaaattttcaaaagcctcattctgggtcaaaaagcttcatttttacaaatgtattcaaaacaagtttaaaatgttcaactgttatatttttgattgtccatgatcgatttgagtaattttttttgttcgaaataagcattttgtgaaattctgagcatgaaaaatcgaagttgatttttgcggcgctttttccaatttttttggggagcaggggggtcc

SEQ ID NO: 4079 - DNA, 3340 bp, Heterodera glycines
aacacaagccaagacataacacagccgggaataaattttttttaattttcaaacagaaatttttcaaaaaaaaatcttacgttgaagattctatgaaaaaaaaagtttgcaagaaattttcaggcgaattttacgaattctaattttcaaaaaaaaaaatcgttaaaaactttttgaaaaattttttcttgaaaatttctttttgtaaatttttttaaaatttattcccggctgtgttatgtctcggctgtgttttggggtgtaccgggtagcggcatgtggccaagggaatcgaaattttaaagtgaaaaaaattgaaagagttataatttttttttaaatcaaggggaaaaaattgaactgctagcgtttttgaattttaaaaaattcgaagttttttcatgaaaaattttttccaaaaggtcactgaatttagcaatttttttgtgaaaattttaaaaatgaaggtgaagtctacaaaacaaattttccgggcagcacctataggcaccgccggatttttaaaaaatgccaaactttttcccttgcatcgcctataaaaatccttaatttttcttgaaaaattgggttaaaatagcaaaaatcttggtaaaaatcttaaaaattgccctcataccttgcatcgcctatcggcactgcctgaccgcaagcccaagtttttaacttttttcattgccatttttgttttggtcatctaacaaatttattatgccccttttgcaggccgttcaacatcaccaagcagcacccgcagcccaaccggctgctgcagcgatgcccgggggcgctggtgccgcgccggccgccgctatcattccgttggcaccgccgccgtccccataaaaagcaaacctaaaaatgcttaatgatttgatgaatatacaacactttttaattccaaatattttgtttcgcttttttgtgggatttccttttgttttcttcacaattttgtgtattatggtgaacaacaaacaaacaaatgcgaatgcttcttctatttttgtgtaaaaagagaaaaacaaaacgtgcaacaattaattcattggccattgtctcttatcggtgttatgaccagggttcgcagatgaaaattttcaaaagcctcattctgggtcaaaaagcttcatttttacaaatgtattcaaaacaagtttaaaatgttcaactgttatatttttgattgtccatgatcgatttgagtaattttttttgttcgaaataagcattttgtgaaattctgagcatgaaaaatcgaagttgatttttgcggcgctttttccaatttttttggggagcaggggggtccggcggtgtcgataggcaccgccgggaaaatttttgtaatttttaatgtgatttgttaacagaatttgcccacaaaaatggccaaattttgcaattttaagcaaaaattttaagaaaataaaggatttttagggtctggcggtgccgataggcgccgccgggggaaaattgagaattttgaccatatttttagcagattttcattaaaaaattctttaattgttaacaatcttgcaccaaaaatagccaatttgcattttgggccaatttctacaaaaataagagaatttggtttcagcggagccgattggtctccgcctcgctagggaaaaaagaaatttattgctccaaaaattttacttttttacttttttgtttgtattttcgagcattataaggtatttttcgtaaacatctatcaacaaaaaaaggttggtttttgcgattattaagctcaattggtaggattttcatttaaaaaatgataaaatatgtatcaatttaaaaaaaactatgaggaatcatattttctttataggaaacccacgagtatacaaaaaaaaaaattgaaaataatctaatttctgtagagggattgaaccaggagaaagaagaagggaaagtcaaggagaatagccactaggccatttgcacacttgggcagttttacttttaaagaatatattaattattattttatttttccctttgactccaattttcttcactaatttttcactcagaccccattcttaccagtgcttgtttttcccggttcccggttgccctaccgggaccgggaccgggacctgagcttttcaaaacccgggaccgggacctcggatgaccgggaattcccggcccggtcccggtcccgtggcaatctatttcaaacacataaaaagccaacaaatttaaatattttttataaaataacttaatttccattttttcatttaacttttttaattgaaatttttcaaaattttcatatttaaaaaaattcgcgatacttcaagccttcaagtgctaccaagaatgtacggattgattaatcaagaagaaaatcatggttcataaacccaaggaggttaaatgatttatttttgaaattattgtgttaataaattgttataacaccaaaaaaggttttaaggaaacattaattttcaaaaaaccaatcacattattaagaatggtaaaaatcattaattatacaattttcagatgcgcataaatagcagtacgcacaactgctttgctcttgtcagtaaggcgttcgtccagctgcgacatcagctttttcatctgctttcgtgcatcggcagcgtttggtccataaagttctccatcgccgttgtttttttgaaacaaattcgtttagcagcatttaaatgtccagtaacgtccatccatgcgaatgttgcggtgctttggcagtgcagggagccacggcgtctcgactccagtgttcgggaaccgcgctaggacgaactcaaatttctccgaacacacggcgcatttgtggacgaggtgacgggctcgctcaagatggctgaagtagttctcgcggctgtcgtcgaacagaagtcgatacatggcgttgtttgctgctccaacagtgtctgcgatgcgtgcccgtgctcccccgggcaattgtcgtacacttgcggtgctgcctgattccaaaaaaaaatccaaaaattaatacaatcattaccattttcattttaattaaaaaatccaaaaaattcagcataaatttgagtcaattgcgcggtggactgaaaaaaccaaaatttgaaaaaaaaatcaaaattttccacttttttaagctgtgccaatgactgttgttgttgtttgcggggggtttgctaaaattgaaaaaaaaactattttaattcaaatttttattgcacacctttttcggtggcattatttttttgttgtttttgttgttgctcggaactgccgaaataatgcttgtggggaaagaacgctgaaaatgtgg

SEQ ID NO: 4080 - DNA, 1455 bp, Heterodera glycines
  unsure (1)..(1455): unsure at all n locations
tcaacaaaaatgggtggtttttgcgattattaagctcaatcggtaggattttcatttaaaaaatgataaaatacgtatcaatttaaaaaaaactacgaggaatcatattttctttataggaaacccacgagtatacaaaaaaaaaaattgaaaataatctaatttctgtagatggatgaaccaggagaaagaagaagggaaagtcaaggagaatagccactaggccatttgcacacttgggcagttttacttttaaagaatatattaattattattttttatttttccctttgactccaattttcttcactaatttttcactcataccctcattcttaccagtgcttgtttttcccggatcccggttgccctaccgggaccgggacctgagcttttcaaaacccgggaccgggacctcggatgaccgggaattcccggcccggtcccggtcccgtggcactctagattataccaatatatttatattttttaaaataagcttttagtttcataaatttaatttttttgcccccaatttgagaacataatgggcgaaatgagcttccgttttgtaatgctcctaaaattaaaattttaattatggcagtcttgtgccatcaattacatgaatgacccaatgccttttgtgtactgtttggagacgttactttatgaaaatgtgaaatttgatgacgcaacgaaactttgcttcaatttgatcaatcctggaaaatttgtgcttgatcggatcacgtattatgaaattcggtatattatatttatttcttcttatctttttaaaggcaatgttttgacggatcggaaggcatccttttgcaaaatttagctgcagataaaacgaaaacaatttggccaaataaggtcagtgacagatttaaaattttcttttttgttataagcctgaaaattcaaataaatcgtttcaaaaaagttatgccaaaaattcaaaaaattttcatttcacaaacttagaaaattatcatctatttttttaaaggcaaaagccaatttattttttggcttctggctaattgagtttgtcctgcacttccgaaaaatttcaacaattccaaactttggcaaatatttcagcatcaatttgtgccgtggattttggtgaataatgtcatcattgaaacaatgcaatttttgcgctattcattgccctcattgatctgcgagcaacgggctgagggtgaatatatggccgaatgtgaaagttggtaaatcggaaaaaaacaatgacaaatttcaactgttgaatgatgttgtttagcacattaaacatcacgcaaatttaatgaattgatcaagaaaaaaagaatggaaagttttattaaatccgccaagggataaaataataaaagaaaaataaaaatataattagagaaaatttatttcggcctnaataattatttaattaaaattttttga

SEQ ID NO: 4081 - DNA, 3616 bp, Heterodera glycines
ttggcaaacatcaaaaattgcggagcacaaatcgccctccggggggggggggggaagaggaagagaaaggagagccttaccgcaccggacaacaacagactgagcggggggttggacggtcgagagcgaaccgcacggggtcgagagtggtgggtgcccgcggacacggcgagtgaccgactgaccgaccgcgtcgccgccgacgaaggcgacgacaaagtgcctgccacccgtcctgtcccgtccgtcgctcctcgaccgactgacccgcaaaattttggggcactcgccgcccctggggacagactccgctcgggtgatgacgatgagtccccaaaaacccaaaaaatgtttgagttttgttttgtttgtttgtccgggagggatgggcgggggcgaggcggacaaatggacgacggacggacggaggattaaattttggcgggatcatctcgtggagggcgccggaggggcgacggaagataccctcacccgcccgccgctcttccgtctttcatttcccgtcccaatgtgcggtgacacagacgttttgaggcgcttctctgtaaggtgacgagcccagcaaaagtcgggcgagaatttttgagagccattttttgttgattggaaaattggcccgggtgcatttcagcaattaggcatagcatttcattaaatgccaaaataaagccactccaaaccctccccctcgggttcctattttcaactccgtctatggggggggggagggtgctaatttaggggaagtgggacagtattttaaggaatacagcgggggctataatttggagggggcgggcagtacggtaaggggcactaatttagtggaggaggacagtattttagggaatacggtagttccttattctaatcgaaacttgtttcaaacgaatacggaaattcaggaaaattatactttgtaaattatactgtttatttgcgttttagcgctgtttaaccgctaattgtgaggagagttaatgcttgacgaacaatgtacatcgtcagctacaacgacaacaattgctggcatcaaaagagcacatgggacgacgacaagcagtaacagtatcagcagcagcaggtgagggaaaaaaagtaattagtgggtaattgttattaattgggtaacggaataatgggcccccggattcctagtttttacgttctttttttgcttcaatcagcagatcaacccggggtgcgtcaaaacagcgtcgagatcagatcaatctcgagttggctcaaattcggcaccttttgccactcgccgagtcgaccaaagaacgactgttccaattgcaggtgagccattaatgacaaacgcctggattttaagccgatgatttgccgcgcctaattaaaatccaagctcaatacaataaaattttacctcatttgtccccctcattaacttccaaaaagtaattttgtatcatttgctaaaagttggcattctaaaaatgattatgcttttgtttttattactaactttttttaaatttaaaacaacctttattagagttatacattttgataaagcctaatggacctgggcttgggtcaatgcttgacctggttttcctacacaaaaattcagcaaaatccaggtccatgaaaaatctaggttgctgaaaaatggactggacctggactacgagaaaggcctgggtccaatccaggtcgaactctaggctttatattacaaaattacggccacaatgtttatatcaaatgccaaaaaaaacaaaacaattcaggtgatggcactttgctgtgtgtggattcgaaagcatcatgcgctcaaaaaccgttgaaaacatgttttcatgacttttgaagacaaaaaagtttttcaaaaaatggagggcaccagctttattatgtactattaccggccaaagtcataggcaaaatttttattttgtgaaaattttttcgagcaattgcattaaatttttaggccaaatttgagacaaatttttaggtacgattggcagattgctgctggtgcgttttttcgtggtcctccaaatgggtgggctcattacaattttttacttttttgtgactaaaagtcatctaaattgtgccaagcttttgtctaattgctgcttagcatcgatttcttatgccgaggtggccttgtccaatattttgattttggcttggtgtcaccgttgttcgactttgaaaatttttgagagaaagatttaaaaacatttctctattagtttctctgcaactcgatggaaatttctgcaaatttctgggtgtttcgtggcggttaccccacctttacaacccgttgtggtccgagaattgcacttatgcccgaaattgattaaattttagcaacatattttagtgcaaatttatgacacgacatgaggtcgtacacaggggtttgggcttgggggtctgctttcgcaaatttaactcatgtaccaacaccaccctttgttcagccacaccaagacttgcagaatttgctgaactgcttcgccgacttgggccgggaccgaccgggtgtccagagcaaagcatttccgcaatgtgtacgaatgcctgagtgttcaggtgggcattgccttagcagttgaaacatgcacattttttgcggcacgagactccgtttggttacggactgggatttcacagacccggatttgggttaattatctttacggaccccacttcaattggcttgcctcctctctgtgtgaaacactccatacgcgagttttgtgtgtccagttataaaaaacattccggaaaatctttacaaagtaaccttggcaaatttttgggccgggagaacaacaaaaaaaaacatcgaatgtccctcccttttttttggataacgaccagctttaaatttattcatgtcgctctttgtcattttgcatatttccaattatttgttggcatttttttcatcgttattccaacacaaaatcccttccccactcatttctccgctcatccttccaatttttagtcctattgtgaaggcgcctccatttttgtcccatcctccgccaatgctcgtcatttccatggtcgttcatcagcatcatcgtccgtgccaattttcaccgttggcggtgccggcgccgatggctgcgcaaccgggcacagtctgagcaacatttccaggtacgaaatcaaaaaaaaaatttgtctttgtttggtagtttttcaaaataaagcaaaagcccaaagattgggtgtccctaatttaatgttgttattatgagttaaaaacgaaatctggggggggggggggggggttgaaggtggctgacaagggaatcgccatgatgattggtcatgtttctccccttttgttcatcgccaattgccaaattttaatgcaaaaaataataaaattggcacaaatagacaactcaattttccgacatgaattggcactggcatttgaattctcatattttttccattgctgaatttgtgagctattaatgtctttttttttttgctttaaaagcaattaaaaaaggcgttacaattgggaaacaattatctaaataattttcaaatcaattttcacacccgtacaatttagggagaa

SEQ ID NO: 4082 - DNA, 4867 bp, Heterodera glycines
cactatttcccttttactctgtgtctgtttttctttgtttgttttcatgggcagagattacgaaatttttgccccccacacatgaccatttacagcccgaaaagcacatttcttctgccgattggtcatgttttcccctttcattgtcctaaatacaaaaatctgttcaatcgcttttgctctctccgttggttcactttattaaatatttaccgacaatttcgcataaaatgacaaaaaattttataaaattggcacaaaaaagacaactcaaatttccgacatgaattggcactggcatttgattctcatacattttcacattgctgaattatgagctattaatgtcatttgaaacatttgcgaccaattttccacaatgatttaaagaaaatttgtaaaatttcaaacattgcttaagttttgcttaaacgttggcccatcgctggccaattcctttgaattcataacgaaattttcgaaaaagttcaaatttttaatatccggtatgaatggcatcaaattttggcacattcttaatcaccttcgctagtcttctattcgtcatttacgtgatttcacctaccgtatatgctctaattatagcccagtctctattaatcccgcagtcttcaattatcccccagtctacgaggtgttttgaaaaataatccctctatcataatcccccagtctctaattatcccccctttctgaggaggttgaaaaataatcccccatgggctataattagagcatatacggtaatttgttgtataatattaattcagactgaaaatctaccgcacttactacacaatttctcactgcactgtttcatatttggtgaacgaattgtgtgccgtaccgtcttgtatttaactgttttttatgtatctacggaaagggccgaaatacacatttaatagagaattttcatcatttaggtttattttttagcaaagtccgtactgacgaggcccgctttgctaaaaaaataaataagtcattcatccactaatgcatttagttcttaatgttgatcaatttgcaggaaccgatcactgattggacggcggcaccgatggatgacggcagagatttacagtgcgttggagatgaacattgcgatttgtaccgcaacaaccgcgagcagttcaacagaaatgcccgtgaatggacgcagaagcatgccttttctttttccatgtcttttatttttcgtttcccattttttgatattttttttttgctctcatcatttttcctaggatttgtaattgtttttctttttgccaattatggaatggccagcgacaaccaacagttattttttggaaagtaatcaacgaaccggtctattgcctttattaaagtcgccaaaaaatcgtgaaaagtcagaaaaacgctaaagatacgaaaaaaatacaaaaattcctgcaaaaactgaagtgatagagttttatttcctaaatataaaatggcagggaaatggggagaagccactaatcagtcactaaacaaaaaaatttcaacaaaaaaaggttcctggcgtcgcatataggcgcgcggtggaacaatgtgaaaattttgctcgatttgacaggaaaattatcccaaaaaagccaattccgacagaaatatcacaaataaatggaataaagaatgggacagcgccatcaattagatatttaaatcatttttccaatcaaattttatcaactttttaatcaaaaaataaatgaaattaaaacaaaatgaaaaaaagaaaaccgcccggacggtgtaaaatatgagtaaaatacaaccgcatccgggtgcggagggaggccaaatgaaaaatggaataaagaatgggacagcgccactgctcgcgtaccctcgacctaggccgatcggcaccgaatagcattgctgttcccacgcataaaaagcaattatgcataattctttctctttccagtccttgtccttcattcgttttcctctggctgggatcgcctcaaagtcgactcggttccattcgggcagcaccaggtactgcatgcgcgcgtcacaggcggcctttgtcttctcagcgattccgctgactttcacaattgctccatacagtgccacttgacctgtgattgcacagtttggtcggatttttgctcctcttgccagtgagacgaaggccaccccccccccccccccgccaagccccggatggcccagatttgttggcactttccttcaaaaaaacatttaaattcttaaatattatattacttaaataaataaaaattcaggttaagaggcatgaaaccagggaggtcccaggattttattttttggcagggggaagaaaagaatacagccctgaccgattagcaaataaaaagagagaaaaagatatcgaatggctttcatgatttctttgaatacgggcctgtgagttttatggtccaaaaattcgtccgacgacgtttcggccgaagacgttttgtcctactccgggagaaagacagtggaagacaagcgcgtaaccagggtcgggagggggtgggggtggtattcaaatgaaaaattaaatttaaatgaaattgatgcttttttctggcgacgggattcttgccgattaatccggtgccagcttttcttttgacaatatcctgagacaacaggagtcccgccctgttcgattctcaggttccgaaataaagaaagtgcagagaaaaaaacatctcatttcgggagtcgcgcagattcaattgtgaataattgtaaatttccgggctctaattctccgaaaatgtttccaatatttaagtgctctaagcaacacaaaaagtcaaagttttcaacaagagtcctgtttttcctcataaattagaggtattttagtcttcggtttgggggggggggggggttactctgccgatttactccaaacttcgccgacggaaacgttgccggggcataaactcgccgataaaattaaaataatgcatgaaaaaaacgtgcttttgaaaagtatcctttttaaataatgatttctgtaaatctgatatcatattcgtgataagaagcttcgaaaaaccacgggttagtcttcataacaagcccatattctccagtattatcattatttcatttaaattttattcaatttacatttccatgcgctttttcctcagcggtttgtcgacgaaaaaaattgatgagttggtgaatgtgttggcactgcgtttgttcgtccacgtaacagtcaaaacggtggctgattagagcaattccgaggccaagttgagaaggcgcaagcaaatcgaacaccgacagccaaccgtcgccggagatgaaactgaagaaaaaagaaaagcataattgaaattgaaatttggcatttttaattttacattgcttttgccatcttttcatccgcttcttttcggttgtctgacattttgttgtggcaaattattaagatagttttcgtcggatttaaattagcttagaaaaatcgaaacacaaatttaatatgtgaaataagtcagcagaattccttgtaaagtaatggtaattttaatcgaatcattatacacaccgactcaaaaaacgagacatgtgtaaataaatagagagtgcagagaaaaaacatctctcattttggcgtacttttttttacgtcgcgctttttcaaaaaacttttagggtctatggcgggagtgggtggggtccgacggtgttaccgtccatgattacacactaacaataagcttgagtaggacaaagacgattcgttttagccaattcgtttttgtatttattccgatttttggaggccggtattccaatttctgaaaaatttggcctaggaattccgatttatataaaatttttgagtctcggaatgtcatccctggtggttgacaacttttcgagatttatcgtcactaaaagttgctcataagtagggcgtgtaattatatggatataaaatcacgaaatattccataaaatatggacaacaaatcgcaaaatatggacataaaatagcaaaaatctcaaaatatggacataaaattgcaaaatatggacataaatttttccaaatttagtgtataatttctcaaaatttcttcaaatttattggttgaattgcatataagatacatttacaaattttgaactgaaaaactcattcgattgtcggcaaatttaaatttattcaatatttttcgtgaaaattttgctaaaaaattattttttggaaaattttccggtttttggggtccaaaaggccaatttagctgatgggggccgttctaattgaggttttttggaaaaatcccaaaatatggacaaaaatgggaaaatatggaaaaatatggaaaaaatggatatggaaagtcatcccagaagcttcaaaccaagctaaaaacatgtttttcgtgcgtttcagacctccctcagtccaggaaaaaactatggatttccatataattccaagccctacttataagttttgattttctccattttttctttctctgttattctttttctacatttcgaattgtttttcccacccatctcataattaattgtttccttattcaaaattcgtataaattttttaaatttcttcctttctttttcgagtattttcttcttgttatattcttttcgtttttgaaaatgagacgaatttttacataaatttgttttcaaattaaattttctaaactttattaattcattttgaaaattttcttaaatgaaattattatttacgaatcttattttgaattttggaagagcattttatagctgtttttttcgtttttatctgatttttaaatgccaaagaaattgattatcttta

SEQ ID NO: 4083 - DNA, 2438 bp, Heterodera glycines
agtcggtcagtttgcgcttttccttctttttatgcttttttgaccttcgtcgcggtgctctctgcttccaacgggggctgccctttaccagctaaaaaaccatgaaatggaaaatttttgacaaaaaatattttaaactttgctcaaaaaatttgggcttttttcataattttatgatgaattattaaattttcagaaatataaacgatacatgggggaatatactgcacccgttttcactcattttttgtcactatttcaagcattaaattgacctcttcggtaatttcttgccaatccttcttgtcgccaatgtgaccgagtgacttgtccgtcaacatttcttccgccactttgcccgcaaccgtcatgatgaggatgttcttcagctcgcttcttttgtagcgcttgggtcctgtggtgaaggtgcagccgtcgtactcccctttctttgggatgatcgtcgccttaattcgcaattttccgctttatgtcgaatttttttaaccttttcaataatggcccggtgagtgttttttttggttattacacatttaagccaaagaccttttaatttcaaattcgggataccgcgcaaaattgcggtgtttttgaattttcaatatcggcacttttttaatttgagaaagttaaaacgccaattttaataataaaaccatttgccggtggttggtatatgaaaaaagtaaatcccaaaattaacctcataccatttgaaacatgacgattgttagaagccacgctacaatgctgtgggcgcattcgtggcctgtaacacggccaatgttgtggcatccggtgcgtttggcctcgttaattagatgccaaaatttgttggctttccaatagcgtttggaagccttgctttgcttgttgttgaccatttggtgtatatttcttgctaaaatacaatgtttttatcaaataaccatgccatagccctaatttgtatttcaggggtagggagtttaacaaaataatcaggcaatacatatattttagacaaaactcttttatgtcattttgcttcatttaaatgccgtctaaattttttttttggtgattttctatcacttttgtgagccagtattccggcatttacctttaggcgatggctatgctaactatcctttttttctcacgttttaaccgtgaaaaattagtattttaatccattttttcttgcttgttcatttacgcgattttgcctaaaaactttacaaccgaaagtcttaaaaaagtcggacataaatggcattcagattttgacacttttcatctccttttacaggctcgtcctctccgtcggtgaattggctttccgtgcactgcgcggtggtcgcgaaaatggccaaggaaccggcctatgcctttattttgcccaccttggagcagtacgcggccgatttccgccattttttggagcgggacatcatcgaaattagcacactgaggcgtctggagaattcgcgcccttcggttggttgctgtcctttttgaaaatttgcacactgtttcatatttggtgaacgaattgtgccgttccgtcttgtatttaactgtttttaattctaaatgtgtatctacggaaagggccgaaatacatttatttgatagggaattttcatcatttaagcttatatttttttagcaaagtccgtactgacgaggcccgctttgctaaaaaaataaatcattcatccacaaaagcatttagttcttaatgttgatcaatttgcaggaaccgatcacatgttgcacgtccggcaccaatggatgacggcagagatttgtgccattggaaggccaccatcaaataagcgccgtgtcgccgtacgaacgaggcaccgtcaacatggacatcgtttttcgtcgcgactacccattcactccgcaaatttgtgaaatacaaaacgcccttttaccatccgaacgttagcaagcaggttttgcaaaaaatttgaaattttaagcgttttttgggtaaaattacaaaaaacaactgactgcattttgagtataaaaatgcgaagaaaaattccatttctggagggcaacgcgtccaaaatttcttcaaacatggatataagagcgggtttatttactccgcaatgataccaaatttatacccactttttgactaacagttcgcgaggtttccttgttagagaaatttgtcttataggctcggatcccgacccggaatcgaactaaaactaaaatttcggcaaaattttattggactttcaatttattttaagcccccccccccctgcaggtgtacgagtcgttggagtgtgtgcatgtgttttgcgctcgcgcacattttgtatcggcccatcattgtgtgttggtggacaccattctgcgcaatgcgaaggccgaagaattggcaacgattccgttcggcggcattt

SEQ ID NO: 4084 - DNA, 5614 bp, Heterodera glycines
cagatgctaagagtgagtggggcgattttaattaattaatttatttttatttaaatagagaccaatatattagggtttaatttaaccacaaatgcctaccgtttttcttagcttttgggctctaaactctgttaaataattaattctttcattgatcatgcgtttgattaaccaaaaatcacttttaaaaatttctgattgagactcaacgaagctagagattgattgttaaaggttagctcaagaggagtcgaaacagagacggcacaaaaagaattttccgtgccgaaattagaaccgaacgaaaaagagagactctcgggaatcgcacctaatcgcctttattacttgctaatgacccctccccactttattttcttgtctcaagcaatgcttatgcttataatcacagcttctcctcctttccccttccctccgccttttgtgctttttccccaccttttgggtgtgtaacgaaatttgctgctgcttccaaattggtgaggacgtcccccgggcagcagagcacgtggcctaaattattcaaaagtccgccgccctcccaaaacttttttccctgtgcccaaaagcttttttattgttgtttttgcctcaggggcaaaactattgaacggaggaggagaagcattttttgacgccgaagggttttacggtttcccacgaaattttgtgccctcaaaatgatccctcccatcagaagaggcacttccatcttaagggtaagcaaaactcatccagtggccaagaggcggaaattggggtcaattttcgaatttaaaatatttaataaaccgaaatttagaaaagttaaaaatccaataaaaatttttataattcaattgaagttagtttatctaaaatacacaaaaatctaacttattcggaagctgaatttttttcatcttatgcctttgtttaattcaaaaaacaaacgcatttaaaatttaatttatgccaatttggcatttcagtccttttttgtttgccaatgccgaacattggtgttaagatgagtcatccgggctggatgatcgtctcctttctgaccgaactgctcagttcctacggcggctttggcaaattgccgccctcccataatccggcattttcctcgcgccacgcgtgtgccaacgacacagaagtgatcgacaatttgctcaaggattcgtacaataaggcaacaaaacaaagcgatttaggggattaattaatggattttttgattggaattggtcctttttagcattacattccctcctatccggtccatgtacgggtggacatgtgggtccaggaagtgaccgcggtcagcgaactcacccaggactttgaaattggtggacaaaattttaaatttattttatttttaattattttatgcatttaaaaaagatgtttttagttttttgactcttaaaaaaataaaaaactgttgtttttcccggttatatgatgtgcaagatttatttaaatatgtaatatatttcgaatagaatatttaaaaacaaaattaattaattaattttgttaatgttgggcaaaatatttaaattattatttttgtgtcttcgcattccgtccaaatggtcaaaaatgtgtgaaaaagacaaaacctaaacaaattaaatgttaaacttcagatttgtacataaacgaattctgggaggacccggcactgacttttgattatatggtcggcaattttggcaaaattaaactaaagctaacatttttaaatttaacattttttaatttacaatttcagaatccctgcaaaacgaatatttcctttgacgacaaagtgctacagaagctgtggattcctaacacatgtacagtacctaaacacacaaaagcacattcattttgtgattttctgttccctaaggctttattaactccaaaatggcgcaaatccacgaaagtcccttcaggcaagaaaatccatttgaaagggcattttgaaacattaaatgcctggttttcaaaaaatttagaaatatttttctgatgattttctcaaattcgaccatttggacaaattaccgcatgaaagtgacggggccatgcgatatgaatttgaaaaggtttttcaatgcatttaaatcatttcctttattattattgttattttaaggtttccatttgaccaacaaaagtgctttctgacctttgagtcgtaagtttgtttgttttttaaaaataatttttttttaattattaattttaattttgacttaaaaatttccgattaaattttgtctctgtcaaaaacaaaagaattcctttccttaattggggtgtttcttaattgctttttcaaatagcttcaattacaacattggcgaagtgcgtatggagtggaatcagccttacccaggcaataaagatgctttttaaattttactattttaattaaataattgtttttagtgatgttgctcaaacaaattgaattgcccgactttgtgctcatcaatttcagtgtcattgccatagaacaggcaaaataaaccaagaaatgcataattaattaattaattagggcttttggtcggaataattttacgaatttggcaaaaaattaaaaaaaaattaatttaatttaatgttcagatttacccagcaggcaagcacattaaaacagttacctatttttgttattaatttgtttttattggctggtgggatgagctgaccgtcgcatttgttttcaagcgccgctacggatggtacattttgcaaggcaaattcttatatttttttactacttttattaaactattatttatcaaattattttatttgaatggaaattattttaaacataattatttttcaagcaaaatttttacttttttttgcaaaatttgttcaactgaatttttaatatttttttcatttttttatttttaataattaaatcaatttaatgaaaataattaaaattttttccttctcatttttaaggttacatcccaacgttcgttttcgtaaaaatattatttttgttcacattatcgtcctatttccacaacagttacgtgaccatcttcatctcttggatttccttttaccttggctcgaggtaaatttaataaaaatatcaatttgaaattttccaatgtttaaattaaatttgcaattttcccatttaagggcaattccggcacggacaatgctcggcgtcaattcacttctgggtcaatttttaatgaacttgttgctttacactaacaagctttgtctctgtttttagccatgactttccaattcggtagcattattcggttagtaatttatttttaattaaaaaaatctttcaaaatttgtttattttttaggaatcttccccgggtctcttacatcaaagcaatcgacgtgtggatgctttctgggtaaatcaaatccgccgaatttttctgccgcttttccggaaatttgtgtcggaattcggagttccaaaattcctgttattcggcacttcctttacctgtattttccccattttcccaaattagcatgatgtttatcttcctgtcactgcttgaacttgccgtggttgggttcatgtcgcgcaacgacggcaactcgggcggaggcacgcggcgcagcggcggcaccggtgggacaaaaaggtggcaccagcagaggggaggcgaatacgacgacgaaatggactggaaggagatgccgagcccacgagttgggctcaagcaggtgggcaacagcagaagcagaaatggcaaaattgaaaagagtgtaaaaaacaattaaaaaaaaacaaaattattggctttatttttaaaacccgggcaaaattttatattccggaaaattgataccattttaaaccccaagaaaataagcgcgcattctaaaatccagaaaaagggttctgatttaaaacgagggaaagcccaaagaaagatatagaactgatgaagctgatcagaggtggtctgatcgaatcactgatggcattggaatcggaattcattttcgtgccattgcttttacagttttgggtggacagacagtgcacgctgaacaggacgaacagccgcacagaagcgccgaacagcgtaacagcagcacaaacggtcagatcagctagtcattatcagtagaaataccactttaaattaaacacagcaacagtctgatcaagtttactgatgcattaagtcagaaaaataggagcgacatcgccttttctgaccaatttgataagctgatcaagttgatcacggcacagcagatccgtagccagggatggaagacggaggaattcccgcccccttccgaaatgaaaaatgaaacattttgaagaaaaacgggcaattttttttttggaagatctaagcgcttttcttaacccgacggagcctaacaaatggcaaaattggtccttttttatcgaaaaactacatattcttgcttttttttctcggcgctgaaaatttaaaaataacataggagaaaaaaaacttttgaccgaagagcaaaaaaaagagagaaaaattcctcctccgaaatttttctggctacggcctgtggcccaatgtttcaaactcagatatcagttgagcaactgataatgttcaacattttgataataattcaaagaccaattgatatattcgagaatgcttccgtattctgatcatgaacagtttacgtaggacaatcgcttcttttgatcagctcaaaatgattgccctcattttcattcgatcggtccgttctcagaaaacgctggacgacttccggcgccgctcgcgccctcccttcgcgcggaacagtgtctcctcgtcgccgcgtccgtcggacggctcaccgctgcaccaactcaggcccatgactccgtccttggcacatttggcggactttcggcacccgtccagcatcgaccagcaccacaatgcgcagcactcactcggagcggcgtttagtaatttttgtgccaaaattagtgggggaggaaaattgaaaatccggcataattatggcacgagtttccgcacttcttttgctgcaggcgttgaccaataccctccggcgttcggcaccgagtcacagcagcaagcaatgccaacatcgccgatgcccaaccttcgcatggttccgcggcaaatgctccacgagcgcagcgtcagccgaacgcgtggcgagcgcccaaggcggtgcggaccgcgccaatttgtgcgtgccatctgtcgctcggtgaagagcataacgccggaacaggtggacaaatacaggtctgtcggtggtccgatgaatcgtccaacagtcgccaattggctaatacattatgacgcggcgccagcagcaagttttttgagtggacgcccccacccctccctgacaaagagtgccaggaaaattgagtggcagttttgccattaaaaaatatggctggttagctgacagttttcccttaaggggatggccccgccttttccggcttctttttagaaatggaaatggctataattgctatggctaattaaaataaagtgaagagaaaagccgttttttaaacataatttaattaataaattcagtgccattttcttccccaactgct

SEQ ID NO: 4085 - DNA, 1835 bp, Heterodera glycines
tgaaagaagtgatttgtgatggacaaaaaaggaaagtcctaaattttgtacattcaatcaaatggcagattattaagttttattaaaaaataaatgtcggattttccaacccatcgatttttatgtgcgtatttatcaattttttgttgcatttgtctcatgaaatgaatatttcctaattgtttgtttatttgcttgactatcaaaagcgatcgatcagtcatcgaatcgaaaaaaaaggccggcttcaaaattttttttgtttatattttaaaattaatttcaattattcctaatttttaaattacaaaaattgtttcgggcacttaatttatatcataatttgaatagatgttaaaacaatttttttctatgattcgtcttcaaaacagaaaaatggatgaaataataattgagcagtttctatcgctgtaattccgtcgccaccaccgccttctcctccgctttccgctgctgttgttgttctgcgaggtctttgaagcccaactttggccattcgtcccggtccatcagtccgttgtccatgcggcatttgaagtagccaaaggcgcggtcccggcactccgaattctgtccgtccttttcctggggaaagggaatttgtaattatttaaaaaagtggaaattgattcccaccaccttcaaacagcacaaatactgcagcatctccaggtgacagacctaaaataaaccagggaaaacatcaatgatttaatgcaaaatgagtggcctaatcggtcggcccttcccattgtggtaattagctaattatcccgcaaaatacaaagcaattagttaatcagtgaaatgcccgcctgctgataatcaagtgggaaagagccctttaaaggcggtgtcgctgcagcattttgagcaagtggcgatgtgagcggagattgcatgggataattctgtgccttaggcaaaaaacaataaaaataaattttaattttgtttttagagctaattaaaaaatattcgcggttttgaaatttcaataaatccttacgatcgaatttatgttcatgtgttagttattttagttatccatttattgggttcagcaaccatttgacacaaaagtaaatgtagggaaaacaataaaacagcactaattattttcaaaacctaataaatttgttgaattttgaaataaaatatgcaagtttcaacaatagacaatggaaacaaaacaaaaaatgaaaacaaatatttttctatgacaatgcgttttgctccgtctccgcaacatcattcttttgaaggagtttaagcaggtgaatgtgaccgctgtccagcgcaactgccaactgacgaagaggtacaaggggagcagcagcacaatggcactccgataattccttgaccgttttagcatttggtggcacggcgttgggtcgccagctgacacagttcacttcgctgtccatgcgcaacgcgacgagcagcaccaacgcgcacatttcctggtccacggtgaacagccggacaaaacagtcgccaccgccaaccgctaaatttgaaaaataaccatttaaaaatttaaatttcaattaaaaaacgcacccaaaattccactatcgctccaggccactgtgtacaagggccaacgcgtggcgagcagcaacgaatgctccaccactttttgccattgatcagtcagtgcatttgtggccgatgatgaggtgcaacaacgcttccaaatccgaattgtccgatcggtgccaacagtggccaaatggtcgcccaaaataggctcaaaagaggccgaccaaaccgtctcttcgtgcgcgtcttttatctgtcaattgggt

SEQ ID NO: 4086 - DNA, 5209 bp, Heterodera glycines
catttgcccaattggggaagagaagggaaagtgccgttcttcgcttttgctcttcgtctggcccattacacccatcgatttcctccgccggggctgtgccgttgccaatggtgagggggagggagtgacgaggaagaagcattggtccgtccgtccattctttcttcctcaactctctcgcgtcactgcgctattttcgccgctgctgctgatgagcttttttacccaacaccacaccaccaattccgcaaatccacttcccctcccccctcccttcggcttttcccccctcggcttaaacttccgtccgtcgttcgtcacttttctgagaacgtgtacataatttacactttgaaattgcacttaacaatgccgttgctgcttcttgcttagtttgaatccttttatgagagtgccgtcgccgtcgcgaggacggcattcttttttgtttggtgtgttaatttgcgccgttttgaaagggcggcagttttgatcccctgagggtgggaagacacagtttcacatcatttggcttcctttatgtgaagaggataggggagacaagtccgtcggcgtttacataatatacaataaatggggactaattactcgccaccaaaatgccaaagagtgaatgtgatagatgatgacggaaatttgccccggaaaatagtgccaaaattggagcagagattttggaagtgggaacaaatgacatggtaaataccgttttctgcaacagttgggcatgctgtttccaaatatgcttaatccctccccgcccctctcaaatcccattggcttttccattttggttgctgtcgaagagctttgaccggattaattgttgatcattcccacccaatccgtgcgctttatattaataatatccgcgcgtcatttccgtcccccgcggcgcttcgcatttgttaaatgcttaatgcccttcgtccactcgccgctcttttgctttttgttgttgttgttgttgttgatggtgatgattgacttgtttgattggtggcagtgaaaggaaaacatgctaataatccctcccgaaagcaatcggagcaattctcattcccccggggggagagcgcattttttggtattggaagccctcactcatatcggaggaaaggatttttggcactcatttctgccggatgcataaatttgcccattatttccgggttcaattaatttggcattcattccccctaaaaaaactggcaatttattttacgcttaattttaggttttggctttccttatggatttgttctgcttttgcctccgatcggcactttccaccctttttctcctcctcaatttgttcttcttgccaactgtacaggtcagaaaagaaaccaatgattggcttccatccaaaaccgagaccaatcaaacacaggagagtgagcattgacccaagaataaaacactgaaaacagtaaaatagggactcaaaatgtttccgaaaatcgggcacaaacgcgaaattatcccaggacacattgttgtgtggctccacctcctacgagctgtcgttggatccgacacggccatcgacgggcggcagagcgaacggtggcatcggtggcattggttcgtcaatggcaatgccaacaagttcaggagccaaataccaatttgtggtgagcatcgtaatgatatggtgaattaagacgtcgaaaaaatgtcgagacgaaggctttacttatggccaattcgaacctcaacacgctaacagcgagagggaccctaaggaaatggccagacaaatttatgtgcctttaaatcccaaaatcctaagatttttagtaatttgccaactaaagccacattatgggctgagtttggacttcataaactagaaattttgtggaactatgaatccaaattcaaaaatccgtttcttttttgtgtctttttaggctttaactttgtttaagaattgtccaatcgtcccgcccgtttcagcgaatgaatgtcctcatgcgaaatgtgtgcgatttggtgcctgaacagctcactccggacgtggtcagcagccgactggtgatcacacgatgcgaagaatgctcaaaagtgcgttcatttgtggcataatgccaaacaatccgctcgaatggcattttcagtgccctcaaaagttgcccagcattcagcggatgctcagccagatcagtcttgatgccagcattcagtcccttctcggtatgccctaattgttggccaattatcggccatttggcctttgttcagtgattttggtcaaagacttcgaaagtgcgcgtggcattgctcgtcttgcgcagcaggacccaaccgtcaaatttgtattcctcgaagacgacgacttggactcgccgaccgtttgcgaattgaccgactccaacgacggcagctcgctgaaggacgcggactcgctgaaaagcttctcaaaaacatcggtcagctgatgttgggcataaagccaaaccaatccattgaaaccttacaaaaccaatcattccgacagtgaaccatcggcggaattctttaagtcaaaatggggatcatattgaagagacatttttgtaaaaatttcccgaagttagtggatcaaagagaatggcaccgctctaatcggtcaacccggcattggtcaaaagatcccaacccgagatcactaccagggatgtgcgaaaatcacaaaaaaaaatttttgtatacgaaaacgaaacaaaagaggcattcgacacgaaaacgaaacacgaaacgaaaaaattttggtagacgaaaacgaaactcaaaaagtgccgaaaatgtaggacgaaacgaaaacgaaacgaaatttcgtccctcgctgatcactactctcatttatcaatcgtgattttgtttcaaataaatctatgatcagctaattttgccctaaacatttgccaaagttcaggtgctttttgtcagcatttcgttcatcattttgatggtcatttcgctcgcttggctcgtcttttattacgtccaacgatttcgctacgcacacgcaaaagaccgactgcagcggaggtaaaagagacaaaatttgaaaaaacgacattcccgagattcttttttcgagactctgatcgatcggataatagtcgagactgatcattttttatcccggcttttttgtgctctctcaaattctcgtgaccatttctaaaaggacaaaaagaaaatccgccttttttcagactgtttaacgctgccaagaaagcgttggcccgaatcccaactcggccagtgaaggcgggcgacaaggagctgaactcggactgccccgtgtgcatcgacccgtaccggcagggcgacatttgccgacaattgccgtgtcggtcagtgccaaaatgaaacaacgaagaaaaaatgactaattacacgaaacaaaacagcacaaatgattcccaaattctttagacacatcttccacaaaagctgtgttgatccgtggctgttggagcaccgaacgtaattaaaataaatgaattaaataatcaattagtgcggagcacgggaaccgaggcttttttggccaagacggaccacccaaaagacattggctaatttgaaagtgtcgaaaagttggcattcctaaggccttttaaagcaagagaaagcaaagaaactgaatcccgtctcgagactaaaaccaacattttatcaaaacgaacgaaaatgccgaattctctggcactaattgccgttttattcataattaaccgcttcttctgtcaattaaaaggtgcccaatgtgcaagtcggacattctgaaggcattcggttaccacgtgtgcaatggccgacggcgagcccaattctcggcagggatggaggaggacggcgcgtcgggggaccacgacatgccccggggggatcggctgagtttggacgccaattcgacgggcagcgagtcggccaacccattccccgtggtcaccgaagtgcacgaccctttcggcttttctccgtccgcttcacctcaactcattcaggtgtctggacactgccgttgagggagttggagttcgagagcgagaattcgagattgatctctcgagagtttctgacgtctttttaagagtcacaaattatgtaaacagatagaattgagaagtacggcactcataatgaaaacggcattctgacaaacattcgtcgtgtctcccatggaccatttgtcccattttgacagatggtccagcaaagtccccgctgcattcaaattgtcccactgacggcggtgagcatagtgccaccgcagcatcaatcgcattgcgcacttgtccagcaggcgtccattgaacgccattccattggcactgagtctgcggcggacgaccatcatgaagatggagcagtacaacaaccactacagcaagaacctgttggtcaacaccatcagcaacccgtgcagcacagtacctccagtggtgatcagtacacctcggttacggtagccgacagcgccacaaaggcgacgaaacggcccggcacatacgctggcgcagcatcgtctcctggcacggccaacagcggcggtgcgttggcactgttccgcgcggtgaccgggcgacgccaccacgtggtcaatttggtgcatgtccgctcgcgttcattcagccaatcgcaagaggccagcggcacggcgccggacgctgctcaaagaggtaaaagcgaattcgcacgcgcgcacttccgcttcgggggatgcctttttttacgagttctttttgcgccgtttttgcaggcgaatcggcactacggacggtaattccgacaagcaattcggcaatttacgggttcggcaacggttcgactgatgcggcggcgataatttacttaacggacaaccgaggcggcacggggaggagaggcatcgccccggaggggcgaacaacggggggcgtcgggacagcggcggcggcaagatcaagaccgcaattttggagatggcgctggaaggcggcaatttttcccgtgcgcggacgcaccgagcggattccgccgaaaatttgtggcgaatgcggcgggcacacatcgcccgcaacagcgcgggaaaattggtgggcccaaaaaagggaaaaccggggcccaatcccatgaaacacgacagcggaaggggacggaaaaggggaaaagggccaaaaaaaaacggaaaaaaaaaaaaggggaaaaa

SEQ ID NO: 4087 - DNA, 2218 bp, Heterodera glycines
  unsure (1)..(2218): unsure at all n locations
caacaggcggcggacattggtggtcgcagagagggaaaacggggcccaaaatcgcatgagacacgggacagcggacggagcggaaggggcaaagtgacgaagaagagcggaagtaaagagtggaaaaaggaaaggatgaacgggtgaaacagagagtggaagagaaagagagaggaagaggaaggactgacagatgaaaaagtggaagagaaagagagagagagagatagaggaagaacaagagtgatagagaagtgagagaggaagagaaacagagcaacagaagaaggacaaatggataaggaagaggaagaaaggaagtgaaaattttgaattagagaatgaaaggagaggagaaggagattaatgagcaaacaagtgattgattttattgtgtacatatataatacataatagcattagctgatcactgatcactcttccgtcttttcccgtttggcttgcctattcaatggcatagcttgaactttcgtagatggccaactaaatgggggatattcttaattttctttttgcaaatgatgctcgagattgggcttttcttgagtcctgaggctttaagctttgactggaattgatttgggaatctgttttgggaggagggaatcgtaaattgcactgaaacatactttcagagtttattggtttgacgtgggcggatcaaaaattgtgcaaaaaaaacccgatctttagcattgtgccaatgtcaacaactcaccatcagttttgacttcaacgtgcttttgtcccggtacggcggcaagtccaaccggttgaagcacgtgtgcgccctcggcaagctttcgccctcgccccaccgctcaatgcaaaagcgttttggcccatcggaacccctcaacgccctgaagccttcgtacggcacactgcaaaagagagaaaggaaaagctgcagcagagagtgagtgtccatgaaaaacgttttggtctcaaaaactgatcagaaattggcacgaggaaaaacacgatgccaaaaattaggcatacgcaattaatttgcgcataaattactgatcagaagctaaagagtgtctgttacctcgaactgccggtggcaaattggagcagacggagccccccccccccgcccttcagagcacgacaaatatttcacaaaaaatttgaaaaattttaaatccattccttcgggggaccgtgccgggtgccgcggggtaagcagtgctggttcgtttcatcacggcaccgaaccttttggctagtcagcaatcgttgcttaacttgccagatcggacgggtgcgcatgattccactgttccaagcaccccaccaaaagcaaaacgatataaccaaaatataaggaaaaattttaaaaaaattttttctccatcttcctttttgatactaaagcatcagagtgctaaaattgacttgtaaataaaatttggtgcgctttagagcattttctgaaaaaatatttatgaattaatttttcaaaaaataaataaacagttaaaaactcagaatttctaaaaaaatttaaaaccaattacaattgtcattttttcaggttaagttagtcctgtaccggggagtatgcctataaaatttggtacgattttattgcttattgaaagagctagagccgaagaaaatttttttaatttaagcctaaactttttggcatgtttaaaaagcaattaaaaattttattcatctccctttttgatagtaaaagcatcagagagccttatttaacttgtacataaaatttgatgcgtttcagagcactttctgaaaaaatatttatgaattaattttgcaaaaaataataaacagtgaaaaactcagaatttctaaaaaaatttaaaaccaattacaattgtcattttttcaggttaagttagtcctgttccggggagtatgcctataaaatttggtacgattttattgcttattgaaagagctagagccgaagaaaatttttttaatttaagcctaaactttttggcatgtttaaaaagcaattaaaaattttattcatctccctttttgatagtaaaagcatcagagagccttattaacttgtacataaaatttgatgcgtttcagagcactttctgaaaaaatatttatgaattaattttgcaaaaaataaataaatagttaaaaactcagaatttctaaaaaaatttaaaacctgcaccgaangtactcactc

SEQ ID NO: 4088 - DNA, 3282 bp, Heterodera glycines
  unsure (1)..(3282): unsure at all n locations
atcattcgagagcccttccgatgctctattattttgcataattccaaaaaatttgatcaattttgaacaaagttatggccaaaagtacacatgtggcctggttttttgaattcttctagtcataatntaatatcgctttctattttgtttctttctttaaattataaaacgatggcaaaacgaaaatcgaagcgaaaagcgccgaccaaagcgaagtcaattgtggcattggagacgcagttcaattgtccgttttgcaaccacgagaatgtgtgcgaggtgaaaatgtaagtaaaaccaatcccctctctgtttaaaccagcaaatccggtgttttcgttatttttgttttaataaatgggaaatttgttcatttctgccgtcttttagtgccgttgttggctaagcgccgtgcctttttttgtgccgatttaaaaaagaattgacttttagtgttttatgctaaattacttgtttattttgaattcacaccttccaggaaatacgtcattttacatgtttattttaacactcaacttatgcaatttagggaccgtgaaaggaatgtcgggttcattcaatgccgcgtttgcatggaaggtaattatttgactcggtgattactaattgtatggtgacacacaaactatgccaaataagcgtaccgaaattgaaattaaactccagtttaaaggttttcttttttttctccaatagatgttttataggtactttacgattttacattttttggtaattttttagtggttatttctttataaaactgtaattatagtcccaaatcttcctttttacattaatttactacttcaaatatcggaaaatgaaactctcaacaacaaaaaaatcccgtaatattttttgtaagtaagttgcaaacatttttcagacttccagtccaacatcaccgctttgtccgagccaattgacgtgtactccgattggattgacgcgtgcgaggcggccaatcagtgaaaaacaaaagtggacaaatcaccaacagagaacggacattgtgtgcacagaccagggatcaccttattattcactgatcatattggcattattttccaacgcatttttttttttgatttcctttttccattaaaagtcgtctcgtaattcgattttccccatttatgtgtatataaattttgaatgatttttggccatcctttgggaggccattctcggtcttaaattattctctctcccggcttggcccaaaatggccaacaatttttggcattttgatttttgtcaatttcgtctttattacctttcccaactgagctgctgaattattaaattaaaatgagtcattccgtttcatcgtccgttacataattttgtattttgtgaatgcgttgttatcaatttgaattatcaaatttcctaaaatgattgattatttcggtccgatagtttctcgctcaaaaaatatcaattaaattttttcatcccgaatgcttaaaattttcgcagagtttggcatttaaatttcaaaattaatttctgaaaaagatggcggatgattcaccgcctccgtcgactctttgccattatcagcagcagccgaatgcttcacttaaatcgcacattttcgatgaaagcgactgctctttctcagtaaaaaataaaattattaccaaatgtaccgtagtaccccgtgtctttccgcgtcgttaccgtacccccaaccgtccccaaaaggtgcttgaccagcgcctgctcccttccgcggtggaatatgtgcggatccgatcggtccaggacggatacgaagcgatcaaagagatgaaggtgggagaatgaacgaaaaccaagagggatgtttggaccttgctgctgatctgcaaaaatggctaatttctgatcgttttgccgatttcgaatgagtgatcgttttggtcccacccttgatcaagaaactgatcagttttttttcatgcatataatggcttggtccaatcccgatcaccccatctcactcattctctccctgctgagcgatttgtccatcactctccgtttttaggtccgtggcgctcctctgatcggtcagttgccgtcggttgtttggattggcactcctttccaagatttcacttgttttggcactggcactctttcccccaaatgtccctcgtttttgcattggcactccttcccccaaatccctcgttttggcattggcactcattcccccaaatccctcgttttggcattggcactccttcccccaaatccctcattttggcattggcactttcccctaaattccccccccccaccatttttgttcccaaatctctcccaacccaacaaaatccatcctcaccagcaaccgttggaatgttctcattactcgtcgatgtaactgcttcttctactgctactgatgaacgcttttgctccgactcttccgtccaaaaaacatttcgccaatccgtcgaaaggaaatgccaaatgcttttgtccgctcgacctaccgcaattaatttggcaaatgccttccacgaactgatcgactttctaaagaatgatgaggacaacaacagcgatgctggaactgaaacggcggcggagatcaatcggcggcttaaaatacggtggaaaatccactaaaaaaatttaaatcccggagaggagaaagaccaaaaaaatgaggctttaattgggatttaaatttaaaacgaaaaaagcaaaatttgttagagcattcacggtttggaagggctgtgccaattgggcgagttctctttaatgttctacaaaatgccaaaatattttggcacttctccccccccctctccacagactgaaacattttgtgttggattggcagtcgcgcgaaagtgctgaaaacgtggcactgctacacaattcggtccaggcggtactcaatgaatgtgcggcaacaaaaaatgttggacaaaatgacgacgacaacaaaaaattagtggtgatgacaatttgcaacacgggacaattggcaacttcgtcgttgggcaccgcattgggtgtgttggaagcgggcagagggggagaaaaaggtggcactttccggccactgagtgccgttgtcggactttgtcgcaattgccagaacaaggaacaggactggaacatgtcaggactttacgggatctctccatgtttttgctttttgaaaatttcatccggcttcggcatccggaaaacgggggcttttgtacggaagttcagtcccgggtgccgagctgaatgatgcacctgact

SEQ ID NO: 4089 - DNA, 3225 bp, Heterodera glycines
ttagtggccattctcgtcctccatcgtttgtttctcgatgacccctcttccctccgcctaattaggcgtcattctcgttctccatcgtctcaaccgtctcgaattagcgatcactctcgagactcgtccgtacaatcagggctctcggctgaccgcctttgagcttcagcagagcggcgtgccatttcgactgatcgcggacagtgcagcggcgagcgcaatgcgccattttggggttgacgtggtgttggtcggtgggtgatggggatgaagcttggcacaatataagaagcataaagaattttaaataacaattacacccaaaaagaccctccaattgttaagcctgattttggcggatgggccggcactttgaagaaaaggcccggaatgcttaaggtatacaccagggatggcacggaattccgatttccgacatttttggggcctcggaatgccatccctggtatacacaaatctcaatttttattgtttaaaaatgtgtgccaatttaaaaattgaattttcaaacattaataaattccgggccatctgtgccggagagttttcagagtgggtccggcccgaaggaatgtggcccaggccggtgggtcgccccatgcaaagaccaagcggcactcagatcaaacaaagtgtgccaacaaagtccgcgttaaggcgctgatcaggtggcacggaacggggacacggcaaacaaaatcggcacttatgcgctcgccgtgctcgcccactaccatcgcgtgccgttctttgttgtgacgccgatggcgtcggtgaacggacgaattgctagcggctgcgaaattccgattgaggaacggcccgcgcaggagctgacccaatggcacggtcagtgcaggatgaaaaaacatagagtttttttgccaggtttatgggtttcaacaatggcaccttctgggcttttataacatggcacttttcaccgcccagtttcttttaatttattattatttaaagtcaagaatttaaggggtgcccatttgtccgtccgattgttctgtgtggaacccggcatttgacgtgacaccggccgaactgatcaccaaaattctgactgagaagggcaatttcagcccgacggaattaactgatcaattttaatcaatttttaattgtttttttaaatcggttcttttaatagttcatttctcattagtgtttggcggggcatttttaaacaaaatcacggcattttcgctaattagtgaatgagaaaatttttctgaaaacaataaaataataattattaattttcttttaaaagactttttctacttcatcatgggatttgtttgatttaagaatttatccgaaaaaagattttcagggatccttcaaaaattcattggaataattttaattatgattctgcttctctcgaatccattttttaaatttttaattaaaacaaaattaaatacaaatgaattttttaataatcatttaattgttgttgcccaaacgcgccaagaagcaagcatgaagaaaaaggcctaaactttgttaaacaaaaattattttcattatcattttttcaaaccgatgaaaacccatccaaaagaaaaggcccattcaatgggagggaatagaggaaacagctgaacaaaagtgaacatggcaataaccttaacaattaaaaatacctcttttaattgcgcataattagccgttaattaccgctccaattggcagccatttgccctcgaggggatgccgcccaatttgttgttgactgtaataatattgcccacaatcagtggcggtgctaccgtagtccacacggagtcggcacagccatacgatgacggagcatacgatgccaattgaggagacaagtgccaacagtgggagcagtggcagataatcggcactctgaagcacagaagacagtgggtttttgttgaattttcgggcattttccagcaccgtaccgcgttgcgcagtgccgcgtgcgctgccgcgcacaccgccgcagctgagcaggcgagcaacagcatgcgttgtgctgtaccgcacgcggactgctcgtcacgcgtggcggccgcctttgagccgctttcggtgcgacacgtcgcggcggcggctccgcccgcctcgagccaacccgggggcgcgtccgcttcgtaaatgtggggaccttgaaaaattccatacattttttttttggaagttagggtcggagagtatttgtctaaaaataatatttatttttaggcttttttgcaaattatcgcttttttgtgattaaaaaatgaaaatttatcaaaattttcctcgcgttttgtcgacacagtatgacacaaatgcaacaaaaactttcagaattttacatcccatttttggccaaacatattcattgacaaatcgtgactaaatttcaaaaaacctggcaacaaatataaaactaatgaacaaaaataatcgatttaattaaatattaattaattgattcgaaaatgcaccggggaacggtacggtgtgtaccgtacgcccgttgactgtcattgtcgtggccattgagcacgcggcacggaagcaattgtgccgttgttgttgttgttgctgcggttgttggccgccattctgctggctgggcaaatggcacgacgaacggtgggggaagggaacattttgaatgctaaaaattgaaatattaaataaattctttgtgatttgcgcattatcattattattttatcataattcgaataaaattcaaatttaaaaatatttttaaaaaattaaaaataaagatttactttaaatttaaatatcgcatttaaattttgtttttttcgcattttttttccaattttgcctttgatatgtctgttttaatgggttgttcagctccaacaatggcatgtcaatgctttgcggcggttgattctccgcagcactttcggcactttcgagtcgccaaattcgttcgagtaatcgttctctctcgcggcactcgcgaaaccatgcctaaaggggcagcagaaatttcttggccattctcgacaattggtcctagaaaatgccggcttttgtgtggcacctcggcgatgttgttttcttttttttattgctgctaattagtgcccctcttatcgattttctcgcttccttacaatgtttacaattagccaagaatcacttcaaattgctttccgtcatttttcttcaattagtcctaat

SEQ ID NO: 4090 - DNA, 2677 bp, Heterodera glycines
  unsure (1)..(2677): unsure at all n locations
cgcgccaaactcttatttctcattagaaaaatgatacaaaaatcacaaaatttgatgattttttggtgaaaatctgtcaacaaattttatcaaattttcaaaaattttcccggcggcgcctgctgacgccgcctgccccctcttcccaaaaagtttttttggaaaaagcgcgcctcaaaaaagcgttttattgatttttaaatttggaataaaattttaaaaaatgatttttgctttatgattttaactattaaaaagttgtagaaaaaatttcgcttttcgcatttcgcattttcgcatattttggcttttcgcatttcgcttttttttcatttcgcatttttcagtttcgcaaatttcgcttttcgcatttcgctttttatttttcaattaggcccatccctgttccaaataatgaaattgccaaatattttctgaaatataatattaagttactttaatttcttttattttcaataattaccttgaattttaatttttattaaatagattatacttttaataacatgaaaattaatttttatttatttgattaatttatcttttataataaaattaaatgtcgaattgttggttttttttattctgaataattgtagaatttaattatgaaacttagttaatcttggagttatttaatcttcttttaatatacaatataaaatgcacctaaaatattcaaaaggtataatttttaacttcatttttaatatattttaaatgcacccgtgatacatgatttaatttattaatgactaattcctaataaatgatattaaatttttattccagcaagcgattttttgttggaattcttttaatatactccacgtcttcaaacacacaattttgcgatggatggtctcgttttgtgtcgatttgcaactaaggtcatttcaagtatttgtattggatcgtctatagaaaagatatttcaattattttaataaaccgtttttaattttttaaaattatatatttatttggtttccgccatgattgatcatattcagcatttatattttatgcattgagtgagtttaaaatacaaataactttgctttatattttttctaatttttattttattgttttatagcacacgcattattttatgcaatatttccttcatcgtttttaagaggttttgttttctcgtaaaaattatttgccttttttgattcgattttattttttgattattttttaaaatttaatctacaatatattaaaaacattttaaatctttatttattttattgtctatatacacatatttgtattcaaagcggatcaacatttactcaatttttaaacaatttctatttctttaactgaatttgtaatttaggtgctgtgaaaactttgtatttttaaatgcttaatattttacttagcttttttttctctaagtctataatttgttgctatataatacattatttttttaattggggagggggcagtgggaatcgatgaaaagacataaaaaatggaattttaaaatatttgaatatttattcattttatttatttgtaaggatatttatttgtaaattgtattaacatttcgcaatattacacaatattattttttaaagtgaatttgcaaattatatgctctgttaactgtaatattttaatacccaatattttaaagtggtttatttattttttcagtctatcacatgtgttttttgacgaaaaattcatgggtaatctgttttaataaaaaaaatagtgaataattttaaatcacttatgatatttaatttatttttcttttttattatgctttatatgtattttcattagaaagaattaagtttcactaaaactttggttcccatttgaccgttgaaaaaacaactgtttatcccgttactgctttatttaattaaattatattaatttaatattactttagtaattatagtacttttttgagcgttgatttattcaaaagttttaatttttactaaattgtttttgaacggaaatgcttttaataaacttcatgtccttgacacttcttgaatttgtgtcgagagtgccatattggaaactgtgaattgtgctaaaacttttttatttttacattgtatgaatttgtatatttttataaattgaagtaaagttgagattttttcattatcttatcttataataaatattttattatttattttgcgataatacattaattgcttatgtcgcattgaagcagattaacaggcacatttaagcggataaaaagggtcacatttaaaaaattaataaaacggtcaaaaagagaaaatttaggctcaggcaatttttaagtaaatattgtataattttaattattattctttggtctcgatttgaactcaaatccatcatctttttaacatcatcttcatatttcaaatatttaatttcatttataattgtacagattcatagtttttaatttttaataagataaaaataatttggaatttaattttttattattttactcttttctcgtattttaaataaaatatttcgtttattttaactaataatanattaattattattttttattaagtcgttttgcaaattctgttttatttcatttaatcagccaantaaaaataangtttttatctcatacatttaccattataac

SEQ ID NO: 4091 - DNA, 1402 bp, Heterodera glycines
  unsure (1)..(1402): unsure at all n locations
taataataaaagaatttatgtaaaaaataataattatcttntataaagaatttcatatttttttttaattgaatttataaaaattaatttcatattaatntaaatattcaattcttgtacatttcaaaattctctttttaattaataaaaggaataattaattttattttttaaaatttataataaattgcattcaatttttgtacctcttttaatcacttttgtacctcttttaatcacttttgtacctcttttaatcacttttgtacctcttttatcactgttgtacctcttctaatcactgttgtacctcttctaatcatttttgtacctcttttaatcactgttgtacctcttttaatcatttttgtacctcttttaaacacttttgctgagtacgaatatgatgtctattttaagtttcagaatttttggaattttttaaaaatttgaaaatatttgacaattttttggacctcgggtttttggcctaatatttgaaaattcataacaaatcgaagggttgatcaattttacagaaataaagccttaaaaatagataaaaatcaggagaattttcgattggtttggggagatatggagggagttcatattactcttttaacatgtattataatggtgaaaagttccagggaatttgaaaaattattgaaaaaaaatctctttctaaaaaaaactaaaaagaaaaaaaatttaatcctttcaaagaaaaaaataacgtccccgtaagatcgtttaggaggatggtatccttctccatgagagtgttcagagggatgggttccatccccattaggccttgtgttagggtctttgcgtcagccgacatgcacttggtttcaccttgacacattgcaattcaatgcaatggaaaccggaagtgccctaactcgcacgtcatggcccacctgcctccctcagtccagctgtcagcacttttttgaatatgtgtccgttttaagtgcaaatgagaacggggtgacatcataaagtgcgcacgcgctggatttattattgcaacttgagcattttcgttgcaacaatattcagcactttgactccgccttggccatcggtctcccttctgggagcgtacactcggacgttgttcccgtctgttgcccttgaaaaggcagtgtacaattgaccatgggaaaacacatccctttcgaggtcaattccgaccgtgctgattgtttggccttgacctttgagaatggtcatggcaaaggcaggtttgatgggaaactgcaaacgctcatattttatgccgccaggcgttttgtcctcgtagacattgcgaggtcgttcgatgaagaacttaacttggccaccaacagcagaaggttaatgacgcgaccgaccagacgatcgtcgccaa

SEQ ID NO: 4092 - DNA, 2929 bp, Heterodera glycines
ggagccatccccataagagaattcagagggatggagccatcctcataagagtgcttaaggtgatgggagcaatccccataagagtgtttaaggggatgggaccatccccataagagtgtttacggggatgggagccatccccataagagtgtttaaggtgatgggaccatccccataagagtgtttaaggggatgggagccatccccataagagtgtttaaggggttgggaccatccccataagagagttcagagggatggagccatccccataagagtgtttaaggggttgggaccatccccataagagaattcagagggatggagccatcctcataagagtgcttaaggtgatgggagcaatccccataagagtgtttaaggggatgggaccatccccataagagtgtttaaggggatgtgatccatccccataagagtctttagggggatgtaatctatccacctaagtatgtttaaggggatgggatcgttagggtctttgcgtcagccgacatgcacttggtttcaccttgacacattgcattttcaatgcaatggaaaccggaagtgccctaactcgcacgtcatggcccacctgcctccctcagtccagctggcagcaatttttgaatatgtatccgttttaagtgcagatgagaacgggatgacatcttaaagtgcgcactcgctggacttaactcgtttgctttattgcaaattgagcattttcgttgcaacaatattcagcactttgactctgtcttgtgcatcggtctcccttctgggagcgtacactcggacgttgttcccgtccgttgcccttgaaaaggcagtgtacaattgaccgtgggaaaatacatccctttcaaggtcaattccgactgtgctgattgtttggccttgacctttgagaatggtcatggcaaaggcaggtttgatgggaaactgcaaacgctcatattttatgccgccaggcgttttgtcctcgtagacattgcgtgttcgttcgatgaagaacttaacttggccaccaacagcgttgctgttaatgacgcgaccgaccagacgatcgtcgccaagttcttcaagaacgatgcgcgtgccgttgatcagtccttccttatcacttttgttgataaggagaacaacgacgcttccgaccttgagtcgcagacggtggggaggcatcccagagtctgtgcgtcgattcaacgctgccacttcggactcgatttcatcaatatccagtggccgctcgtcaagcggtttgtccgaggacaaatattcgcgcacttgaccaggcacattcgccatcatgatttcgttgatctcatcgcatgtgtcaatgtgtggtgcgaggatcagacgattgagcagctccttgtcatttccaagaatttctgtgcattttttgattacttttacatatttaatttcatttcaaattaaataaatattatattattaattttcattttaataaatataaatagttttgtttaatccataaaaaataaaaatttttaatttaaattaaattattttttttgtgaaaaatgttttaaattaaaataataatttatttacttttattaaagaactcctgtattttttaaattagaatttgtaatattaatttcttaatttcaatttaaataaatattcaatccctgtacattttaaactctctttttaattaataaaaggaaatttattttatttttaaaaatttattaattacattcaatttttaatcttactttttaataaacgatttccttaattatttaattttaaaaccatgattgtaccctttttaaccattattgtaccattccaacaatttttgtacctctccaacaattattgtaccttttcgacagtggttgtacctcttctaatcgctgttgtacctcttctaatcactgttgtaccacttctaatcactgttgaacctcttctaatcactgttgaacctcttctaatcactcttctaatcgctgttgtacctctcataatcacttttatacctcttctaatcatttttgtacctcttctgataaccaaaatttaaaaacgggagcgaagcgccggttcaagcccaaccaagtttaaaaacgggcgcgaagcgcccgtatgagtccaacaaaatttcaaaaacgggcccgaagcacccgtccattccaaaccatatttaaaaacgggcgcgtagcgcccgtccaagcttaacaaactttggaaaagggcgccaagcggccgaaaaggtccaacaaaattttaaaaacgggcgcgaagcgcccgtctgaggccgcgaagcggccgaaaatgcacatcaaaatttaaaaacgggcgcgaagcgcccgtatgagctcaacaatttaaaaaacgggcgcgaagcgcccgtctgaggccgcgaagcggccttaaaaccccttaagattttaaaataaattccaaatctctaaaaaaactcaatgcttatctaggtagcgaagctcccaaagcgcgaagcgctttttcccagctaaatagccgacggttcacgcacccgctagtttagtatttatactactagtccaattccaagccaaatgcttattctgttttagcagatttctttagtttgaatggcgatggagcataatattattattacaattttaagtggtcatttattaataaaataatatatttacaagcataaatttccattctcataagtgtctttattagtttgaatttttttttaatatttttactcttttatttggattataattttattgctttttatctttttaaaattttttatttcttttaagtataataatttaaaaaataccacttttagaggttatgaattattttattaattattgttgttataatattttaatgccttaaaatgctaaaagttttaaattat

SEQ ID NO: 4093 - DNA, 3454 bp, Heterodera glycines
tgggaactcgtacattgtttaggttgggcctagtcttcctcgtaattttgtaaaatacgagttgccttttgtaccatttgccattgacccttaaatttaaaccaaaacaaaaatgcattaatttacaagcatattttatttcgagtaagctttgattaatgaaaataagaaactaactttccattgaattaaacaattcattgagagaaaaataaaatccgttcgttagttttttcatattttcacttgaaaaattgtcttcaaattcttttttcatttttcttatttccgataattccaattttttgtctccttccttcccattatttttcactgtattctgaattttttgtctgattttttgatccttttttaattcatttgtcaatttttgggtcaaatgcgcaacatttttagctgccacttccaaatgtttgcttttgttcaattccaaacaaaatgaattgcgaagtttttgagcatcttccaacaaatggttaatatcaaaatcaaaatcatcaaaattctctccgaatttttcacaacaaaaaacttcagtggcatattcatggagccaattttcaaaaaatttatcttcaattgaaaaattaactgaaagcgcagagtccagcaacaccttttgcgttgagaccaaatctgaagaaatttcaaaatctttattaattgggagtggaatttgtgctggcttttaatgcccgaagcacaaaaaaaaattatttaaaacttgagttacgtctaggacaaatttacattactttattttgatgaattaagaatttgatttttattttagcattttttgaaagttttctttatttaaacaaaatagaaaacgcaccccaaagcattggacataaaatttacaaaaatggtccagaagattttttttgtttttgaataaaaatttctgtgggtagtaagtagaagaacctttttgacatagcagctcaaaaccgtttaccgtcgcacaaaaaaacgcaagagcaaggtgatgaaattgacttttaaacattgttcttaaaaaaataaatttttatttttttataattaaaaataattattttgaaaatatattctttagaaaatttattataaatttttaatattataaaacataaaaaattatcattaaaaattttgttttatattttctttattattataaaaattgccatttttatttccggccaaattatacgttacaatgtgttttattgcaaatcaatcaacgacacgtcataaaactatttttcattgagaaaatttttcgtaggggttcgtttttttacggccgcgacagctctgagaattctctatttatttttaaaatttcattgagtttcaaaaaagttatggccaacaaattctgactcaagacttttgaaattttgtgaccataacttttttataattttgtaaaaaaaatctaaattaatattctgataggcaacacttaaagctattggatggataccatgcaatatttcatttttgttttcttacccccatgacggaatttaagaaacgcgtcagcacgattattagtaatccttttatattttgacaaaatttaggcttatattaaaataacaataaaataaataagcagcaagtaatattgtcgctgtgtgtgttttatggcccgatagacaattgagaggggacatgacacctatgtattaattaggacagactggaccgcaaatgtgaaaaaaacccatttttcataaaatatctctgtcaactgttggctcaatgttttcgatttgcttccacgctctcatcttggccttagccttgcgtgatcagtcaaaaatttgactatttcgttgacaaacacttcaaaacgcgcaaatggacattggacaaaacggaaattcgacgcaaaatttaaaagaatggcgccaaagaaatctgaaatgatcaattccgatggaaaagcattgccaatcgctcaaaatgctttgcctaaaaaagtcatggcattcagagttggccccgtcaatgctcaatgagtgtccatcccttttgcacatcgatttctatgacggcattttccccgaatttccgcctgattacagtgccaatgcgtcggatggccaagcggtggcaaaattgctgtttacgcctcgtcctggcattttaaagtattctcgacgctgcttcccctgggccgagtgtttcggttcgaatgaagaaaattcaaagttttatatattttttatctccgtaaagaactttaaatatacttcggtcttagccaagtacctcaaacttgggtttaattacccttgaaattcttggcttgtataaggtcataaatttcactccacgaaattattaaagtttaagaaaattctctgatgaaggcgttacggattctaacataacatgatttctttatcaaattcttttttgtgtaaatgtaaagcattaatttttgtaaaatttattgctttttagtcataagcaataaaaaatattttttaaaaattccgtcatttttcattgcaacctgctgaggttttttcaacaatttacaaaattcatttgcgtcatcattaatttattcgctaaatccatcattttacctttgcttacatacgcattaagagggatatgtgcccaaatttttgcttgtattgcattataataaatttttacaatgccatttccttcatttttgccacagaatttgcgtaagcatcgctttgccaacgtatccattgattataatataaaagatagattgaaaacatataatacatgcataaacagaggcatatattatgcccatacaaataataataatatttttgttaaacaaataatgataataatcattaaattcacattttaattgaacacaaatatataattttcaagaaatgattgggtaaatttttttattttaaactttaacatttttccagttgagttaaaattttaacagtagaaattatagaccggcgcgggaagggatcccgctagggattttgcgggatccaaatccgcaatttttggaaattacggaatttgtgggaacttaaaatttctatttcaaattggttttatttagtttcttaaatttttaatttaatttttcgaaatttcaaaaatgccgcaccgccagggatcctgcaaattttaaatgcgggcaaaaattttgagttccaatcctcagcgggatccgcaaatttgaaagtaccggtctcaaatggtaatacttaacatttacattttatgaaatgcataaaataattttccaaataattttttaaccaattgtacaaaaccgagtgattcctgaggtccaataattttcagaatccgaattccatcccaaaagatccggaatttcggaatatgaacccacccagacccaatttttagattaataatgactactttgtttgttgtaataattttcgcc

SEQ ID NO: 4094 - DNA, 1994 bp, Heterodera glycines
atgcatggagtgcggcccgaattggtagtccggccttggtcaacccattccatcaaggcatttttgataataatttttacaacaaaatgcaccaaaatatgggaaacaacaacattagcacagaaaaacgcacaaggcatttgcagaaaacgatttcgcatatgcttttgactcggagaacaataacccaaatgaaggaacgaattttgaaaatggcaacagcataattaacaatgacataaagaggtatttatagtaaagccgtgaagtcccatacccagtgcttaatgagggatttagttcagaggagccctcttacgcgtccgtaattaggccccgcagggcttggaagggaagggatgttgatggatgcctgggggcgcctcccaggcggggatcgattggccattacactgaaagactcccgactgatccgactgtcctcctttggctggttatccgttgccttttaagcgcccctcgagatgggaggagccctatcggagagataaaatggggggggggggaagggtaaaggccatttccggtcccggccttacattatatagagcagaattgtaattattttgttcatgaaaacgttttcatggatttttggtgtcacgaatactggtaacttgggttgttgcccaacatacaggagagagaaaagtcggggagagaatttccgacaaattttgtcggggatggcttttgtcggggtatctggagaaatttgtgaccgaagcataaaatactatgatcagcttttcatggattgaaaaaatgatgccggaaattattttttgtacccattgtcatttttttgttttcctttaaaaggcatgaaattttcgggatcgcagattacggattcgaactccgggtcggactcgaacaaaaagtcgtaaagtgaaaattttaaattcatatttatttggaaaaagcaatttaagttatcatagtttgcagtattagtatctagcattttgttttaaactatagaaacggattttgactgttaaatgtgaattgcgaattttttatctttgttcgaattcgagtacggggtaaggaagtggtcagaataaaaccgaaaacaacccatacctattcaaacaagttttaaaaaattatcaataatttttcagaaatcagccaaagaaacaggcgaaaatatccgaaaatgggacaaaaatcacacaacagcatttacaaccaatgaacattaacaataatcatgaaattttggggccgagaaagcgtttaaatgaaaattcgtccccactgcagcgaccccatggaacagcaacagaaaatgttgtacaacaccaacagcaattattgcaaccattaactgttccgttgggcgccagaagaaagtctttaatggacacttcagccattctccagcaggcacaaacgcaacatcatttgcagctaattaaaaagccattaacggaggagcacttggcccaaaatccagcacatggcccagcagaagatgatataaaaatggaacatttactttccaagaaaaggccattaacggagagtttggccaattctccaacgcacggagcagccaaacaccgcgtaaaaacgcaacttttacagccaaagaccaaaaagccaggaatggaaagggtggccaaacagcacacacatggccaagtagggcaaagtgaacatttgccgcaaacgaaaagacctttgacggattacttggccaaacattcgacaactgaacatggtttgcaactgcgacatgtgcaaccaagaaaactaatgaaaacaagtaccacgaactcaattagcgcaaataatttaaataaaaaatggaactcatccaccaatgtgaatcatagtaacagcaaaacaatacgaacaaatcagtttaaccatggaagaaatgttgttcagcatgggaatgaggagataaatgcccctcaaaaaagtagtaaaacgaaattcgtttaatggaaatttgggca

SEQ ID NO: 4095 - DNA, 3512 bp, Heterodera glycines
ggaaaaaaaaattttgaagaatcccaaacgattttttgtaatttttttttttgataaaacaactaaataaaatttgaaaaaatgttagagtaaattgtgtcaatgctgattttgaaaatttcaattgggagccctgcttttaatccaatgaaaaaattgagtcattcttcttgagttatttttgggcctcagttcttatatcattgatgctgattttgattcaaaatttttaaatcaaaaccccaaacgtccatagaaaaatcatcaataaaataaaatttaggtttttcatgcaagtccaattgacgcggtggacatggacggaaaaccgctcataaaatgtgtggcgattaaatccgtcattcttgaatttgacaacgcaacgccggaaataattcagggatttgaaaaggaagagcattttctgatgatgtttagaaacaatgcaaaaatcaaacacatcgttcaccttcattacatgttggttaaattgaaaatatttaattttaaatgtttttaaattgaaaatattttaattttaaatgtttttaaattgaaaatatttaatttaaatgatttaattttttttattctaacaaatctgggtagatttgatttcggttccttattctttaaagtccaagtctttcgtgggttggaatttcagattttaaaattttggaattccttataaatttacaggccgaaaaacttttatttgactttaatgccttcgaattacatagagaaatgacattttgaaaaaaaactgtgcctggacgcgttaacctgggccaacctggctctaattttttggacaaaacccagagaaaatgaagatccagggaaaatccgagttgccaaaaaactacctgggcctgaacaggaaaaacacaggcctaggtccaagttcggtagtgttttacttggagttttttttgtgaaaactcaatgtgttgttaataaaataaaattaatacgttacgccaaattcaggaaaaaagattatgcaaaaaatcgtctcatcatcattttggagttgggcaggcatgaccttacgaaacgtatcaaattgatgcgagaccaatggaaaatgtattggggttcaaccgcagtgagcattgaccgccaaattataaaagtgctgcggcaggtgctcgcggctgtcaatgaaatgcacggaagtgagaattaaatcaaaatctttgtaaaacaaaaaaatgtttttttgaaggcacctcaattatttaagacccaaaatacgtttggttttagttagctaagcagaaaaagtgattaatattggcttaatagtaaaattttcgcccaagcgtcaaaaattatttaaaaaagtccttccggtttttttatgattggcatgatctctattaaaatttatttttatttcgagaaaattgggtaaattataaatttggatactggttgcaatctcataacaagaaaatccactcaactgacacttttgcctaaatacatttgattaaaagaggcttaatagaaaaattttctccttcgcgacaacaattatttaaaaaaaggcattccggtttttttttgtgattggcatgtcctgattaaaatatgccgtcgggggatgtttaaaaaatataaatagaaaataattttttttctttaattcctccgccgttcagaaaccattcatttggatttcaaagcagacaatttgctgtttgttgaagaatttaatgcttctgggcgtaaaattggcgaagttttgaaggtcatcgattttggcggaagtgaaatcattgacccattggccgaaaaatcgaacgaggcctccgcagtggccaatgtgtgtcgcgtgcgcacgtcaatgtggagcgatgaccggtacagtagcccggagcagaacgtcacttgtgccgagcaaagcacagacacgatagagtatacggtagactatttaaatttatttacatataatttacaaagatgtagagagaccctttgcttcgggagggggctaactcaaaaatatggtttttagtgggtgttttttccagaatcccgattagggggtatgttttttgattaattagagtaattttcatattattgtcattcattcaaaaacttaaagcccagacgctttccattataattattacctcttgtctttggtttttaacaacaaaccagaatattcaaatgctaaaaaaattatttacccccctagctatgcccttaataatttatatgaaaaattgaacaaacattaacgaattttgcttctgctctttttgtcggtttaatcacgctcagtttcgcgagacttttttttcaaagctttacacgctacccagtaaataatttttttttttattgctttaggtttccacaaaatccgacatttggtccattggcgtaatgttggtcgagtttttgttgatgacgccgcattttcctgaaattgatccaatcgcagaacgaggatccgatgatgctaacaacatttacaatattgtgattggcatcaatcattttcattattcaccggcagacaaaacaaacgcagtcaacaaacaggccactgattatatgcacaaaattcaaaagcttttcccgatgttgtcgtcgataataaaggtaaataatatatttatgcatgaacaaattgccaaaaaaatgttcggagatttttgcctaaaaatatttacgaatcgcttaatttctcattagtgggctgaatcgttagcaatttaactatttttgctggttttttttgcaaaattaaaaaattgtctatttaaaatcaaaaacttaatgaactgaaagaataaagaaatttaacattaaattagttctttaaaaaacacaattttttaaccaaaatcggtcagcctaaaattaaaatagctgtataaattccaaaattagttccttttttatgtttgcaatgcaaaaaaaaaaagattattggcacactccgtatttttaaatagctgaaaaatttagaaatattttttatataaaattaggcttgtctggtgattaacccaaaacaacggccaaccgcgaaagggattctccaatttttggacggcaaatgccaatttggagagtttgaaaatgaaaaagctgaccactaccaatttgatggaaagcaatacgggcaagagttggagagaaggaaaaaacgatcagtttcttcaatgttagatgggcaaaagttttcattgttttcacatgaaattttggaatcgccgccggaaatcaaattctgtgacattggaaatttgaatggaacgaacaattaatttgttttaattttttaaaatttttatttatttgtagagaccggattttttggtgctaaaaatattcaaataggtaataaaatagttgccaaaaaaagcgcaaaatatttgtgaaaataggtgttaaaaattggaaaattcagtcactttatgcacaaaaattccaaaatgactaattttttctatcaattcgcccgaacaattgcaatt

SEQ ID NO: 4096 - DNA, 961 bp, Heterodera glycines
ccccgttttaagtgtttttgaggtgctaaaaactcgctctaaattaaaaattgttcggagaaaatgtgattttcgtgcttctctcatcaagtactatcataaaaataggtaaaaatctaaaaatcaggtctctatttttttgttatataaaagtatttgtcagagacaatttattgttagtcaataaacttagtgaaatattttaatgcgaatttttccaaatggccaattagccattctgattcaattagtaatgcgtaaaaatccaaactatgcaaaaaagaatagacaaagaaattgataaaataaaaaaaaaaattcgtaattttcgaaatgcatgatatttccatcacaacattaaacaattaaccattgaacacattcgaaagaggaggtaattctccaaaaaaaaacggagaatttaatgccttcagggagcgccaggagctcagtcggttagttagagcattctacggtatggaaacgccgtgggttcgagtcccaccgggcgagttaccttttatgttcgacaaggcaataggtagagaaatcccaaaacaggttaaaaaggtattataaacatgggtcgagaagctccacaatgtgggaaaggtttttttcttgcttatttttgtgataaggcgtaacaattcgccgaaaaaataagtaattatctaaaaaacttacacggaacaataaatataaattttagtaagaaacaggggtgaagcgcggacagaaacatcacgcagtcgcggaccgcgcattcaaattaccgaagaccggccgaaatataggttgattgataatcgaacaaatattttatgttgtattttaaatatttaatacgaattttaatttcaaatattaaaatgcttttcgtaaaaagataggtcattattattactgaagaaatcactttttatcaataaagcaaatagtttttaaagcctctcacaac

SEQ ID NO: 4097 - DNA, 2562 bp, Heterodera glycines
ctttttccccttttgaccccttctccgcttccttcgctaccgtatgtccatcgaccgtacactgaacagcaattgcgtcgtaagggagtgctgcctcgcatcgtggtcacctcaattggctacgcaaacgttcacaaacttttgcatcgcatggacgggccaattgtcccggtaattagtctatcattttttgatttatttgggtatcaatttgattaactgcgctttaagtggtcccgttggtccggtgctttgccggtgccctaccgactgaccggctcactgctcgtccgcctggacgtatggacacgcactgagtatcgaccaattcgaaattttgtggcagtgatgcgcggaagagaagagccggaccgatgggtgatggtgggcaatcacgcggacgcgtggactaaagtgacaattaatggcaattaaaatcccgaaagaacccaattagtgttttattaactaactttagtaattgcaatttaaagggaagcattgacccggggacgggcacctcaacaatgatggagatggcacgagtgttgagcaaatattcagctatgacgggctggaaaccgaggagaaccatcgcattttgccaatgggatgcggagggtacaaatttggatttttaaatattagccataaactaattaaagaatttggcctaatcggctcaactgaatgggttgagcaaaacttgcatttaattcaaaaacgagcgattgcttatgtaaatgtggacaatttgaacggcaacaattcactcgttgttaaggtaaaagcgaaacaatgggaaaaatacagtcatggtcttatgtttatatacacccccatatttccccaattttcagtgtattttgggtgtcctgatcactatgaaggagtgatctggccaagttggtgtaaaagtcttttttgattagcatcaaaagttagcttaacaagaattatttcacattttttaggcctacgaaatactgattttttggggtgttgataaacatttgaccacccataatttttgcataattcatttgataaaatatactgtttaggtagaaaattctttcgagtaataaaatatatcattggaaagcccgtaaaaaatgctacaaaatacaaccaaaatttataattaaaatgactacaaaaacaaaataaaatggggatgtagataaacatatatatgaccatgacttatgtagtatttaaaatggaattaattataaaatataatttaatttcaaaaacccattttgggataataatttgctttttcagtcagtccctttgctgtaccgactgatcgcagaagcagcctcaaaagttgaacagccggtgaaatcggaattgaaaagtgggcgaaacactcttttggattcgtggcaatttcacaaccctcggccgactttgccaggggatcggtgaataaaatattcaaattaatccaattaaaattgtctttcacagctccgtgccccacatcctgccgcctcattcgggctccgactttcagccgttcattgccttcgctggagtgcccgtggcggatttgcgcatggaaagtgccccccaatactcgtacatgctctaccacacggcgtacgaaggtaaaaaaaaaaaatggaaaaagcatagcattttaaatttaagcgatttaaatttttttttttagttccttggcttaacgataattttgtggaccccgaaggggacgcatccgtcgcaatgggccaactttggctggaaattgcgcgaaatttggcggacaatatggtaaaagccgatcagtgttttttgttaatttacttaattgttttgcaacaagatcattccgttcaatgttgaagactatggaattgcgttgaaggaattttgcacaaaagcgaacactcaaatgaagtaattttggtacttttcggttttgtatatacacctcaaaattttaaaaaatatatacaaagttttttcgatggcacaaaaacaaataatttaaatggtaaaaaccctccgaattttgtctttgggcaaattattccttttagacatcaaaaaaatcggtacatcctttgttggcatatttttgaaaattttcggattgtacataaaaccaaaaagtaccgtaattctaaatgatgggcaaacaaaaaattaagtgcaataatataatataaatttcaggatgattggcattgacagtgccatggatgtgcaaatttacaatgaacggataggctttttgaatgattcgatacggcgttttcaagaaaaagccgtcaaatttcagcggcttatccatgtattatgaattcattcgttcgctaatgcttttccaaatgactgtgtaccgttaggccattaacaccggcgaccgacgcgtgccgctgcttcggcgtgaacagctcaaccagcgactccagtcgctggagcagtgctttgtgctggacaatggcatttccgctgatcggcccgcttttcgccatgccattttctcggcgccggaagaagcttcaaatgcgggggtagcaattaattaagactctagaggtcccc

SEQ ID NO: 4098 - DNA, 2170 bp, Heterodera glycines
ctcccatttgtcagatgcttctccccattttgctcgacccctccttcaaatggctttacgcgcagcgacgtgccaaccgaacggaagcgaaccaccgaatggaccaactcaaaatgggcttttcgttgctccaattttgcgtggaatgcgcaagagaagcattgacaattgaccagtgaagaaatcggcagaaaaaaaagaaagaaaatcggacaattgagcaaaaaaaagaaagaaaatcggacaattgagcaagaaaaaaaaagaaagaaaatcggacaattgagcaacaaaaaaaaccccaccacaacagcagcagtttctgttgctggtcgcaaatgtgcgagaagaaagtgtttcggtgacttttatttaatgttttcttttttataattaaaatatgttaaatgtttttcatttaatttggaaataaaatttacaaagataataagtttcaactttcatttctccgaataaaatccatacactttcgaaaatggaaatatttttagactaagaaattttatatgtataccaattgagatatttttcttaaattaggtacatattatattttttcagttttttatgttctcatattttaacttatgtaaattatattggcatttttcgagaaaattttcattttttttaaatcatcataattttgcaactaaaactgatttaaaggtagaatgtattatggcagggtttcaatctcaaaattttgaaaatcctcatttcagccataaaaaatcctcatttgccactaaaatgcctcaaaaaaatactcatttggaatgaaaaatcctcatttttttaaacatcataaaattgcgaacaaatcagttaactgtcatatttttcgtttgaaacaatcaaattcatcaatttcttgtcatttataagcattttgtggattccaaattgcacttgatctcttaaatttttttgcttttaaattgctctttttgtggcgcggttttccaaaaaactttttgggaatattgggggagggggtccggcagtgccgataggcgctgccggaaaagatttgtttgttaacaaattttgtcaaaaaaatgattttgactgaggatttttcgaaaaaatgtttaagatttgaagaaaaagttcgaatattttgccaaatatacctaatttttaaaaaatcatgcgttttgtcacttttttatcaaaagaccacaaaaatcctcaaatttctcaaaagaccacaaaaatacgcaaatcctcattttccaaaaaattctctttgaccctctaaaagacaacaaaatgagtaaaaaatactcagatatagaaaccctgtattatggtgattgtgtccatctaaaaatgaattggtttgcttaaaattaaatggaaaaataattttccaattgtattttgtgcccaatttatcggtgccattctttgctcattgatattgcgctatttaaagaatacaattataaaaacgtttttggttttcattaagtatttattaaaatgtgcatttttgctaaaataaaaaattcaattattttcattgctaatgatatccaataactaataatattataacaccttattcgaagcaaacttacgctaccaaaaaagtaatctatttaattctgtgttgaatgtataaatttaatttacgcctttttgccacttttcattgttacgtcgttgtaactttggcactcgtgccattcattttctgtccaaaatcattctatcgttcccatttttttcgatggaatttttcttttttgacccggtcaaattcgtccgtttctacaactgttcttcctacgatgtgtcaatggttcagctggaccggcgacagaagccattggtcggagcattgacagttgctcttggcaccattctgacggtttttgtgccggatttggcagtgccaactttcccttttaagtgcctttatttgccctgtctgttcgccctttctcgaccaaaactgatcagacagtcgtgctatcagctgatgttctttctcggccttgtcaatgtgacggagctttgcaccactgcaatttgtaccggagcattcgccatttttggcactgttttctgttctcagccgactttcatgttttggcacgatggttaggaacgggtgatttgaaaaattatgtatttaaaa

SEQ ID NO: 4099 - DNA, 4149 bp, Heterodera glycines
  unsure (1)..(4149): unsure at all n locations
atccaaatccctcatcacgggatacatcggattggacacggagtccgaagcatttgtaagccatttaaaaatcaaaaacatnttataataccacacaataaaattatatatttagtttttcccgctttggcctcggtatttcagcgccgcaattctctgttttaccactttgatttactcggcatttttggccatttatatttcaaaacgtaaacaagtaataactattggaatggacaaaaaggacaaaagtgtaatcccattaaatccttttttaattaagtaattaatttttcacagatttttgtccaagtcctttggctctctctgctcagtttttccgtcaatttggcctacacctttgatcgggaagcttcaaatcttccttttggacaaattatcgtcccattttacacttacggattcattctttaccaaggcaaccaatcaactaattaccaccccaattatttatcaatttatccactaattaattgttcagggagtccccccgtgatttatttgctgcttaacaaaacgatcagaagagaactgaatttggacaatacccccaccgtacacccaatagggataacaaatgttaagccgttaccgatttccgtgaatgtgtcaaagaatgggatgatgattccggtcaaatgaacgcctaatgatggatatcattagcattgaaatggaggaagaatttggccgaaagacaacataatgctttttctcttttttgactattatgtaaaaacataaaattgttatcttgcaataaggcctagcaaataaattcaaacggacggagtcaattaatcggaaaatggagggcatttgctaattaagccaaaaacgaaatcggctgcagaagatcaatataacttttctaagttttccgtaaatgtcggagaggcgtggacggggggggcactaatttaattcaaataaataaagtatttagctacatccacttcggcttttttatatgcctttttttgaccgactttttttatatatttttatcgcataaaaattaaacccaattctattctgtatttttatctgtcaattatattgtcataatgtgcttgtgttgttttcactgttggtcattctttgcgatgaaataattgccggcgagtggcgcgcctaaaagaaatttagaggatatttgtgaaaattaaaacatttttaatatttttttccaaaaattccattactaataaaggcaatatttagtaaaggttcattttgtaggggcttattttttataaagccgtaaaaaattaaataattataaatgccaaattatttttatgttaattgttcgctctcttctgcccacccaatttgtgcttttcgatgaattgcttcagcgagaatttcgcccgcgtgttaaacttcggcacggccagccgcttgccctggtgctcaaacagtacaattacggtagcgatgttcgcccgtccgcggctgcggcgccggcgaaccgtacggctgctggtgctgacccccgttgatgccctcctaaagtggccgaaatcagtggcaaatcaacggaagaagaagacaccatccctattcaagaccattagggtgatgggcacaaatttaaaacaaatggcaaaaaggaatgatgattaattcaatgaaaaggcaaaaaggattatctgccattttttaaaattaattttgtctttatattaatgattaattgcatttaaaataaaattttactaattttttttgaattagttgcctttttacttcaatttaaaaaattttcccaaatttctaccaaaatgtttgaagcgggatgttgaccaccagccaatggagccattcggccactgatgggtttttcctcgacaaattgtccggatcttgacaatgcaaaaacaattttgaattacataaatgtttgacaattagtaaattattaaccaatcatcacgagggaaaaggtgctttccgggtcaacgttcagtgtgacacgaggggcattctgcgaaagaaaatataaaacaataaattaaacagagaaatgcgatcgaaaatttaaaaaggaaacgaaaaagggaaatttcatttttttaaataaaatttttcaacaaaatcaagctttaaagtatttttaaggcctccggtaatttcagtaagcaattccagcttagaaagaaaaaacaaaacattaaacatttttatggattttttattagttttaaataccctaacaataataaataaatgtttggcggtgccggttgggccgctagataaattttgaagaaatttttgcatatagtttgatccaaaatgaccatgtatagactttggaaaaaggattctgggctgaaaaaatgtaaatttaaaaaatatattaaattttaaaattttaccttcaaattgcgcaccgaaaattccttgccgggttcaacgggaattccatcgaaaacgacctaaaaagcattattgtcttttttaaattatttatttaaattcaatttataaacatatacatttaatttttgttgaggtgcttctggtaaaatttgaggcacaatttcggcagcagaaaatttacttgcaatttcggacattttaaataaggaaagtattttgtccaatatcagctaataaaataatattaccaacattaattttgtaagaaaaatatatttccatttttcactttttaaccaaaatggaaaattacgtccgcttttaattatgtatgaatttttctttggagaaaggttttaaaaaataaacaaatcatccacccgttcgatcggtcggtcttttgttaatggctttttctttgcacatattttttttgccaatttgtttgttcattaaaatgtgatcagtcagttctgagaatgttcggtgcttttgctcctttctctttctttctttctctcttccgttaatttggtgatcggacgctgtttaaatgatcgaatttcgccgtcgaattcactctttggggctttttgaggttgaaagatgaaacagctgactgactgattgaaattgaatggaaatggtaaatgctgtgttgttgtgattcaaatctgctgaaccgccccaaaaattcattgacacggaaagaagcaaaagggtgtaaatgaaacaaaaaaaaaaagagtcgctgatggactacaatgataaatgatcaaaagtaaagaaatcaatgaattacacggaaatacaaaaaaaattataattattgtaaaataaataataaatatataaagatacctagcctaattacttggataaaatatgctctctaacaaaatgtacgacatgaaagactgtttgctccaagagaaggcagagaagagaaaacgacagagggaacacgcacaacgcggagagcagagaaggcagagtaaatgaaaatattgtgaagatttagctctttctcttcccttcctttcaacccatcgaaaaatatgcttcttattttctctcctttatataattcattgcttgatgttcatttgtgcgatctctgtccggcgccgtttcctgccccggtccagtgcggcgctctcggccagctgctctcacccggcacaaagcgcccgtctcagtgtctgccctcctcctcccaattgtcttcgcccacattctctcgcctgtccctctgaccgtctgccctcctcttttgagaacacatgcacactccctcctcgttgttgctctccctgccctcctcccgtcccgtgtggaatgagaactgactgactctctctggtgtgtgtgtctcctctctgtgtttgttcttctcttctccttcctccgcgtctctgtctgccccgcggcgggtgtgcccactgggaaaagtagctcatgctcgaacctcggctccagcatgctcccgcgaacacggactgacggtcgcggtttcgttgatccggggcggttgcatccggtcggagtcggctccagagatcgcttttttcatttttttaaaattatgtttttaaatatagcaaattcatataatttattttttggccaaaagaatttgaacagtttagaaaactccaattttctcaattcaaaattttgtgtattaaactaatcacttacatacgatattaaaaaaagtattgtggattttaaataccc

SEQ ID NO: 4100 - DNA, 2449 bp, Heterodera glycines
ccccaacaaaaatttgtcggttgattgatgaatggagaaattttgaaaaaaatacatatcggcgagaaaaatttcaactaacctaaattgaaaaaaaaaaaaacatttataaaatgagaaattgaaattttcgacaattcttaaagtcacaccagaataagatttaattaatcagctatcaacaccaactagtgaattaatatagttaatattccatataaaaatccaaattatttaataattaatgaatgcatttgttgttttcggttcccatttccaaaacaatattcattcagcacgctttaatattggacggacatttcatgtaagtgagcgtggcgcctaaatgaagtaattagcacataattaaaaattgaaagtaattaacgtataaatgatcccctaggaaatttggctaattaaatttcttcccgatttaaaattgcaaataattagcgctataattaattatcacctaggcaataattagactattaaaagttcttctctatttgaatacattttctcaatctgatcggaacggatcaaagcattaaattctctgaccggtcgctttgccaacttcgccaccgcgtggctccaaatagttgaaagcatcaatggtcagatcaacatggttcacatcgcattccgggcatttgttgttaattggcacagtcaagctgcaaaaaatagaaaaaaaaactcaaaaaaagacgataaaaatgtaaataaaattaaaactttaaaatacgaaaaaaggaaatcgaatatactttattatatactataatttattaattaatcaattaattaatttgaaagtgatatgagctaattgcttttcaccccaccttttcccattgtagtcaatcttaatgcaaatgtctttgcaaattgggtcgtccagcatgtattgtttgtcggcacggcacgcgtccttccactgcccgtccgacttgaacagtttgccggaaccagctgctgacatttttggctaaatagacgatacggatgatgagaataccgtaaccaatgaatgctcgtgtcattgtaacaaaaagacgcgaccgtaaccgagactgtattgaccataaataagcaagactctttttggccgtaactaagactcatttaattgtaaccaagactctttttggccgtaactaagactcatttaattgtaaccaagactcttttgactgtaactaagactccgtgacagtaaccgttcttaaccgtaactaagactcttgactaaccaagattcctgaccgtaaccaagaatcttttctacttgactgaccacgccagaatcgaggccgcacgccccgcgtccgccgccaccgtagaaagtgaacacactgttgctgatcgacttgccaatgtacgagtcaatgggaccggatgtgccggagctggccaaacagcccatgccttaaaaggcatagcgatagatattcattattcatccatagttctaatgcccaattctggcacaatttgaaaaatttttctgcttttggcatttcataatatgcctaattacaaattacccatataaataaatgttcaaatgaaaccagtacagatttaatgactctttggtcccatattttgtctttattattacatgacgatgatgatgaagaactaccaccgccggacgatgatgatgatcctccgcaaacacctaaaaataaaatttgtatggagataataaatgaaatgaatatcaaatacacaaatcaaaattctttggaaatggacaaaatacaaaataaatatatgaaaataaactaataatactaattaattaataattaaatttttatggacattggctttcattattattcccacccccctctattagaaaccaaccctctgctgttcttttataaaaagcatacatctggttgaaaaaaatgcaaaataaaaataaataactccacctcccctcccattctctctattagagcccaaccttcattcctctaataaaaccaccccctaagaatggagtgaaaattggcacacatttgccaaccatattagagcggtaaaaaattttttttataattttttcttaaaagaaaaattcatgtactgctgctatttcattttaaaaaatatattaaatttaataaatttttaaaactaattttaatacttaaaaatggctaattaaaattgattggtgccctcctccaattaccgttgctgtaatatttggcctcaatcagttggagtgttggcgttgctggtggtccgttagggttggtgccctgaatgttgaggccaccatttgaatttgtggcgcccggtgctatgtcggcattgttggacagagtgtattggttggaagcgccactgaccgcgtcgaagccccacttggccgagatggacgtctaattagtaatttgtgaatgatgaatcagcggagtaa

SEQ ID NO: 4101 - DNA, 6724 bp, Heterodera glycines
gcgcgtttcctaaatccaccaaatgggtttctaaccatgcgcgtttcctaaatccaccaaatgggtttctaaccatgcgcgtttcctaaatccgccagcgcgtttcctaaatccgccacgcgtttcctaaatccgccaaaatggggtggcagcgcgtttcctaaatccgccaaatgggtttctaaccatgcgcgtttcctaaatccgccagcgcgtttcctaaatccgccaaaatggggtggcagcgcgtttcctaaatccaccaaatggggtggcagcgcgtttcctaaatccaccaaatgggtttctaaccatgcgcgtttcctaaatgcgccagcgcgtttcctgaatccgccaaaatggggtggcagcgcgtttcctaaatccgccaaatgggtttctaaccatgcgcgtttcctaaatccgccaacaaaatagtatatatatatatatattttattattattcgagcaaataccttagtcttcattaaaattaatcgatacataaataaggaacaaaaacgttatgattgtgataataacttttgcaatagtttatatgaaactgttgattgttttttaacaaaagtttgtatttacttctattttaaagacttattacgtttagaattgctatgctggtcagtgcatatttttgtgaaaactttaaagaatagcgaactatattcgatcattattaagtatataaaaatacccacattttttgtatacataagttcataaagtcaatttgtatttatttaaatttacacgatggcggatttaggaaacgcgcatggtaaggaggaaaatcgaaatgcccatttggtggatttaggaaacgcgcatggtaaggaggaaaatcgaaatgcccatttggtggatttaggaaacgcgcatggttagaaacccatttggtggatttaggaaacgcgcatgggtggcggtttttagtaaatgcaccagcacccattaaaaccatcaataaaattcacgtagcataaaaaaatattcattttaggtaggcaaattagcggaaatttttccataaatttttttttatagttaaccaaattaaacattccttttttatacattcgatggcgctaaatattctagcctgcatgattttaaaaaatttcaataagtttcaagaaatttacgaggttcaaaaaattgataacaatatttatgcaaaaaaataactataccgtaaatgctctaattatcgcccagtctctattaatcccgcagtctccaattatcaccagtctaggatgtgtttgaaaaataatccctctatcttaatcctccagtctccaattatcccccccctttctaaggtgtttgaaaaataatcccccatgagcgataattagagcatttacggtaaataagtttaggttttttttggcataatgtatgagtacatttcaaatcacaataatcagtcaatcaattctttgttggggttttctgatttgcgatcaaaaattttgaaaattttctgttgaatggtatgactgcgtatcagctaaaaaattttaaaagacttaattctattaaattgaattttaatgttaaacatcttaccagtatctatttcttaaataatgaaaaattaaattttctaaaaaaaattcaattttttaataaaaaacccttaaaaatagtattaaaaaatttcataaaaacgatttaataaaccaaaaatttatttttcctttattaaacaaattatatttaatttttaatcattaataaattaaattaccttttcctctttttgtttataatctttttgaattttgtccaatttgatttgtacaaatttgttataatcactattttcaatacattttttacacttgagacatttgcatggattgtccagtgaaggtttgacctctcgttgacacctaattaaatttaattgaaatctaattaagtatttttttgcacccgcaaaaatggtccttgaatgaagtcactttagattttcggcagcagaaacaatataacttctcacaagctggacaatttaccttaaattaatttcatttaaaaaatttcaaaaaaattttataacgaagatttacataagttgggccttcctctttaataaaatattcatttcgacatgcacattgatgcaatgtcacttctgataacgattcttccctaaaatgcatattttgaatttaaataaatttttaaattttctcttttttttacgagggggtaattagcaaaactcacatttttagacgcatttcttttagcttttgtgctaaatcatcgctgatcacttctgctgccttctgaaatagtgaaagaagggagtagagcaagggcgtagccagacccttggctttggggggggggctgaaatcaaaaattcgatttttaggggtgtatttttgcttttttgaaatcccgaattaggggtgtattttacataatttttcgccttttttcgccaaaaattactattttttgccattttggccttcatttttcaaaaatatggtaaatgggggtccggcggtgccgataggcgccgccgggaaaatttttgagtattttaatgcaaatttgttaagaaaattgcttaaaaatttcaaaaaattaactgaaatttttttacttttttgggtttcgctgcctacgcccttggagtagagataattatttttaattagctaatgaattaacttaattaaagttaattaattcgttaactaagagtaggtaattaattagttaattgagagcatattaataattagctaaccaagagtattcgttaattaaaagattaattaagagcagagctattattagttaattaattgtccatttaaataaattggaattatttgtacctcttttcctttgcgtccttttgtactggtcgatggaatgtccatatttgtactgcttgacggatctttaacatttccatacagtgtacatttgccacacaattgacattttgttgcattgtcctcacaaattattcgcttttcttcaccacaactaattaataaaaaaataaattcattaatttaagttttaaaaatataaaaattatttttacccgcaaaaatgatttgttccaaaaatttcggactttccgcaacagtaacaatgggtacttccgcaggggcaatttacctaaagattttaaattaaaaaaatattattgttaattttataatttatttttacaaaaaaaacaaaaatcatacataattacagccttcttctttaataaaaattaagtggcatttatcacaaacatgaagatcccttaaatgtttaaaataatatcacaaattccattaatttttgtcggattgaaaccaaaaatttctgacgaaaatgtttaaattaattgggatttaaataaaaaaaatttaagccaaaattggtacgatatagctttaaaaggaaaaatataatttttaaatattaataaaacttaatttaaaattttgttggaaaaatgagtaaaaattttgaaaaaacccgagcattaattataataaatttaaaaaaaacataaaaaattgaacaaacttattttgaatttcacaaaatgtcgcttttttatgcttattattccatggcacattgcattttcggcacaaatccttgccacattttggacactgaaatgggcgacttttatcaacagaattgtccatttcaatggcacaattgcaacatggacagctgaaaaatatttgtgaataaaaatgatttttgataaaaaaaatatatataaatatatcaatatgaaattttcatttaacataatttgtaaattgaatttgataaatttaatttggctatttgttacaatcaaaaaaaacaacattgatcgatggtaattgatatttcttgttttttattttataaaatttaaaaattaatacacaaaaacatttttctgattggattttttaagggcccctgaatttttaaaatgcttaattttcaaaaaatttaaaatgaaaaacaaattaatatattgcgggttttcactccataaaatattaaatagatttctgattattattttttaacttactatttcttgcagcaatttccagcgattgtcatacgcatgaagtcgcaatggttttccaatgtttcaattgaccgatggttatcgttcggtaacaattcttttattttttcttaaaattataatttaaaaaaattaattatacaaattaattgtccaaactgcattaattaattaattaattgtccatactccatgtgattggattttcgcattccaacgccatacacttcagtccaagcccactgggcgcaaatggcaccatttcatgtgccgcttttgtgtattcatgaaggcactcaatgcagaaggcatgtttttcttaaaattaaatgaaaattatttaaaaaaatattttaagatatataaattcatattctcgggttttttgggtttcgaatttcagtgacaattttcccggtctctgttcttgagcctcggaaaatttggcttctcgacaagcgcaaaccaattcgttttaggattattgtaggattattgctaaagataatgaattgcgttgtctgtcctgtcgctgttttggactaaaacaaaacatcaccgtaacccagaaaactgtagtgaatttacagtatcacaattacactaatgattactgtagatgtgtgtacattcataaatatttgatttattttattgtaattgatacctctgtagctgtctgtacattaatgacaatttcaaaattaattacttgtaattgataccttgtgcttggcggcaagcagcagttgagctgctgctgctgctgctgctgctgctagcgtcagcatgatcagcagcaacatcacagaaacacaattgatcatttgtgaagctatccgcgcaaacaatgcattcgattggtggacgatgttgatcatcatcattatcattatcatcatcatcatcatttgcattgacatgcttatcacgattttgctgcttagcattagaagaatctgcgtaaaattaaaaaaatttaattacgttttttttatattcaagggctgccaaattttttgaattctttccaaacatgaaaaccgtcatagtttggagcagggatgtatcgtttcgtaatttgttgtttttagggcatttcgtgtccgtgtttcgtatatttttttttactttcgtagttttcatatttcgcattttatttttcgattcgcaacaacccttatttggggcttgcaaaaaaggggcggtcagaaatggtttgaaaaactttaatggcagcgaaaaaatggattaattgaaaaaaaattgtatttttagtaaattcttaaatataaattagtccaaattgtaattcattttttgttacaaaatttattttaaaaatatattttattttatataatatataaatagttaccatttttaaataatttgtgcatgccatcgactaataatccatcttcactgctgctcaaacggctcggatttggggcaccatttttttgggtccatacaaaaaacagagcaatttgtaatgtgcaagcaaaaactatttttgacatttttgaaataaagttgtacaacttaatttaaaaaatatataattatatttgatttctttgtgggatataatttaatatttaaataaatatatatatatataaagattaaaaggagaaaaaaaagtaataatattttcaatgttaagaagaaattgtgccatttaaaaaaattataattttgactaaatttaatgaaattacataaatatcaatattattgacaaatatattcattcataaatgaatattattgatattattaattttttgttcattatgtatgaattggaattttgcgtaagaagattgacatataaaatattaacataaatattattataataaatttaaaataaaaaaaaattacataaaaataaaaattgagtaaataacatttgtttttgttggagaaaacttaaaaacacacaaaatcaattcaagtagcgatcaccagggctgtcaaaaatatgcacgaaaaatggtgccaaatatgcgcataaataagcaaataaagtcgtgaaatatgcacaaaaaaacttgaaaattagcggtgcaaattaattaaaaattttattcctcataaattttatcggttgtttttgcaattgcaaatcaaaatttttcctaagagatttcaaatcggaaatatttgacgaaaaatagcaaaatatacaaaaaaatatgaaaatatgtccaaaaaatggcaaaataatgcaaaaaatttgaaaatatgtacaaaaaatggaaaaataatgcaaaaaatttgaaaatatgtacaaaaaatggaaaaatatgcaaaaaattaccaataaaaaataattgaaataaattattttcatagataattattttttatcctcaattcataaaaatttaaaaaatagaagtggtttcacattttttttatgataagcatttatttctaaaatctaaacaattaattggcttttattgaacaaaatttatttaaatcgggcaataattctcaattttccccctctcagcagaaagcaatttcttttgctttttttttcatatttggtttaatcattcggcatttgggttttgattctcgataaaaaaatcattttaggtctgtctcc

SEQ ID NO: 4102 - DNA, 6048 bp, Heterodera glycines
  unsure (1)..(6048): unsure at all n locations
ttaaaagtagggttcgagtcccgtgggcgggggtggcttttcgcgggggcgggggttggcgggggtcagagtcgcgggggcgggggtgagaaatttctcgcccccggggacgggggcgggggtttgtttttaattagctccaaaaaatatcacaaaaaaaaattttttttttttttgaatgatgtgttggctccacattcctttattcgatgtatcgcctcgattcaattcttttttggtataagtgcacagatattgtctaaaaatgaccaaatttaaggattataaattatgccagaatagtcaattttatgggtgtttttgtctaaatccaggttttctatttcaaaattttcaaaataagaataaaggccaaaaaataagattttagggtcaaaaataagaacattttgcaaaattgaattgcttcaaatatttttacattttattcgatcaaaaatgtattctattattatatttttcataaatttcagtgcattcgggatcactaaatcagatttttaacattttttgcggcacatttccaaaaaacttggtgaatgtgcgaggggagaggttcggtggtgctgccgattggcgcgcaagcggaaaatttttaagactatatgaattttgttagaaattagccaaattttttagaaatttcccttttttagatgaaaataaggtactaccccaaaaccagaacatttcttagaataacaacatagaaaaaccctgtattatttggaaaaaaaataaaatcaaaagaaaacatcaaccgatgtcgaactcataacaaaaagtttgttaatgttgaagcactaaccactaaaccacaaatattttgaaaaatataagcaaatttactttatttcataaaaatttgtaaaagatggttaaaaaattcaaaattgtataaatttttgcctttaattccacgaatatgccattcttaggggtggcccccgcgggggcgaaggtcgcgggggcgggggatgcgggggtcagagtcacgggggcggggacgggggtgagccccaaaaacctgtcccgcccccgggtacgggggcgggggtggggtccgaaccctaataataattaacaaattgatacaaagtaaataattaaataattacaaaaaacaaaacaaaatacataaaaatgtgggtttgagtagctgaccacgaagcttacttcgattttgacaaatccatgattactaacccgaactcgaataaaaaataagaaaattataaaaaaattggaacctaagaagacccctttggattttaatatgtaattttcaaaaagtcacttttaaaattgcgcctaacaaagcataatcaaagaagcaatgctgtagagaattaaaattcaacttaaggctgtttttcccttcactttttcattaatttatggggcacattacccattaattgttttgttgtgttggcattcgccatttttattcactttatcggggggagtttcccatgacaacgccttgtcgaatcacaaaacattagttattagtttcaattggttctcatttattcggcatccctttgaacgaacaatggccattttgcacccaaaaaataaggtttaaatgtttaataattgagaacagaagggaaaagcgtctctttacaggaagaacttgaccaaatcatttccaactctggcgaaagactcattgtcattgacttttttgcaacttggtaaagtgtttaaatttttggatttcatttttaattacgctttgttaaggtgcggtccatgccgacaaatggggccaaaattcaatgtttttttaattttgtttttaatgagtgcgaatgggaggggcgcataaataatgaaggaccaaattgttgatgagttaaactcgctttgccatatgaaagtgcggaagttgtagagaccggaaaggacaggatactgtacatgattttctcagagtcctgatccgggtactgtatttttttggaaaatcccaaggacccggatattgttaaatttctgaaaactaacattttacctttgagatataaatctttctccgttcattaaaaaatcaaaaaaattttcctagaaacttgctgccgaataccctgagccaatttacatcggcattgatgtggacgaacacgtaaagaccaacagagatacataattaccaatgccaacaaaaaaaggataatttcctatttttgggtggggaaactgcgaattggccaaatacgaattgggtttttgctgaaccttaagcacaattaattccgctccttttgtctgtttaaaatgctttttgcaggaatcagtcgcggcattttacaacataaatgtaatttgaattccaaatattttaatgatttcatttgattatctcttttaaaattcaggtaatgccaacattcatctttttcaaaaatggacagaagcttgttcgtttattcagcaaaattaatttatctaaaaatttcagcaaaccatcgaaggaaataattacgaaagtcttcggaaaacagtggaaaataataaatgaaggacgaagtgcaaaagaaaggaagggaagggtgaagtgaacgatgggcaaattattgcgatcttttgagacgaccaatcactcattttaattgggggggggtaattagtgagaattggtcagtaaaaaaacgcactcttttcaataggactgtcttctgaaatgtttggcgcactgcactgttaaatacacaaaccacaaatgaagaaatattgaaataaataatccgacgagggcaattgtcgcgaccaaagagacgactaaataaatgactcaattttccagggttttgcccccccccccgcctttcccaactgaatttgaattccaactgcatccgtttggccacgtccgagagtcgcttgttcagctccaactccagctcctggctggcccacgagttcgggtccacgatggccgtgccgagatacgcagccaacagtaccatcagggatatggtaatgatctgaagggtccgatcagtggcaatggcactttcgcgtgaactacgctgagcacaacgaaaggctgaaggaacgccgcgttctctgcgctaagtccgtaaaccattgagagcacagcgacgccgtccacgaaaagaaaaagaagttcgaagtcccagccaatctcggaatagccgacgattttcacaattaaattgctaacgatgcaaaaggaggagacaatcgcaacgacaaaagtcgctttcttaacaaattcagagaagggaaagggcgaacaattcgaagaatgcatttatttacctttatttcagcactaaaacaaaagcaattgcatttttttctgtcctccaaattgtgatcagaatctgtcgtaaattggccactcatttcacacgaataaataatacacagtgattttaagttgccatttcaataaaataatagcagcaataaaagaaacttagaggaaagcattttttagcgttaattttttaaaaagttttcgatacttttccgttttgggcatacacggcaaaatgccacacgaaactgcagctttttgcgcgcctttttgttgcatttttttaaatttgcggtgtacgcccaaaacagaaaagcaccaaaatttccattgggtccataaaaaacaatcagaattattcattaattttataatggctgtgactgatcgatcggaaagggatgtgaaggaaaagcgaatgtttgtccttccaaagagcactgacaaaaggccgacggacaaaagccgaaaagattagcaacgaaatgccgattaatcggcctgacttatcgagaaagccaaagcgaaaggaacagtcattttaacaaatattggaaatttcgtaatagatcccaaaatttataataattcacaaatattaatcggtattagcgaaaacaatgcaatattttgtaataaatactctgtcttgtctatccaaacctaaatttgttgtcttataattgtattattaataatttttaatcacttcatttccccattctctcttttctcattccactctcttcctttttcccgttctcttccttttctcattatctcactcttttctccccctattctcttcctttttcccgttctcttccttatctgcattctctcccccccccaactccccatttgagcaatccaatcacgtaaactatttttccaccggtgacttcgatgaattcgatgcacccgaaaacattgtccatttcctggagcgcatttctcggtcaattagcgggtcattgatccacagcccctaaatccaattttattaacaaatttccctaaaacttgtcacatttttcgggtcgcggcgccatctcagaagggcttcatcgtccccatattctcccgcgccggtgatgatcacttcctggccttggaaatggccaagcgaaatgcaccgcaagggtttgtccgaaactttcagtttcatttgaagtgccattccgagtgaactgttgctaaatccaatcaattttgaatattttcactgtttcctcattattcactctgcttctcacatttccgttgtttccaactcattaggctccccttgcgcagtttcggcagtggcgagtttcgcgtcgtcggcacacaaagaaggacgcctcgaagaaggcgaagtgcccagggaacgggtgaagtcatctgctaattagtgccattagtgtaattgaggtcggaggctcaattgatttgtcggatgtccaccgacctccctccttcaccgccaaaagcaacggctcttcgaagttcaggtccttccgtcttatacgaatttcctcagtcgccgctccgttctcttcggcagcgcattcgtccgcagccaatggacattcagcaccattttttgaaggttttccatccaaagaatgacctgaaaacagtctgccattgaataggcaaagagacaccgactcattgcgatggccatggaagacaactttcgccacgaacggagtcggaccaaccgcgacgggaaacgcttccgttgttcggcctccgttcgctcattgggcgtcccttcgactgattcgtccattctctcggctttctccgtctcattctcatcgaaaccattctcgagaagatcgtcgtttctcgaaggtttgcagtttcggccatggaatgaaagtgcgcgcgttcggtcgatcgaagcagcggaatttgcgaatgagaaaacggagagggcggagtcgatgctttgtcgatcactcggattggaaagactgggagaactttgaaaaggggaaaattcaaaaaaaaaatgacaatacatagagggggagggaaaggagagagtgtagagaagagagagagagagagagagagaaagagagagagagcaagaggagtgagagagaaagagaaagagagaaagaggagaaagagagagagagaaagagaaagaaagggagagagagaaagagaaagaaagggagagagagagaaagtgaaagagagagaaagaaagtgagacaaagagagagggagtaacagagagagagaaagagatacagacaaagagagggagaatgagagagagtttgaaagaaaagggagagagaaagcgggggaaatagagagagtgctagagagaagaagaaatagagtatattggagaggaagagaaagaaacgtaagaaattttttgatttatctagcgcgagggcgcgagcgaatcgagcgctcctgcgctagtttggtgcttatttttgtgcttaatttggcgtaaaaattttctattaatattaatttaaatttatctttaatgggacatttttttacatttctttacaaatttaaataggtatgtaagaatcgtgaattcggttgcatcttgaaaatggtcagtatcgaatttagaatagatcaaaattagacctcttaatagcttatttgttaggatcacaaaataagagttgttcatccacacaaaaacaaagtttgcatttttccaaaatcgnnccctttctttaaatgtctcatgccataaa

SEQ ID NO: 4103 - DNA, 1626 bp, Heterodera glycines
ggccatgtactgctgagagacgctttcctggtggaatcgacactcggcagaacgcgttttggtcggtttgcaattgtttggcgactcgacaaggacgcgataaagcattaaatagcctaaaaaagggtggacaggaggtgggaagacgaccgacgaattcggaaagaatgaccgaccatcgacggtgcccacccaaagctcatccaagtggaaaaggatggagcacagctcaacctgctccaatttgtcgtcgtcttcgtcgaaggatggcttcctaaatgggaaaatctgttgggtcagcagacagtgccagccgatcagtgaccgatggctgtggtcgtagcgaatgtcgaaaagcatttcgcactgtccgtcgcgccaaagttgaataagggacgaatgggcggtgagcagccaaattccgaagggcgaaggtgccaaattacgaatcctttccaaaatcaaacataaatatggggaaaatcgggtgaaacaacgacttttcaaacattggcacttggctgccgactgatgccgaggcaacataaacactcgccacggttgaaagggtgctgcggttgagcacaacaattttgcatgcaactgccaagtaaagtttgtcatcgtcaagcagtgcatccgttatgggagcagctgcaatcggaatgtggtaaaggtcgagagcagaaggcattcgctcgaaggcattctcgagaacagccaaagtgccattggcgagacaggaatagagacgctggggacagttgacctaaacggacgtttgagaaagacacgtcgcatcaaagcgaccaatttcaatgccacgtcattcagcttcaactcccacagaatttcagcctcgcccgactcattaaggtgcagagcgataacgtagccagaaagaagcgagacaaaagccatttccgaattgaacagaaccatggaaatgagtcgacaatcgaactgaaagggaaagcgatgccaatgccaaggcaaaggatgtctctcgagtggacctccaattcgagagtgtccagactggcagtctcctggtgcagttggatcatcgataattttccgcgtttttggttcccggcacaaacgtagcctctgcccggaacgaattgactgaacacgaccacctgggggacaaacagaaaaaatggacaagcaaagggaaaatgttgcctcaatgggaagatcacagagttggtctgattggtccgacgaattctgaagcgaaacccaattaattgacccaattaatggtggcaacacaattcaccgttatgttgagcagttggcggagttgctgcctcttgaaaagctgctcttggagcacgcggagataaagcgattggcgttgacggaggtaagctttgctggggaacggactgagctgctcgaaggcgaactttatctgaacggaaatgccaagaaggaatgatgatgaaacggacggaccagcccatccacgtcgaaggtcagtcggacggccgctttgagcattttgatgaccgaaattgtgtcggaatgggcgagcagttcctcctcatggaaacccaacagagcaatggcaaatcggaaaagcaccttcggtccttcgtatagaaaacagtcccaaag

SEQ ID NO: 4104 - DNA, 1157 bp, Heterodera glycines
acagagcgatgaaccaattcagagtcaccttagggagcaaaaatgccaaagaaacgccattttgaaaaaccgtggtcaaatcgatttcgcactcgtccaaatgctgcgcgagacgggggaacttctgctccacaatttccttcagcacttcctgggggacaaaagctttgttccgttgcccttctccttccaatcacttgatcagcttgtgccccggtgagtgtctggtcaaaataggacgagtcgaagtatctttcagtgaccgccacaagaaacctaagaaaggcaaagcttttgagaaaatccttggccaaatgtaccaaaatgcgtcttcggggcccatgaaaagaagggcagtggccaccaaaaagttcattccctgacaataaccgatgctcggattgtgcagacaaaaggcacggaggacggactgaaggtgagtgacgcctttgcaagaggcggacataaagtgaacgttgctcggcatcgtcctcagcaagtccaaattcacttgcttttgatgggcgctgctgtactgaagcggagaagtcaatctttttctctttttgttttgaattctaagctttgctcacgtgtttttccgccgccgttccctgcgaactgcacaaatttttgtaataatattggccgtgcttttccttcagatcggccacttgctgattgatcagaagacgccaaacgcggggtcgaagagcgcgcggaatgccacggcggcagaggaggcgaatttcacgctgaaatgggcgggggggggcgacgaatggtcgaatggcattcgaaagaccgaccgatcgctcaaggcgttctggttgttcccggagcagcacacgccaattggccttcagctgagcatgaccggtcgacttggactgatagtgctggttcagctgagtggcgatgaaatggacggccaacggaatttctgcgaaagaatggcgaaaaccgtactcatcgacgtggaaagagccgcttcggacaacactaaagcggacagtaaagtgaagaggggacggaacagcacacctttcaaaggtgggcaaagtcggactcgactcgcgcgccttttgcagcagtttcttcactctcttctcatgctgaatgccattcatttgatgaatcattaataataattactg

SEQ ID NO: 4105 - DNA, 1346 bp, Heterodera glycines
  unsure (1)..(1346): unsure at all n locations
gtatttatattctgaattttgacatnntagggcaaatgatgaccaaaattgccgattaaaaggatttatgtatttaaattaatttttacaacattgccttgtatgataaaatgatatttaacgaaagggtgagcggcggactttttgatgagccgaatcaaagctaagctgtttagtaaaggggcggcatattgtaaagagaaaattgaatttggaaagtaaaaaacattttcagattatgtcatgcttgggaatgtctaagtgaaaggccttcaaaaattcaaaatttttttgttaatttgtttttttcttgttttcaattctttcatattttgttaaattggctttattgtcataatattagaatttgccaaaatttgagtaaatttaaatatttctatttaaatattgtagtttttctgagattaaaactaagcctaagactaagccacctaaaaatattgcttctgtcttagggattactagtcccagttaaagcccaagcccctgctggtccctggctataattgatcgtcaaaagattgtcatcagtgatttcaatgtctttgtatatttattggcataaaagtaatttttatttcccctcattttatcagtcatttttatctttattttcattttattcataaaacattcacagctctaattctttatatctttggacatttcgttgaatataaaaattatcgaaattaaaattataagtggcaaatttcttaattgtccattgttgaattaattgcccttatcccaaattccagtataccgtatatttccatgttcataaaatttttcaatcccttacaatcgctagaagctcagaaagatttgctagataaaaaatggtgatattttgtatgaagcaaaagttgaaacaaatttattactattgtaattattttagcatttgatttaacatctgctgtcatttgcacaaataaattccattccaaataaacaaattcagcagcaatttgtcagccaaaaataataaacattcattattcattgggataaaataataattttcattttccgattgccaaatcggcttccttctttatttatctgatctgactttgttgggccgatccgtcagcgaaacgaaaatatccaccattaattaattattcttttcttttgaattttgtttttgcatatcatttccatcatggccttggggggcccccccccctccccccttttttctcctctgcccatttcccattttcattttgcatttttttttccccaattccttggggagaaatttttgattcaaattccaattttgaaaacccaccaaaagttgggtttttttaaat

SEQ ID NO: 4106 - DNA, 4465 bp, Heterodera glycines
ctaattatgttatattcataaaattgacaatttacggcaaaatgatgaccaataattgccgatgtaataaaatttaatattttacagtattcctacttttggaaagattgggttctagttgacatcagtgatttcgatgtctttgtattgggatcaaagtaattttgttgcttcggaattgcaatttcttaacttgctaaaagattttcattttttttcactttttttttctacggctttttaaagaaatagaatttaagcttttgttgttttttgtacttttccattatttgtttttttttatcatttttatatcccctcattttatcaatcattttttaatttattttcatttatccataaaatattcacaactctcatactctttttcaatcccttacaatcgctagcagctaaaaacatttgctggaaaaatgagatgattttatgaatgaattaattgccagcaaaagttaaacaaatctattcttactatattgtattatttttagcatttgatttaacatctgctgtcatttgcacaaataaattccattccaaataaacaaattcagcagcaacttgtcaaccaaaagataataaacattcattattcattgggataaaataataattttcattttccgattgccaaatcggcttccttctttatttatctgatctgactttgttggccgatccgtcagcgaaacgaaaatatccaccattaattaattattcttttcttttgaattttgtttttgcatatcatttccatcatggccttggggtgccccgccccctcccccttttttctcctctgcccattttcccattttcattttgcatttttttttctccaattcgttggggaagacattttgattccgaattccaaattatgaaaatccaccaaaagtttggcttttttaaattaataaattgacacaattaattttgtagagaatgaatgagtgatgcattggcagcaacagttctgcttctgctgatggactgggctctcgcacctccttttgaaaattttacaggcttttcccggcttttccaaagcctcgattcacattttactctaaattgatcatatttgctccactttcatcctggcccaatcatgccgtttgatccggatcgctacggatgttggagaaatgtgacgaagccttgctcgtgtccctgttcgaaactgcgtgccatcaaattctgccgagtaaattcaaaattttaattgtcaaagatgcttaattggcattcattttccttttggcatctgtccgtccgttttatcttcgcttttgtttttcagattgagtgcgatttcatggaccgtgaagccaaggagtggggcaatgccggtcgcgtggctgcgggcgttggctcgctcggcctggcgtttattcctattgtcggcccatttcttgcagtcggcgcaattgctgctcaagcaaaaaattggggcgaaggtggatgctgttgcttttatcaataaatttattattaattaggacaattaaaatgttttagagtaatcaatgcaaaaagaagcgaaacttagcatcccaacttattttcagacatgactcacaccgcgctggaagtacacttcaaatgcgagcagtgtggccaaattgcgtacaaaacttatgaaattttgcgcgaaaatatcacgagcaaccgatggggacgctacacgaacacttatgggggcgagcaaatctgtggaattgacaccacggcatttgatgaaattgagcaagtgttccgtggcatgcccaaggcgtacaacttcgcctacaacaattgcaaggattggacgagcgaaatgaccagacgtctttaggaggggaagcgattagataaagtgatcggagacaatttaggctaatttacttatatatccatattgatttgttaagtcgaagtttgtattggtaaagtattgtatgatgttaaaataggcaaaatatcaatcagtgaaatttaaaaatttaatcatgagattttagtagctagagacagaccgttaaacaaaaattgggggagtccaaaattttgtagaaccgtaatcccgaaaaatttacgcgggaggcctgctcttgaaaattcttaaattctcagctaaacctcttcgaaattggtttaaaaagacaccaaaaatgtcaaggtcaactacttccttaatgaatcaattttttgcatttctttcattttaaaaattaatgagaatttataaattttaaaaaataattaaaaaattagcattaaattatacaatacttttcctattttattattaaaattcatatttgaccgtctaactctttaattttatgcctattctgttctgttgtttttgttcatttaaaccacaataaacaatttgaagaaaagaaaaaactaatttgacagtaaccatgttacggttggtacagtaagcattgctcttttcccttacccttttgctgttgatctcccatttcaatttttcattaaaataagttatgcgttttgccccgataattctttagaaaaattaaaagaaatttcgagcaaatgctgatattttcagctaaagaaattggtttaaaaaaatacatcataaatggtacggccctatttccaaaaaactttttgtcgcagcaataagtcgtaaaaaattcgttcgcatgggtttatggtcggtgaatacaaaaattcggacttctatttcgactaatttcaagtcctcaaaattaaattttcggcttgttcgagttcggtcagggattggttcaaattgatgtcaactttcgtgatcagaaatctgaaaaacaacgaattattcacgacttaatatgacacaaatttttgcaaaccacaggggggccggcccatggttttttaaaagtgcctaaaatttgctaacctttttattttcgtcaacaaataatccagaccctgtcccaattttcgatttagagcgacttaaaaacatagaaacacttattttggcattttggcaaataaaaacatatcgcacatatttcggggtttggcacatatttcgcatatattttggcatttttgagaaaaatttgtatgaaaaatacaagaaaattgaaaaatacacccctaaaacaagtttttgtcattttttaaaaagtctcgggaacataaaaatacaagaataacacaaaaactgacattaagacgaaaaatgacaaatttttcgattattttcatgaaaaaacttttagtctattgcctttagttcagaataatagaaaaacttctatagattttaagcttttcttatttacacccctaaaggctgaaaattatgtcaccatttgtcactatttcggacttttggtcactcttttggcattttcctcactactttcgtttttatataatttttttaagaaaaaatcgttgcaaactgatcttaataaacccaaatttttgcaaacgaagagggtccgtccggcccatggtttttttaaaagtgcctaaaatttgataatatttttattttgttttagaagtaaatgaaaagaaagaattttattaagcccggcaattctctaagaaaactcttgactttaaggaaacagatttcgcagacaaagaattgtagaagaaacttaattttcaaaaatccagtcaggtcctctgaaaaagaacgaatttgacaaaatgctccaaaaagagctcacattaaaagtaaggaattttataaactaaaatattaaataattgatttttctcatttttctttaaaaattttgaaaataagtgatttcgattaatgttgattattgcttaaatggatgaatttttaaaaatttttttggttatcttatatttaaaaaaacgcccttattttactataattttttgcacttgaaaacaaataataaagttaattatttagtaaaaaaaattgctcgttcgtcgtccattcttcgtgaaaatgctccaaataagcaccacatctgaccacgtctagtggaaaatgccagtgataacattgccggcggagttggctttgtatatggccgattgggaccactgctgccaaaaatgccatcgcttcgacacccataactagggctgctaattttatgtaaatacatattttttcctggattctccatagcctaattagtaggaaaaacactttcttttttgtgtttgcgaacaaaaatcgggacttttatttacatatttttacatatttcggagtttttctacatattacatatgtacatatttttatacatattttggactttttcgcattttttgtacatattttgcaatttttgaagattttttaaggaaaatttttagattccccaaaaaaattgcaatttttcgtacacattttcattttttttcatattttgagaattcataaaattttttgtgaaaaaaaaaaaatttgaaaatgcatccctaaaaa

SEQ ID NO: 4107 - DNA, 1165 bp, Heterodera glycines
catcatttgaatattttttataaataacaatttcacacattctgatagtttatagagaaatagtttataaacaactttatagattgataatttacatcataaaaggaaaaacagtttgaagcaatgggccaacgacaggatgctcgggttgtggaacgtttggactaattgcgttgtttgtgagctgcccgatgtggtgaagctggtgatcgctgtaggtattgtcgcgtcaattttgcgcagtccacgagtgtgaagaaacaagatggagcggtacgtagcatatgatcgtaatgccggcaatttctttttgatgctctccaggcaatcgggcagcgacagaacttgttcataacactcattcctagaaagaattaaattagctaggtttactttgactcccaccccgaaatttccactagaaattttatttaaaaaattatggacggttgaaaattaattgactgaactcaagagtttaatttaaggaaaatctaaaataattccgtttaatctaacaagcaattcatcgtattctaaaaaatttattcgatcagattaatgtaattaacttttgaccagggtcaaaaagagataatcgaaattttttagggttttcactcaattctgagttgccttcaacttgctttttggccatatagtttttaccctcaatacctcatgatttcctgaattttatttgcgtttccatagacatatcgataagcacggtacgctctttcctgttgcatgtgctcataacgtgaaattaacaaattaaaaggcatggactcattctgcacgttaatacacaggaacgattcgcactcggggtaataccaatttggccccgtccacgttggtgacagaacaacattgtgaaagacgctgaacatagatgaattaaattggggaagacggaggccgaaaagctacaaaagcaccaggaaaattgaaaatttgggttcaatttgtaaatagtttttgagtgcaaatggtctactgtcgctttcttaaaagttaaagagaatttgggcctacggtgccaaaaaaagaacaaattacttgtaagggccgcgtttgtccaaagcaaattttattgctctcgatgtgtttgtgtcaattccccggcttttgcagttcttcgtatgccttttgcgcataa

SEQ ID NO: 4108 - DNA, 2480 bp, Heterodera glycines
  unsure (1)..(2480): unsure at all n locations
ggtgtccaatctccttttagctgctaggggccgttctaatagaggtttttggaagattgccaaaatatgggtataaaatatggacataatgccaaaatatggaaatatggacataaaaacgaaatatggaaaatatggatatagaaacacgtcctagaggcttcaaactaagctaaaaacatgtttttcgtgcgtttcaggcctccaacagtccaggaaaaaattatatttccatataattacaaaccctaataattacccaagaaaatgaaggtgatggcatttttggtgaaaattgaaaaagtgaacaacgtttattgatgagtatttatcatgacaccaaattgtgaaaaatataaatataaggaaaaaaactccgatggacaatgccaagggtggagcgtctgcagaaaaatcccgcggtcgcggaccgccatttaaaagcaaaaaattttctaatttttctttgctaaggagttccggccatgtaagcctatgacttttttttttgcttttcttatcattctgcgcgcttttttcaaaaaaaaaacttttgggcggcggagtcattatttaagaaatcatcaatatgatttgattaaaaattatttataacttagctcaaaagcaagcaaatttttaatttttgatattattcgtagcccttagtgttctctataaatctaaaaaattaaaaaaaatttcgctaagtttcaaaaaagttatggctagaggaactcaaaaaccttgtttgtcgagcatttttcgagcatctttggccctaactcttttgaaacttgatgaattttttttgaaattttgtagactgatagagaacacttagggctatcgaatgataccaagaattaaaaatttggttgcttttgagcaaagttataaataatttaaattgatatttagtgatttaagtaaaaaagaacttagacgcatttatggagaaaaatgagaaattttaaaagaatttaagaaaattttgcatatttttcagctatttaaagactattcaaaaatacgaaaaatattgaaaaaatattgcaaataattcaaaaaatatattggtatgcgattaacaaaaatattctattgcgacattaaaataaataattgcttcaattgacctaaaattattatgaaagtcatttttattaataagttttattatttaattacttccaaatttgtttctaatattttacttgatggaattaaaagcaataaatgttaattttttctaattttttagaggcgttttcacaaaaaataccaccgatctctccagtcgccctgatcattttgcacagcgatcggaatgcatcaaattgttcagccaaatccttggccataatccgctggtgatcactgaataccgcgccgattcactgttatataagcaaaaagcggagcagggcgaaggggtggaaaattcaaaaaaatgcttcaaaaacgaataaataaattccacttttatttatttatttatttattattctgatgttgttttgtttcctttattcagtgtgaggctttttcaacctgttgtcgttaatttaataatatcaatttatttattgaaaaaaaattttaattgctgggtgacataattttgcctaattacttttggttaccaaagccccctataaaaggcgaacatttcaatgcaaaacagcaaatgttcattcatttatatgcactgatgaaatttatttccaatttttcattttaatataaataaattaatttcaattttttataatatatattcgataacagaaagcattttctttattttgaaaaaatgtcatcatcgagcggatccccagattcttttttccgttcagaaattaatcaaggtaataaatatatagaaaaaaattcaaaaaagaattacgaaaaatagaaatgattaaattttattgaaaaataaaatactaatttaaattttatcaccaccagcagaagcagaagaagtgggcaaatatgaagtgttaagttggcacggactttggggtgatcaattgtcagctgaattgttcgtcactgatcagcagctgctgaaggtgagccatctcaaaacgtacaaagagaggtcgcccggttccatgccggacttacggaatgtgccaaaaaccgaaaacaattttgcaaaatttagttcaacatttcaaattcgtttaaagttttttaaattaagcaataacataaaattaataggagaaagtgccggccgtttcatagcgcaatttttgatggcattttgccaaaaacctttcaataaacggacataaaatttaaaaacttccaaattcttaattaacatttagctgaccgtttaacaaatgcaattaaatttcagtttttgttggtcaattggagacatttttggtaggggaaaagcagcagaaggaaaatgttggtcaacagcnagaaaaggaaaacgttcaacagaaattggatgaaaa

SEQ ID NO: 4109 - DNA, 8444 bp, Heterodera glycines
ccctttcgatactattgatcaaattcattagcagccagcgccgctgattgacccgaaatgataatggcacaaatcaagagtcctgatgatttttaatgttcttatgacacttcatcaagtgccagatttgaatggaaatgcaggagcgtactaagtcaatgcgttcttccatcaattagactcaatcagtgaggattgacctaacaaaaagcgtttaagcgcatttaaatcaaaatgctcgggtagagcagagcacgcatacatttctgcagttgtcatcaacccatttcggtatgaaaatatcagaaaggccattaagcagatactcgattctatagatgcgaagtcgtctgatgactgggtttgcagaaggaacggccataccattgatgacatgccggaccgagtttcataggtgtgaagactttacacgggctcagatatgtcctatgtattacgattaatagatttgactcgttatatacgcgtttattgccatcttgggcccatgtcatccggcagtcagcgtctatggtgtaagtctcatagccagcacatgtccaattctccgtttcatcaattgtaagaactgtttaaataataacaatgccaggtttccatataaacattttttcattttcaagcacatagaaatttttgagcacaagggttgttaaatttattaaattttaatgatttatataacattttatatatttatgttgttttatttttttgaaatccctccctctggtgcccaaacttcccggtgcccaaacttcatgtcgccgtttctttggccactcgacagatctttttgacgaaaaatggccgacgaattggtgggccaaacaaaattaaaaaaagcaaataatttaaatttccatttgtcagatgacactcttttttcactacaactcccgtcaattctctgtttccatgcgtttctttgtggactggcgacaaaattgaggccaattttgggccaagtttcaaatttaatttggctactctttgaagaaagtcgaagaaacaacggaaaagggcgattaatcattcattaattaattctttttttcattgttttatttttaatttcactttattttcaattttttatcttattttgtcatgcgtatttgttaacgaatattaatttactgttttattttgctaatttatttattatttgttttcctttttcgtgtaaagatttacttaaaagggaccacagaagcaaatattgaagctgaagaaatagcaatttcaagaaattccccaaaaggtttttaacaaaatacaaagtcgtaggaatatgaaattaaatttaagacaaaataatttcattttcttacaaaataaaaataaaaaaagcttacaacaccttcgattccaaggacgtctccgttccaagtactaagaaggcccaattagaaaaacctcccaatttcaaaatttggttaagaaaaataggctttgctggtgcttttaagaaagtcacatccaccattttcgtgattaaagtcgttcatttgagatgccaatttccattttattgtattccgtttagaaatctaaaaaaccatttcggcacaaaatgccaaaaagggcaaaatggcgatataaagtcaaactaatgttctaaccaaattaaaaatgctttttcaacgttatctcggaaaatcaagagcgaatgaaattcttttcacctgaaggtaataggagaaaaatgaagggcataaattgaaaaatttaatgaattttttaagaaaattaaaattataaagtttagcctaactttttataactgctcttttgaattcaaaatgattctcttaagcctatgcccaacgttgcttcacagatcgtcggacggcattttaccctaattttaaaggtaataaataaactcgtaaaaaccatagaaaaacaatcgctcgctctattatagtttttcttttattaaagctcaaagtttgattaattgcatgagtaaaacattcgaattttgaaagttagcgattctaattaagaatttttgaaaattcacgcccacttaaaaattgtccatctcatttttcgttgttcaactttttaagccctaatcgtagcattatgctttacttttttcacaacttggattaaaaatggtttctcacacattttttagcttatcattttgctcaacaacaaaagtcaaaaaaatggattaattatttatttgaaagagagtaggtaattaattgattgttatatgacacaattttgcctaattacttttgtctacaatgccgccactctataaaaggcgaacagattcagcgcaaaacagcaaatgttcattcatttatttggcactgatgaattttattttccaaacttaaaattcaataaaatttaaaatttttaaaaaattttgaaacattgcacaataccttttctttagtttgaaacaatgtcatcatccaacgcttcgccagatgcatttttccgttcagaaactgatcagtagggctcgaaattgtatggattaacatattttttctgcgcatatgctatgaagaaaggggctcaaaaatagcatttctgcgttaaaattttttgatttggtgaaggtttttagtccatataaatccatattttgggggttttcgagaataaatccatatttcgccatttttgcctttttagtccatatttggccatttttgagctttttagtccatatttcgggcctttttagtccatattttatgtccatatttgacgttttttagtccatataatttcgagccctactgatcaggataatagaaaaatttaaaaaaaaatttgaaaaatataaaataattatatttttattgaacaataaaatactaatcaaatttatcaccaccatcagaagcagaagaagtgagcaaatatgaaaaatgagcccattattaaaaaaaatttctttacattttaaaaatcgattattattagagaccggacttttagttacgaaaatttctcaaacaggcacctaaaatatgtaggcacgaaaaatgtgaaaaaaaggcataaaaaatgaacaaaacgttaaaaaaggcacgaaaaattggaaaaaggcagcaaaatcaacatttttctagcaaaacattttccaaaagataccttttttttgctcttcgggcctaacttttttttcttctcctgtgttattcaactatttcagaaccggagaaaagggaataaatttttggtcttcaaatttcaaaaaccaaggtataactgtgagtccgctgtgccgataggcgccgctaggaaaagtttttaagaaattataagaaatatgatgagaaaaattgcaaacaattaaaaaagtttccatttattttaaacaaacggcaaaaaaagtaccaaaattacgtgcccggcataaggcaccaaaatcgcaagaaaaggcaccaaaaagttctagctaaagctttaaacctagttaaaaactcgtttttcgtccatattaggccgtagcaagctagcaaaaagaaaggcatatgcctcaaaatcctgcttctaattattatggatttgttcggatgagttttgcatcgaaaattagaaaatctatttaaaaattaaaatgtataaatatattttcaaaaaaaataaagccggctttaaacaattaattcatcagcatattccatcacttcctcttactcaacttcatcatcttccatttcttctgcttccccttccttagtttcttcctcgtccgtttcatcatcatcctcatctcccccttcctcagtttcttcctcgtccgtttcatcatcatcctcatactcctcatcttctacctcatcttcttccatctgttgtccctgttgttgtccctcgtgctgttgtccctgctgtccatcttcctgctgatcaggttcctcatcattttcatcctcttccgcatccgcatcataacgcagcacatcatcgccttccttgtctccgcttttttcggacattggcaacgtgttcataacacttaacatgaaataataaggtctttttaggctctatttctgttaacgcgtacagtcagtgatcaacatgtttcttaaaccgtaacttttttctcgtggtcaatttatgcattcttggtattttcgaaagcttgaagtctacagaagttttgtctagcaaaaatctgggataaaggtaacagacaaaaaatttcttgaatatacgcgaaaaattatggatttcggttttcgctgtattttatttgctcttttcttgtatttctaaattccctaaacataaagctttcgaagaaatagcaagaatgtttggattggcaagtaaaaaaaaattatggcaaaatttgtagtgtttcagaaaatttcaaaaaattcgttttctacacattttttctattggatgcttctaaaataagttatggtgcattaaaattcctgtattttttactcacaatttttttgttgtgtttttttaaattatatatttgaaataaacttacccaaaaacatcagttctgtccatcgttcttttgatgaacaactttttaatcagctgaaaaaataaccaaattagtttggaattttatagctctttgataagcatataccgttgcatttttttgtaacatttttatagggttgtccaatgaaaccatcattaagccatataccggttaatcccaaattacattttacttgtgtaccacaccccattttcgggtggtatatgttaaaccagtttttgaatctcgctttttagagcacagaaaaatctgaaaaaaattcatgtgaacgtaacattgatgtttatcaaaagtgtttttcatattaacttgatcagaccagttcttcatggtgatagggacaccctaaaaaacactgaaaatctgggaaatttttgaaaaaaattcctatagggatgggaattttttaaaattttgagtaggcccattggagtgagcacaaaattctcaataatatgcaactgatttctagtcgttacgacttatacccgttgaggtatgagcactttgataagggtgttgatcatttcggcaatacagtactttttgtggacatcgaaattgaaatgcctatacctcagcaggtataagttgcaacgactttcggtctttttcatattgtagattttcagatggacataatgatttttgcaaaaaaaatttcccaaccctattgagttaaagcaaataaaacctttggttataatcatatgaccacccgaaaatggggtataattggttcttgccggtaccacttccaatcacgaatgttttcgtcaatgagtgatatcattaaaaagcccacaaaaaatgcttcaaaaattctaccttttaaccgattgaaatttcaaaaattaaagatttttaaatatatgaccatgactctatttttcattttttttttgttgataaattgggttaaaaatatataatgaaaatgaaaaaatttaccgtctccatcttattcttcaacggttccagcagccgctgcacttcgtttctcgcttccaacaagacctgatcccgtgttgatccgatgatcagggcaatcttttttaaaatagaataattcatttatgataaacaatttttaaattattaataaatgctttttatgtcattttttcgatttacttttcgagccatttttcgggctttaatcaaatccgagccggtgtggccgagcgactcatcaaaaaaaaggagttcagctcgttcgcctcccagcaggcacatgagtcgagcacgaagctcattcaaagtgagtgtgccgggccattcggaagtcgtttcagcgtcatagtcatcccctgaggggatgacagtgaccttaaaaaaattcactatttaaagaaaaaattttgtttcaaaatttttacctcaacaaatacgccagcgtatcgcagataccagtaacagaatatgtgcccacactcgtgtatgccctttttcatcttaaaaatcgattaaacggactctaattgaataaactaacgcaaatttttaagcacacacactaaaatagaacgctactgtatagtttttgtaggcaaacttctcacttttttcaagataaggacgaaggaaacacaaaagaacatgaaaatcagcttaaacaatattttattagcgtaaaaattgaataatttcttttgtttctgctcatcaaaaaaattacaaaaattgcaaaattttgactgttctttaaggcattttgggtaattagactatttgttaacagattttcatcaaaactgacaaatttttacgagtttgaaccaatttttgaaagaaaaaataacatttagaatcaatccaaaagaggcaattttcgcactttgcatatcaaactgcttacaattagcattcgcataaaaaagaaagattcctctttaaaaaatgttattaaatcaaatttgttcttttttgaattatcgcgttaaatttatgccaactatgctatttggcgttatgagcaatttttgtctgacactgggcttgacccgtcgtgttggttcatcgctctttttccggacgccatgtaaatccaaattgaacagaaaatattgtttgtatcaaattgcttttcacaatgctttacaatttcatttctttacaatactttaaatttgtttacataaaaaatcagggtaaaatttgtggggagcttctcacgtctctctttatttaattataagtattatttaaaaaaacgggtggaaatgccgaacttcaactgcctggagcggcccctctcccaactgttctaccggtacgggtgcttcatcacgcgcactccgttcccgctggtggtcaccccgctgctgatcaccattttctccgtatggggcttcatgtcactgaattccatcacaggcaatagcaaaattcgttttttaaataaaaaaataaaatcccatcgcttttcattaatcagtaatttgagaggcatccggtttttttttaattttttcttatttggttttcttaattttttaccgctatggttttgatttgttttgccagaaaaccttggtgaagcttaaaacctttaagcatagacaatggcgggcaatggcaattgaaaatttagttttatgatccctaaaaaatccaatttctccccaatttttatgcattttaaattctattgaaaaaaactttcgttcgactcaattttcttaatttttttccatctcaatatttacttcctcttttaagacgccatttatttgttcacgccgcagaacgcgccctccaaaatggagcgccaggtcatccacgacctgtggccgttggtcaacggcagttacatcccgggccgggccgtcacacagtcgcgggaagtccaggttgttgtcggatgagggcagatggcttatcatgatgcttttgattaggggtggcgtgggatgctatgggttacctaccactcggggggcggggggaatgattttggtagttcgatttaccattagatattggacacacaaaaatggtggcggactttttaagacgcggaccgcgaaaaagtgacgcgcaaacgcgtcccgcccctggccaattgtgcgtgtgtccaaaattggtccaaattcacaaattgggttaaatcccgaatttaactcatttcctggctcactttttcataaatttccgtttcatagatcactgtaagtgcgcgtgagcgaggcgcaaacatccttgaaaagccctactccgaggcggtgcatgtgttggacgaaatcatacaggttttttgttgcaattttgggcggtggagtggtcctagtcaactcctttcataattgtaagaaagaaaataacgaaacaaatttcgcgtaatttccaaatttttcccattttcccggcagcgcctgtgtctgggcgcagccaattcaatttggcgccagcccagttcaagcgttcactattgtttataaaatttcgagagattttaaacaaaaaaagttattgccaaatattctataaaattagatttttgaagcaaatttattaaaattttgcaggattatagacaacattcggataaaactattgaatgatatcaaattgattcaaattagtacaactctgaaggagttctacacaaaaaaagaaagccgggttggtgccacacgtaaccggaaacggaatttgactccatgtgcttatacaattttacacagaaattgacaattttgtgcatcttttcgttgtccggaattgtttgaaaaagcacatttcaaaaaagcggagcaaaaccacaaaaatataagcagattgaaaatgggatccctcgttcccttcattttatcagcgaattttttcgccccccccccctccccgaaaaatgaaaaaaaaaaatttaattttccaaaaaaaaaaaacactaggaaat

SEQ ID NO: 4110 - DNA, 4316 bp, Heterodera glycines
ctgtgcctgccgggccgccgcggtgctgccaacgcgtcgccttccgctaccggacgtagtccgctcctgttcatgattttttaatacattaaatatttaaaagtttcgttttgaataaggggacaatttaaaccaaaatttttacaaagaaaaaatgattaatttaaaaaaaaatttttaatgtggatgctttgtctggaacatgatcagcagaagcgaaattcttgagaaaaaacaaaaaaaaatctatttggtaaaaaatttttataaaatattcaaaaatatgcatcataacacctgttttaagcgaggaaattaaaatttttattttaaatatcaatttttgtacaatttatttcataaataaaatatttacaaaaatgtttttaaccatttttaaatcaattttttataaaaatattttgtaaaaaagaaaatacagtaaaaacaaaaatactccgttaaaaattgatttcaaaaaaaaaattcaaaaaatccattcctagttgttttacaaatatgcctctctcgtattttcaaaaatattcccaatgttttgcaccttcaatgcgcaagccgctgctgccgcctgtgccgccgaccgatccgccgccgcgccgctgtcgtcacaccgtcgccttccaccaccggacgcagttcgcactcgccgctcgtcctcactttgggccgtcttaaaaaaacaaaaattaaactcaaaaatagaaaatattaaatttttgggcaaaagtaaagaattgtggtcccaaaattgagttttcttgggctcaacaatcagtttctgtgggttttcgagggtattgatcacgaatctttggcgcaaaacttaaattcgaagttttaccggaattgggtaaatccgtgtttagaaacatatcaacacccttcggaaactgattttgagcccaaaaaattaaatttgggaccacaattctttcccattgacaaattttgcagatcaaatttcatttcttttttatttataaataaggtaatcaataataaaaaatattgaagcatatccaataatttaaatttttttttaccaaatttgccatcctttttgtcaccaccgccatgttctgtcgctcctcctcgttgttgtccacctcgtctgttgcctcttcgcccgcagcgcaagccgctgctgccgcctgtgccgaccgatccgccgctgtgctgccaacgcgtcgccgccttccgctactggacgcggtccgctcctgttcatgattttttatacattaaatatttaaaaattgaatcattttaaaatagataaaattaaaattttattttttgaacatattttcaaaacttttttgagcaaacatttaattaattttttctaacaagggaacatttcttacagtaaatattcaaatcacgtttaaaccacttttattttgtggagatagatggtattctatcataaattctcgacctttttttggccctcaccaaaaaactgatcagaaaaaagtgatcaaagtttcaaaaatccaaaaaaagaattaattaaaaaatcaaaaaaagctcattttttaaatatttggtcaattttttcggattaatttgagtcaagacaatatgtatatttttatacgacatgacccacctcttctggttcaggtgatgccgccgaaaagtcaatggtggtgcgaatcgatggccggcggacgggggagtgtgttgcaccactattcgaaataattccaatcaaattaaaaagaaaatttgtgaaacacaaatttagcactgattttttggcaccattccaaaattcggtgcaaaatttagtaaattgaaattttagtcacataaaaagaaaattagtgaaatgcaaaaatttggcaacgattttttggcaccatcccaaaattcggtgcaaaattttctgctggcagctgttttttggctcaccgtcgttcagccttgtcgtcagcaacgactggtgggacaggcggatgttgttcagcaggaataaccggctcatccgcacccgactgatcaaactgtagttgttttaataaatgaaaataaataatggcgaattatttttattttttgaaattatatcaattatttaaaatattaatttaataattttttaattagcagatttaaaaacaatatttatgtgaaaatagatttaataaaataataatttttatttttaattaaaaaagcatttctcaccgaatttgttttaaaataatctcaattctttataacattaaaattttgcagaccaaatttcattttttatttaaagacatcccaatgaataaattaaaagtttgcagaacaatttcatttttttattttaaacaatgtaatcaattttattttatacaaattttgtatataaaaaaagtttaactattagttaaaaaattgtattaaattttttcgtcctgctgaagacgaaaaacccaatatttttgataatctttttaccaaaagccatcatatttgaaaaaaaagacaaaaaataaaataaaaaacaaaattttgcccataggaataaactttttaaaataggtaatataaaagtctcgtagacaacccaacccaagcggaaaaccctttattttttgcagtcactcacctctccagtgaagtcaattgtcggcgcagggttgtcatgccaatccctattaaacataacgaaattaattcttaaaaatgttaaaattattaaaaattttttgttttaattaaattatttacttacaacatgtgttttgccgttgacctttttatatccgcggcgtagtcacaataaaggctgaattgtcttattaacaaaagaagaattttacatttttttaccattcaaattccttctttgatccgtgcatcggttggtgtcttgtgtacgcgatgacatgtgtaaaattcgccggacatctcttacagaagaatttggccttgaattaaattggtaagttttcaagaaaaagtcaagaaaaaatgttataaaaattttctagaggatatgtttttttcaaaaaatagaaaaatctctaaaaatgaataaaaattagtcacaaatcattaatacaccaaaaatagtcattctgtacggattctaacataaaagtaaattttaaaaattgctttttgttcgaattcgggtccggcttttggaatcggtcaaaattaatgttagattcatattcagcgcataaaattaccctagaaaaaataatttaaaaaaaaatttcaggggggtgacaaaaaggataagaaccaaaaattcattcaacaaaattttatatgcttatcaaaaaccgttaacagcaacttgaccagatcactccttcatactgatcgggataccctaaaataaactgaaaatcagggaaattttcgaaaaaaatttctaggggttggaaatttttctttgggaaatttgagtaggcccattggagaggacaaatttactaccgatttggcttttgaatggtaggtctacgatagagaccggacaactggggtcggagggatcccgagtcgggatcccgactgaatcccgatcctgatcaatcccgaacattttggaaaaacgaccgggacggatcccgagtcgggatcccgaccgaatcacgatcccgatgaatcccgaagattttttcgggatcccgcgggattatcgggatttgctaaaacccaattttttttcaagttttgtgataggttttgttcaaatgcttatctaatatatttataattgatcaattcgattataaaaatatggatggtaattatatcagctttttatagaattttgttttccaaaattagagaatatcatgcctaaaaagtcagactttaaggtcaagaattagaacatttaacaacatagctttaattttttttttttataatttaatcaattaaggtcaatttttgtattttcgcctcctattatttttagtaattttaaggaaattgtaaactgcatcgggaccaaaaatcagatttttaagattttttttgctgcaaattttttcaaaaactttaggggaacctgggggggaggttggcggtgccgataggcgccgccgggaaaattttgaaatttgaaatgtaatttgttaacagaatttatacaaaaattgtccatattttgtgattttaactaatttataagaataaaatgggttcatgggtcgggcggtaccgataggcatagaaggaaaaatacgcagacagcaatttttattctgattattggacagaattcttagaaatgttgtgtcataatactacctaaaaagatttcgaataat

SEQ ID NO: 4111 - DNA, 3488 bp, Heterodera glycines
ctcgactccgtcccgccaactccgtcccagccaagtttaagaagccataaatttttttttcagtttaccatatccaacaatcttgatatcattcgaaggctctatatgttttgaagacattgaatctacttctaagtgataaatagggagtccaattaaaaacatgtttttcgtgcatttcaggctacggggagctcaggaaaaaaataggtaaaaacctaaaaatatcatccctagtaattaggatgtcccgaacactatgaaggagtgctgtaaaagacttttttgatgaacacaattttaaatatttcagttaaaaatattttatttaatttttttggttttccccattgcattagaaatcgcaaaaattcaaaagtaaaaaaattttcaccggcgccacattcactatcggaattgagggcagaagcttgtcacggcggcagagagcagacgaggccgagcgggacctttgcgtttccatttcattgtgccattttaccaacgtgtcgtcctcgcacttaaattcgggaaaaaatatttaatatttgttgtaaaatgcaattttttaacatttttaaattttttgttgaaaactcattttgtcatttgtagagaccgacttttgaggcatatgccttttttatctgcgaattagtttcgatatattaagcataaacaatgcattttccacttgatttgtggcttctacgttgacttttattatgcctttttttttcctttttcgtgattttcgtgccttaaattccttttttgacattttgccgttttggtgcctttttggcgttttttttcgaaaaaatccattaaagatgcaataaaatcgggaaaatacacccctaagaaataatctgaaaaaattttcagaaaataaactccctaagaacttaaaaattttctcaaaaattgatcgccaaaatttcatttttttcttggtaaaaaattataggtttaaaaattttgcttaagaaaaatattataaaatatttaataatcatttaaatgaccaaaataaagttatttggttattttttaggtgttttgctccataaaaacttaaaaaaatttaagtgccttttttcatgcctttttcaggattttcgtgccttttttcaattttttggtacctattatagtgctttttgtgatttttggtacctttttagtcggtctctagtcattaggtaaaagaaaggccaaaattttttaaacaaaaataatttttctcttttaataaatataagttttcaaagaattcttatattttttacaatcctcatgagaattttggagaattttacttaaaatcgcttgaaaatttgaacatttttctaccgttaattaaaaaaaattctttaagtaatttgttaaatcctcataaaatttattaattacttaaaaaaaatttacctcccagaaaaggtggcccgtacttctgtgtgcgtattcttttctccatttggcccttttttggtcacgctaatcatcaaaaaaaaaatttaaatttttttttcaaattaaaaaaagcaattaaattaaaatttaattataatacccacattcggtgtcatgttggccataggcttttaatgattgaacacagcaaatattgtagaataaataaaagctaaaaaaataaattttaatataaatttaacaagcttcaaattattcaattatatataataaaataagtaaaaaatacaaaaaaagggggggggagcgtgtaattgatgagtgcccttttcaattgcttgggaaacattttcctaatcgattctactaatagggaaggaaaagaaaggaaaggaaaggatagttgtgcattaattatatatttaaaaacattagctatcaaaaaaatattttaggaaaatattaaaaaatacctatatttcttttaattcctcaattcattcccccggtaaagacttccaggtttaaaaattattgaaaataaattccaagaggttttcgaggtcacttgatcacataccgtattttctctaattaaggccctgtctccattaaaggccctgtctccaattatgtccccctttctgaggatgttgaaaaataatcgccccgtctctatttatccccccgggggataaatggaattattattattttttaaatcttatttttaataaaaattaattttaatgaattctaaattgaaattcatttaaatgtttaataaacatgaaaaaataatacagaaaaatcacttactttactcaagtccgaatctaacccaccccggtgctatgtgttttcaatttttgaaatttaattattaatccctaggggtcttatgagacgggggtctggggttcgagtccgcttggctgcggtttatttttttaggtacttgtacagtttacaccagagttgccgcgggttacccgaaacccgacatttttctcgacccgaaacccgacccgatattttttctcgactcgcggcaaccctggtttacaccccataaaaattttctgaaagggcgctaaaaatatgcatacatttaaaaattcataacaagaaaactttttttgcttttattttgaagaaaggagctcaaaaaagcatttctgtattgaaattttcgattctgaagtcactatgcgtcattaaaaatcagactttgtcagcaaaatattaaaaaattttggctttatgtcattattttagagtagagcgggaccgggaccgggccgggaattcccggtcatccgaggtccctgttcccggtcccggattttgaaaagctcaggtcccggtcccggttttgctcaaaattcccagtcccgctctactctacattattttattaactatttcgagatttttcatcactaaaagtcgcggccctagtcattaaaaatctgttgaaaaataatccccccgtctccattaaaggccctgtctccaattatgtccccctttctaaagaggttgaaaaataattcccccggggccttaattagagaaaatacggtatataacattcatttcggttcttttctgttttgtgacccccccccccctgaaattttcaaataaaaagtcatttctagggtaatttggggcgctgattacgaatatgacctttatttttcaaaattccgaatcccgaacccgaattcgaacaaaaattcgaaatttataaattacaaagaaaacacatttctagaggttttctaggtcgctgaaaacgattatgacatccattttggccaaattccaaaacccgaacccggattcaaacaaaaaccgagatttaatttacgacaaaatttaaaagaaaatatccatcatagatctcgactcaaaattgcataaaaacacttttataggttttctgtgtggtgaaaatgcctaaaccatcaaaaaaaactgcgcggcaaaagtgtttaaacaggtttttgaaacggtttaaaattcgaaaatttgagtgaaaaggg

SEQ ID NO: 4112 - DNA, 1352 bp, Heterodera glycines
ttttgttcaaacccgggttcgggttttggaattttgccaaaatggatgtcataatcgttttcagagacccaaaacccctagaaatatgttttccttgtaatttatgaacttcgaatttttgttcgaattcgggttcgggattcggaattttgaaaaataaatgtcatattcgtgatcagcgccccaaattaccctggaaatgactttttatttgaaaatttcagggggagtcacaaaacagaaaagtaccttcatttcaaacaattccgtacccctgatcaaaactcgaacaaaaagtcgaaaaattaaaatttttgaatttcgagtttttgggtcgaaccatattaaaatacataaaaatgaatgttttcaccttaaaactgcaataaaagaaaaagtttgccgctgttttttgctgactccggccacaaaatcacaatcaccgtctgtagaagcttgatcgccaccgcaagatgatgctgttcaggacagattctgcaaaatttacaaaaaatatgacaaaacaaaagaaaaaatcaaaatttttaaaataattttccatagatcgaggaaattcatggaagttggaaaaagatacacatccaaattttttacaaagaaatttttttttctgccagtgctaatattcatgtaatggaaaaataattaaaaaataataaaatttaggagtatagcaaatggaaaaattaaaaaaaagtcccgtgcattctaggagaatcgaactttcatcctattcaatgagaagagactactctaccgactactctattgtgattgttggatgttttaactctcactttcctaatccttgtccataaatttttacagaattaatttcattttatgacaatatgtatacctttttatttgcttagtgatttggattttgaactacaaacgaacaaatcccatggcccggttaagcagcacaaaaaaagaagtaaaatcccgggacggcccagtcgccgggatagacacccggcttagtccggcgctgatattgaagccgatgacatgacaacttgtacaaaggcaactcgtacaaaaggcaatcaactcttacataggcttaaactaggcctaagctttaagcctgcttggtactaggcttaggctttttttgtaaaattattacagtacctttggatctattgcactttatgagcccaagcgacttttatgagtcagaagtattttatgagtccaatcaaataataatacctggtttttatacagcaactttgttcatgtttgaacaaaccctaatttttggtatcattcgaaagaacaaagtctgaacaaggtaatataatactagaaagtaagagaat

SEQ ID NO: 4113 - DNA, 965 bp, Heterodera glycines
ttattaacaattaaaaagttataaaaaaattacaaacatagagattttcaagttaaaaaaagtttaaaaaatttcataggaaaatttgaagaaaaattttttttgaagatttttcaaattttatgaaaatgaatgaacttatttcttacaattagcaataattcataacaaattgggagaaaaattttcaatttcttgaagttttcttataaatatttttttttctaaaactcgcacacctccgttttgctgctgctgctgttccagcacagtggtagtgcgtcgaagcacatcatccgttgtcattgaacatgccattgttgtgggtgtcgtttttgtggaccgtataaaacgttgttgttgttggttttcgtcgcccagccccaaaacctatttttaaaaaatgtaaaaggatttttaaactttttagtttaaatattaaagtagccatccacttaaccattactatgtggatggaaaccatccacatactcaattctatgcagatggtaccatcaacataatcattactatgtggaaggtaaccatccacttaatcattactatgttgatggtaaccatccacataatcaattctatgcagatgttaccatccacataaccgttacatgtggatggtaaccatccacttaatcatacattatttggggatgggtacttatcgaaaacgtactgtcaacgtgtcagacctacctgcaatttgctgatgtgtatagatggaggcggagctaatcatctttttgaagaatccaagcaagaccatggcttgaaatcataggcacgaggccatttttcctatattttgccacgggatcgaaaccttgtgaaaatgatgaacaaggtccgcatgtcctggctcaataccataaccatgaccgcgctattcctggttaatacctggaatgtacatggcctcaaaaatggagcttaccttccatgcactc

SEQ ID NO: 4114 - DNA, 2440 bp, Heterodera glycines
  unsure (1)..(2440): unsure at all n locations
ccacaatcccccggaggggcaggtccttggcctgtgtaccacaatcccacgaaggggcaggtccttggcctgtgaaccacaatcccccggaggggcaggtccttggccggtgaaccacaatcccccggaggggcaggtccttgaccggtgaaccacaatcccccggaggggcaggtccttggccggtgaaccacaatcccccgaaggggcaggtccttggccggtgaaccacaatcccccggaggggcaggtccttagccggtgaaccacaatcccccggaggggcaggtccttggccggtgaaccacaatcccccgaaggggcaggtccttggccggtgaaccacaatcccccagaggggcaggtccttggccggtgaaccacaatcccccggaggggcaggtccttggccggtgaaccacaatcccccgaaggggcaggtccttggccggtgaaccacaatcacccggaggggcaggtccttagccggtgaaccacaatcccccggaggggcaggtccttggcctgtgaaccacaatcccacgaaggggcaggtccttggcctgtgaaccacaatcccccggaggggcaggtccttggccggtgaaccacaatcccccggaggggcaggtccttggccggtgaaccacaatcccccggaggggcaggtccttggccggtgaaccacaatcccccggaggggcaggtccttggccggtgaaccacaatcccccggaggggcaggtccttggccggtgaaccacaatcccccggagggcaggtccttggccggtgaacaattgcccatcagtcatcaatgctggttgttgtttgttatttctaggataaaaaaatgaaaaaattgccattttgaaaatttttatttttaaaaaaccatcccaataagagtgtttagggggatgggaccatccccataatagtgtttaaggggatgggagccatccccataagagtgtttacggggatgggagccatccccataagagtgtttaaggggatgggaccatccccataagagtgtctaaggggatgggatccgtccccataagagagctaggggataaggggatgggaccatccccataagagtgtctaaagggatgggaccatccccataagagtgtctaaggggatgggatttgtccccataagagcgtttatggtgatgggacccatccccatgagagtttttaagaggatggcatccgtccccattagaattaaattttcatgaaattttttgtcacttataccatttagagtagactcaatagaaccaagcatacttggtgtctttatgtcgatcgcaacgagacgcgtctaaaaacaccaaaaacgctttgttctgttgagtttacactaaatgataagaaaaaatcggtggtaaacaatgtcaaaatttggtgaccaccaatttagcacatattaaataaacaccaatttgacaaaacccaccaaaaatccgcgctttcgtacagaagaaggcaattgttggttgatcaccgcaacaacaaatcctttgaaaatcgaacaccgccagcaacagtagaaacttacaaaataattatatcaaaatcttaaaaaaaataaaagctaattctggccataaaatatggatcaaaaagcgaaatatatagaataaaattgcaagaaatttatataaatataattgattttgtaagttatacacttaaaaagtcagatactgttattaataaagtatttgaataaaaaaaatttagttgaaagccaaccaaaaagcaatacttttcattttttcttacttttgagacagatttaccaactttcattaaaaaaaattagataaacaatgatttcagtaaatgatctgattcttaggggtcaaaagccaaatggttgccgctcgaacaaagtatttttggaaaagcttaatgaagcgatataactaacatatggacataatgcaaaatatggacaatttgaaataggacataaaacgcgtttttctctatttttaaggctttattcctgtaaaattgatcaacccttagatttgttatgaattttcaaatattaggccaaaatcccgagggccaaaaaattgccaaaaaataaagaatttttaaaaaattcaaaaaatcatgaaacgaaaaacaaacatcatattcgtactcagcatatcaaaataccccagaaaaatatttttcacccccattttcgtccgaaaaaaaatttccgaaaatttctagggggcctagctcgaaaatttttgaaaattttacatcatgtagtacaccattcgatagagcttaaaaagctctacaattttgctctaaggccatttttggctaaaaccaactcctgacgangtatgggcccgggactcaaatgtcccgcttangccaaaaatttttctatttccgtgaaaaaatcgaaa

SEQ ID NO: 4115 - DNA, 2009 bp, Heterodera glycines
gagtgtacgctaaatggtgggagtgacagtttaggtggtcacaaattttcatgaaattttttgtcacttataccatttagcgtagactcaatagaaccaagcatacttggtgtctttaggtcgatcgcaacgatacgcgtctaaaaacaccaaaaacgctttgttctgttgagtttacactaaatgataagaaaaaatcggtggtaaacaatgtcaaaattttgtgaccacgaatttagcacatttagtaataaaatttgataaacccaccaaaaattcacgtccttgacgaattcgtacacaagggggtaattgttggtcgatacagcaactccaaacccttttaaaatcgaacaccgccagccaacagtagaaacttacaaaataattatatctaaatataaaaaataataatctcgaaatatggcccagaaaacatagacaaaaagtgaaagatatagacataaaactgcaaaaaatggacataaattttacaattaattttttaagtttgtaaaaacattttaaaaagactgatactgtattaagaattaaagaaaaactaaataactaaaaaaattttgttattgcaaatcaaccaaaaagcgatattttaattttttcttacatttgggagcgctttaccaacaacggaacacacaaaattcattacctacttgacacaaaaatacggaagatttaggatcaaaaatattgttgtttgttattgttagaataaaaaacaaagattcaaaattaggccatccctttagtcaatcttaaagggatggaccatacctttaggccatccctttagtcaatcttaaagggatggatccatccctttagacactgttaaagggatgaagacattatttttaaaatagtaaaaaagacgtatggtcaatcttaaagggattgatccatccctttaggcatccctttagtcaatcttaaagggatggatccatccctttagtcagtggtaaagggatggagacattattattggatccatccctttagtcaatcataaagggatggatccatccctttagtcactggtaaagggatggagacattatttttaaaatagtaaaaaagacgtttagtcaatcttaaagggatggatccatggtaaagggatggagacaatatttttggatccatccctttagtcaatcttaaagggatggatccatccctttagtcactggtaaagggatggagacattatttttaaaatagtaaaaaagacgtttagtcaatcttaaagggatggatccatggtaaagggatggagacaatatttttggatccatccctttagtcaatcttaaagggatggatccatcaatcttaaagggatggatccatccctttagtcactggtaaagggatggagacattattttaaaaataaacctcaaaactcgtggatttttgcatttttttaggaatcttgtctgtgaataaatatattataaattgcaaaaataaatgagcttacaagtcttatcgaaatttttcataattttatcaaaaatatgtgtcatgaaaatctgaagattacgtaagatgtattatgacaaattcttattgtttacatattgctagaataataaaaaaaataaaaattggcattatgaaacttttttagtttctctctttaacacagtctctcgacactctaatagtactgcccccccctcacacaaaatggtagccatccctttagtcaatcttaaagggatggaccatacctttaggccatccctttagtcaatcttaaagggatggaccatacctttaggccatccctttagtcaatcttaaagggatggatccatccctttagacactgctaaagggatggatccaatacgtttaggaggatgggattcgtcactatacgcatggattctgaggccttagcgttatcctaaattaatgctaaccttttggttattttgtccgtcagatttcacgttaattgcagtcttattttt

SEQ ID NO: 4116 - DNA, 1982 bp, Heterodera glycines
ctcgacactctaatagtactgcccccccctcacacaaaatggtagccatccctttagtcaatcttaagatgttgtccatcctcctagcaaacggtatggggatggtggccatccctctagcaaacggtatggggatggtagctatccccatagcaaacggtatggggatggtgtccatcataggattcatcactatacgcagggattctgaggctttcccgaagaggtaaacgaaatctgatttcagattcgtgatcagcgtcctaaataacctctaaagacatatttctggaagtttttgggcgaaaaaatttccccactcgaaaaccatgtgcacccccctatggtcccgaattccaaaatcacttttatttttataactttttactaaaaaatgataaaaacatgaaataaaatttatcaaatagagcaaaaaattgcggatttttgggctatttttattttacaaaatatcttttcagaaccgagtagtgaatttttttctgaaaattcgaaaatttccagaatttctggaataactttttttatattcttgatagaaataccaaataaagggcaaaatttctccgatttttactccattttttaagcctctatacattaaaatagacctgatctaaactgagttatgaattttcaaactttaacccaaaatccagagggcaaaaaaagtgaccgattttcaaaaaaatttaaaaaattccaaaatttcccaaacaaaaaacaaacatcatattcgtgctcagcaccttattttaccccagaaaaatatttttcaccccacttctcgccctaaaaaaaatttttgaaaatttctagggggcctagctcgaaaatttttgaaaattttccgacacatggcacaccattcgatagagcttaaaatgctctacaaaaatgttcaaaggcaatttttggctaaaaccgatccctgacgagttatacgcccgggactcaaatgtcccgctcaggccaaaaattttttctatttccggaaaaaaaccgaaatttttccaaaaatcccaccaatcgatagagctcgaaaaacggttgcttgaaagtggtctccgttttccccggaaaaatcggcaaaaaatcataaaattcaaaaacccaaaaacctcttagggggcctagctcgagaaattttgaaaattttcgaattttttaaatttgaaaaaatcgggcttacaaaactctacaataagtccgctggccaccccccgctcagttcaaacgctaatgagttattcgcccggtactgaagtggacaaagttggtactgaaaagttgccaatttctgcagcccttcctattataggtagaggcctggaattttttttgaaaattagacaacacttcaacttaggttcctaccagcggaaactttttgatttatgtttcggaagaaaagttatgggccccgaactgcacgaaaaaacaggaaatcggtccccggtactcagttggccaccggatcggaaaattcgtatttttcccggatgccccgtctcgagctacccctcggtgcaaaatttcagccttctcgtctgggcaaattatatagtacatgtggcagttttaagtaaataaataataaaattagatgcaacgaaaaactgagctgattacgtaattaattatagctgtagcttagaagataataaacgaaagcgagttgagataataataataataataatttgtaatgaatttcaattacgcaatgagattttaatttaaattaactttttagttccttttatctatcacctttcggtttggcacagctaggggacaatttcaattcagatgatatccaagatatagacgtgttgtaataaatatatgtttcaattatcgcacccaaaaataaatatgaaatgcaataaagggaaaacggaggaggcgcacacggtaaaaaaattaattaattaatggaaaactgatggcataacaaa

SEQ ID NO: 4117 - DNA, 4144 bp, Heterodera glycines
  unsure (1)..(4144): unsure at all n locations
attttaggtcaaaaatcggtttaataacgcggaaaaaattgaaagccatcatcctcaaataagagatcatccagccggttttgaacaaaaaaaatgctaaattcaaaaattttggacttcagactttttatttgaattcgggtccgaggttcgcaattggctaaaatggatgcatatttcatgattaaagcgacctcgaaaactcaaggaacttgttttatttggaaaaatcgtttttttttaaatatttgtatcattgagacgcattttccgagccgaaaatttttggaaaaatattagaattcttattttagaaagcacgagagcatgctcaacctgaacatatttacaaaaacgcagccaaacacggcaattttagtgctaaaaatccagtgttgttgtcagagattgtgtcagtgatcgatttgttccgaacaatgccgcacttcccaatgttagagccaagtgatcaagtaattaattaattaattatgaattaaaaagccaattaaaaacgaaaaatgattttaacaaaacaaataatgaaagcaatcgaagaaacatataattaattcatggaaatatcaaaagcatttaattatgatcaatagggatgtcaattttatgtatattttttcctggattctccatgctctaattagtaggaaaaacactttcttttttgtgtttgcatataaaaatcgggatttttatttatatattcggggttttatacataatttacatatttagcgattttatatatatttggtatatattttggacttttttctgacctattttcatttttatatatattgatgatttttacggaaattttttggaaaacctcaaaaaatataaaatctctcgtaaatttttcgtagatattttcaatataaaaaattaatttttaaaatattaaaatgtgtttctaagcctatttaggtcattttatgcaatttgtgcctatttcaccctctacaaataatttttttgccaaaaataattatttaaaatttttttttagatattttgatacatattttaggtttttgtacatattttttacatatttatgtacatgttttgaccactttttgcacatgtttttgacatccctaatgtcaatgaatctgatgaatgagaagctgatcaaaaactcaatttatcaataaattattcattttgctaaatatatataataaaaattttaattaattaattttaggcaattcttttgagttttgttgccgttccattaattgatgtgaatgcccgcttttattcatcaaaaatcaactcacagatcgtcacagtgcttccaaacaactcatttagcccattgtacctttattacaataatccgttttatgccggcgataaaacgtaataaaaatttaatatttcggaaaatttttgctaaactttaataattaaattgctaattaattttccatgaatttctcaaactttttttgacattttaaaaataattcattaaacactaataaattttataaatgtttagctaaaaattaataattaaatgtttatttaattttccattaattttctcgatctttttttggcattttaaaaaaaaataatttaagcatccaaacactgtctgattcattgtacgtcaaatcaatgcgaccatttaataaattgcgactttctgacgaagaattccttttggtccgcgcattgatctcatcacattcaggcaataaatcaaattggaacaattttaattttctggaataaaatacggaaaatagcgaggtacttttcggttttaggcttaggcctcaaaatttaaaaaaatcattttaaaccaaaaaggccctatatttttatttcctttcaaaaaatttcaagaaattttgaatttttttataccccccccccccaaaatagcagcgcgcgctaaaatgccttcagctcgccctttgttgaccttttttttataaactttaaggtgtaagtccaaaagcaaaaaaaaaaaccaatagctaaataaacattaaaatattccctcaaaaatcaaaaagaacgaaaaataaattggcataaaatatcaaatttatgctaatttcaattataaagcatttaattgcaaaacttttttaaccaatttttcatccaaattacacaaaaaatgctaaaatttaaattaagaaatctaattataatatatatatatatatatatatatatatatatatatatatataatatatatatatatatatatatatatatatacaatatatattaattatatgttagttcaattttttcagcatttaattgcaaagcttttttaattaatttttcatccaaattacaaatgctaaaatttaaattttgaaaatctaattacaatataataaataaattaaaaatcaattttgtttcaattttttcagcagttaccggtctgtccgctgctggtcgtctcaccctgcagcatttatccgaacattatgccgatctgttgatgcaccttttgcgcatcaaccacggcaacatggcgggcgtacttcgctatgccgaattgatccatctgatcgagtcggtgttctccaccgcgaaacggcaccgtgaatttttcacctatttggccatggtcactgatcagggccgtttccatgccacaatcccgcccattttcatgccgatgattttgcatgggacgatggagaaagaatgaatgagtgatcaaaagccattggcatttgttgtcgcggggatggatctcgtcccacactcagcccgtgttgacgagccataattatgaattcgagaaattaacttataatttttgtatcactttgactaattaattatccattagagtgccggccggcaccatttttgtgcttttcctccatttgtgacaaaaaaaaattctccaaaaattagaaaatatttttattgatgttttttatttttagctttttttttattcctttattgcattactgtatgcgtttttaaaataaaaaaaaatatctgatcaggcgataagtaacccaccaaggaactaatttattggcgaaaaccataaaagaaaattgaataaattatgcgaaacaggccaaaaatgcccatttgtcacaaaagctctcagaaaagtagaaaaaaaatatatacatattatatatatttttttattttttgatcatttattgcattactgtaagttgttatcccacggtgctaccaccactactgtatgcaaatctgatccatcagcaggaacccatcaagcaacaggtttttataggcgaaaatcacaaaagaattaaataatttatgaccaaaagcgacgaaacaatggccagatatgctagaaatttaaaagtatatgaaattttttgaattttttcctttaaaattttttattaataaatttttccttttatattttaatttttcatttttattttaaaaaaataaatagactctcgagaacgaaatttaaattcgtttttgtttattaggtaaacaaattatgccccattaaattcattttaatctcatgacaaacaaatttatctaaaaattacttaaaaattgcataattattataataaatcattattattttatcttattcttgctaattaatattcgcgtgagctgctaaggaattggacaaataaggaacacattttctgtttcctggcatattatgttaagcgaattatacaaattagcacatccattaattagcgtgcccagcgaggacatttttctcatctataatacattgttaatgagctaattaatagaatttggcaaaaactcgggactcactcttaaaacactttcaagaccactaattgacaacnattaacggntcttcttatttatttcaacaaataaataattaaaaagtcaaaaaaattttcaatataattatcgtcacattttgtcatgacttttaaattgccatatgaaaagaaagatgaagtaatttatctcttccgtcctggggcaataaaattattatggttggggccgacgttttttgatgccgaattgaacccaaaaataattctttcttttttttatactatttttcccttttccttccaaccggaaaaggttttttatctttctaaataatttt

SEQ ID NO: 4118 - DNA, 1408 bp, Heterodera glycines
attttcactgggactcatttgtcccagtgctcagatggcattggttcgactttagactttgatcgtcaaaatcttttaaatgataccaaatttgttcggttttggtttatttaaagagtaataaaagccaaatttgctccattttcgagtttttaaccagttcaaaaaccgattttttggcatttccgcaactgctggagacctaattttcgtgcatagctcctcgagacgaatcgaatggcatatcatttgtgccgtttttctggaacgttcgggcgttcactttatttcacccagacagaatattgttaaaatgattctttttgcttttaattggttttgcgaaaggattcatttttttcgtctccttttcatataatcccttgaggggattaacaaaagttgacatgtatttatgatgtcattatgtatgatttaaaacttagcggaagtttatctttaagacaatggaactcaattagtaaaataagctgagaatgatgtcatttaagaaagggaaaacaaaaattgattaaaaaaaatcaaaactaattaatttatgaatattttaatttgttattcatttaatttgcacttttatataggcacagaacgaaaatttgttcggcgcctatttgtctcggggaatgttcagctgcggcgccaaatatgtgggcacattgcaaagactgaaaagaatcattgaggtaaaaaggaggcagaaatgacagaaatttgaaaacaaaatgccaaataaatttaaaatatttaaaatataatttaaaatgttattgaatataaaggaagtgcatgccgactattcggaatgccaaaaatcgatgaagcaaatggacgaggacgagcaaatggcattcggaaaagggcacggcacagagcgatttgcgatgattgacgaactgatcaattgagcccaggggggcaatttgtggcaaaatcacaaaattcgaagcataaccatttgaaaaacattgaaatgatttttcattgtttgtgataaagcgaaacagcaatttgttaataaaatgccaaaatttgtgccaatttattcgctgtccaacaaaaattaattaatttttttcacaattcgtccccataattcgtttttgttttgttcgtcgtttcgccttttttctccatcattttgccctcatcagaaaatgcatctgcgcacttcgcctgcttcggtttggctttgagaaaatgctcaaacactttttgaaggttggcgtggaaaagcaatcggacctaaaaatgaaaaggaattaaaaataaaataaatatgaattagattaaggctaattaattaattttaaaaatatctggcaataagcaaaggttctcgaacctgcacaggtatcttgtgtttggatgaatgtgggagaagaat

SEQ ID NO: 4119 - DNA, 3973 bp, Heterodera glycines
  unsure (1)..(3973): unsure at all n locations
tccaaatgtcccacttttgtgtctatttgtccccttcccattttctcaccatgcaattcttcgttggcgtgaaattggcactgtatttgttgtccactttctgctgccccgtcgtcttcctcctctattggcacgtgccgtcctcttccctctcctcctcctcttcctcctgccccattttcgtcatcgtcaacgtcggccggtgccatttcttccgcctcacttttttgttgtttttgtcgctgtaaaaccattgcaattgttggccctcgtctcattattttgctgctggaaaatcgttcgttttcatccgccaaagtgcgcacgacggacggcaaaatgaggaggaaaagcgaactgagggggaaaagcgggggaaattaattaaatttagaatagaaatagaaattaaatttaaaaaatgactaacccaaaaaagaatgcattaatgtgagcggaatattggcgcatttcagcagaatgaatgcccaaatttgtgaacgcggcaaatgctcgtaaaatttggcggcgaatggcaaatgaatggcgcggaaagggacaaatgactgaatgaaaatgagagtgacaaaagcaaaacaatcgctggcggcgttctgaaaagcaattaattaaatagataaatgggtggtggtggcaattctcgcgttggcacttaatttattcgccaattgggcaaaaaaagggcaggtgaaatttgatcaaacgggggaaaaatgggacggaagtgggcgaaggagtgcgtcaaaaatgacaaattgacaggcgaatgatttgattaatatgccatcggaaagcaaattaaatttgggcactaaatttaacaaatcaaaaaagggagtgccaatgaaaatgaaatggaaaaaggaaattaggaaaaagagaaaaagcggaagaaaatggcacttttaaatggcgatcagcagcaaatggattaattgaataaaataaaccaatgtgttgctctgtttcttaattgggagcaacgaaatgactaaattgctaagtaaaaatcattttaagtaattgcatttaatttttaaatcttttcctgctccgaattttttttttacaaattccggtccctaagataattaattggtcatttatagaattagtagttggttaatgagatttgtctccatttaaatttgacagtcacaattcgccaaaggaaatgactaattaccgaaggaaattggttctttcatttgtttaaattatgtttacttttttacttttgttaagtctgttttttgttttccattgctttataaaaaatttttggaaatctttcgctccatttcatttttctttgtttggctttatgctttttctttctctttgtttttggatttgaatttgtttaaataatttatcagatgatgtcaaaaattcctctaaccaatatttgttccggcgaattcatcgccattaaacgaaaaaatgcaatttatttgtcattaaatttggtccgaatttctttgagcacgttttcatgtaaaatgacaccataacgaagcaaatttattggcattttttggggtttaaagaaaaaaaaggataaaattggcaaaaatgagcgaactacataaatgacgtttacaattaaattttgaatatttttcactttttattttttattttgcttttttgtttcctctattaattcgccagcagctgaattatgacaaatgatgacttcataattctaagcaaatgatgagtgaattgtggaaacggatgtgctgttaaatgatgtattcagacggaaagccaatgaatgacaaatggcaaatgccaaaatgaaacagacattaaaacggaacataaaaagctctaaagtgccaatgtttttgtagcaaagtcaagactctcgagtgcagattagtggtggaaggactatcatttaaaaggggaggagcactttttattttaggctaatgatgatgaggtaatgaatgggcgcgtggcacccaatgaaatgaatggtcgtccgcctttttgagaaaacggcgatttgtgccgtgttggcccagtgccaaattcagtttcgaaagtggggacaatgggggggngngggggggggggggtttgggcccaccccttccctccattctattgtttttgcccccactcttctgcccgcttgctaattgccttctccttctgctgcgacttttgctgcattttccggcatttaaccgagactctcgacactgtccatttgtttatttttggcacttgacttggcattttttatattgtcgggggcggggcaattggaattcaattggaattcaaagatgacgcggggagcgggaacataaataaattttactacattgaaaatgcattaatcaaatcaaaattcttttgcagagaagaagccaaaaataaatgttctgatctttattcttagcataaaagcaaagcgaatttatttatgattaaatttcaaaaaaaaaatatgaatttatttggcaaagataatccaaatccataaacaaaattaaatatttagaatcctaatgatttcatcagtgaaagattaatagcaatttgagcattttgttagccaaacttattaaagttcggtctaaaaaattatattaatgcaaaataaagcgaatttatttaaaatttaaaaaaagttaaattctttttaaataaaatatttcgacttctttacttttattatataaatgattattgtatgcaatattatcacgaatttgggcattttttagactaacttattaaagttaaatttatattaatgcaaaattaccattatggcgaagaataaatgtcatggcataatctaagactatttggcaatttggaaccacgtaaaaaattattaaattaagaaaaccatacaattataaaaccattaaatttggtccctgctaatgttaattgtttcctccgctttttgtgccccttttccagcatttttcgcttctctaattgatggggggggggttcacttttggcattttttgtgtgttatttttgtgccggaaaacatttaaattgtcatatgcgcaaatttgccgaaattcagaatgatggaatgaatggcgtgggaagtgccagagaggcaatttccatttttgtcaattgaagtcgagcggccggagtaaacaaaaaaaaaagaattgccgggggggagaacgcatgaataaaataaagttgtgacatttaacttaattaagttatgctattttagaatggcaaaacgtgtgaaaatttttgttttctttgttattaaagaaaagaaccgccaaatatggcaaattataacaatgactgatcatgagggctgtggcacaaaaatggcgaaataggcaaaaaaacataagaaaaccaccctaaaatagacaggaaataagcgtaaaatattcaaataactaattaaaatcgaaaagtatgcaattttttcaatttagaacaaattgcacttaaaattaaccaatttttctgttctgttatgatgaattacattcgaaaataaaaaaattatttcaaaatttttttgaaattacaacttatgggggttggttttttaaagtcattattttggtggttgtatttttgaagcgatgcgttaaaattttgacttgccgcttttcctcctacttcgattgcgccgatttttcgtccagtgccattcgcttcgtacaaaggtgaagctgacgctgtacttcagggcaatgacactttcgaacagtcgcgagtggcctgtgccggcgagggtcggctgggcaaatgccgacgacgcatcggcgaccgcggcggatggcatttgttggatgggcgcaaagcgccgcttttggggcgggactgattgggtcagcgcgaaaatggcctcatgtttttggcgccagctgagcgttttgtcaaaaagcaggtctttgatctgccaacgaactgaaattgttgacctgca

SEQ ID NO: 4120 - DNA, 1293 bp, Heterodera glycines
gaacaaagtgctcttgacaccagttgtggcgaatagtgatggtgtttccatgcattataaactgccaacagcgtgcaatgatctcctaataaaaaaagtcaagcggaattcgaattatttcaatgtttttgaaatataaagggcgacgacccaaataatccatcacatcttcgagtacactacgggcccccccccccgccctgcatacctttccgatttttttttaaactcagttttctagtttctgatcttttaaggggttttccactaaaaaatataaaaaaataaattttttctgaaaacatggaatttaattttttgaaattgtaaaaagatgaaaaatttttttaaacgttccactgtctcccaccttcaggttggtggaacttcgatttcttctcatccgctaattcttgcttttctttgggccgatagaaaacattttgcacagaaagcatggaaacaattgtcaaaatgtcgtcagcgcagccaagttcaacagacataatcagcattttagccaacgagggttccaaagggaattcggccatctgtgaattggtgagttagtggtcgatttgctgtaactttttcccacccgtcggccaagcctggtaagcaagccgtcctcgtcaagcgctgacaattggtagagctggtaaagcgccgttatcattgcctcggccggcggcgcatccatgaaatcgaactccaaaagattgttaatgcccatggccttcagttgaagcaaagtactggccaaattagttcgctgtatctctggaaccggcgtgggcaacatttcgtctctgaatgtgcaaaattttccattaaaatattttaattccgaattttgttaaattattgcttcttgcctgtatgctcgttccgtgtacagtctgtaacatttgccgggcccggttcgcccagctcgtccggcgcgttgtgctgcttgagcttgggaaatgggcgtcaccaccagcgagtccatgcccgattttgggttgtaaatcttttgcttaacaaaacccgggtcgaccacatagtaaatgccgtcgatggtaagtgacgtttccgcaatatttgtcgcaatgacaacccaaaaataaaaaccatcaaaatttgtaatatcgacaaactacggcacatacctttctcgtgccggggggagcaggctcgaaaattctggtctgcatttcacttggcaatgcgccgtaaaccgggagaatgatcaactcgggcacatcggaacccaactttttcatgcgctcatagagtatttcacatgaagtg

SEQ ID NO: 4121 - DNA, 2807 bp, Heterodera glycines
ctcgggacgcttcttcaccgccactttgagcagtcccaatagcacatcagtgtgaattgtgcgttcgtgtgcctcgtcgagcataatgcaggaataatgagtcaaatcgggatcaagcagacattcacgaagaagcattccgtcagtcatgtacttgattattgtgtcctggctgaaaataatataattaaaaaaagaacacactgaatgtattgtgtttggatttaaggactgaaagttacataccatgtgcagtcttcgaaacggattgtgtagccaatctcctggcccaatctgcagccaaactcctcgctgactctttttgcgacagacattgcagccacacgtctaaacaaattagtcaaattttcgttcatgaaaatcagttaaatatatttattcttacctgggctgtgtacaaccaattctgccccggttggcaaagccagactccaccaaatattgtgtgatttgagtagtctttcccgatccggtctctccgattacaattagtatttggttgtcttggactgcttgcaaaagtgcggtctttagtccaaagatcggcaaactctcgcgctgttccttgatgctcatcgatgtccgcttcccatatgtagctttccccccggcagtcacatgtttcagccattcaggcatatcctgaatcaaatgtataacataattaaagtctcataaaataaatgccccagatttgggaagttggttgttttgtgagtccatttctcggattagtctcgagtttttgccgaacagtgcaaatgcttacccgtttctgttgagccattgccccgtcgtcgtcttcgtcaactgccgacgcatttggtgccattggatcgtgtattcgcgaccggccaaggccgcttctctgtcgttcggcgtccttttctctttgtgcttggattttgacgtctcttctttcttttgacagtgctccctatgatggtgagagttcaatccaatcagaactgtttaaaattcaatccactgaacctgcatgagcgctgcttgagccagacttccgtccggatttttgaccaccttgaccggctcgagatcagcaacatgtttgccataacccttcagaaagtctgggtcgtcttcaacgagttcaatttcaatgtcttcgccatcgctttcctctgtaaaagagatggcaatttatttataacttccaatgtttcttttttagatctctctagtatcctaccttcgtagtttttcaagactcccaattcctggtcaaagtcaggtagatccatcattgtgattgcaccgccgccttgcatttgacggagttcccatcgctcaggcgtggacagacgaatgcgcgagggcttcgaattttgtgtgagctttgtcgacattttttcagaggacggattaagccaaggggcgtccgggttggtcagaaaactgttgtcggatcccgccacggcagcagcactgatcggcatagcggcgttcaagtctttgccggtctgctggtccacctccttcatcgacagagatactttcgagtcgactgtcttaatgacctgcaaaggggtggaattaccatttaaaatgtacaaaagaatatatcaaaaatgacaactcaccttgaccttcactctttgccctcggcgaagcacatcggccacggcattgacacgctcatttttgatttgtgaaatgtgcacaagtccctcggtgcggcggcgaaaaccttccaactgaaaaagtaaatggaaaaattatgggtttggaatttttggttaattagaaaattcagtaccaacaaatacctctataaaggctccaaagttcgtgatgttgttcactttgccatcataaattgcgttcatttcaacttcctctcgtagcggtttgctgcttttccggggcgaccgcgaccgactcgtccctccccctcccccccttcgtctgctgtgtggcgatcgactgcgtctgtcgtggcgtctcctcgactgggtttcacacgtccgttcactgtagtcacgccttcgccgttttcgcccgtcactgggacttctgctacgactgcgactctttgagcgacgcacctcttcatcctgaactcggattggtcgtgtaaaacaattggcactgaacttgaatagacaccttttttgtctgttgttcctcctcccatttctgcttcagtccctccaattcgtcgagcaaagtgttcgctgtgttcggcatggcaagcgccggcaccatttccttcaacgcacttttctcatcttttattgtggcgacaatggaaggggaattccgttgtctctttttcttttccatgttcaataccaagcggagaatatgttgagccaatgagtcgtcaaactgacaatgaaggcagtttattttttaaaacgccaataggacaattacatttttttattaaaaaaccaatttagtactaaagactgtactcaccccatcagccaggccatgctcctccaaacttttcttgaatttgtcaaatgttgacgatgttcgagccagctcaattataaattctgcaacatcgcgctcactaatgccaaaatgattctccaactctgtgacaactcttgacaccaaattcaaatgctccaaccggtcaagctcggattcaaccatcattaaattgcttctaaattccaaaatttattaaaacgaacaagtcagagagatttggcacaaaaaaactcatataaaggttttgtagtactgaaaatgacataatttatcctatttactgattcacattcgggagatatacatatatgctataaatc

SEQ ID NO: 4122 - DNA, 3885 bp, Heterodera glycines
  unsure (1)..(3885): unsure at all n locations
taactgattcacattcgtgtgttgtacatatatgcagttattcttgcatttcttttctcatctcatttatttcccagaagtgacccctcttcatcacagcaaacattttctcgcgcttctggcgccgctgtcttcgcatttgcgatttcgtaattgctgctgccgtgtcaatacggcccattgagtcgaagtcctaaattgaaaggcaaataaatttataattaagttaggtaaaagtcactaagaacacaaaactatgcatttgcaatgtatttacaatgttcggcgaagacgagttgtcctcgtcatattcctcgtcagaaacgcattccgtgtcaccaatttcggcttgttcaacgccaatgtccggctgattcaaaatggcggatgacgacgacacactttgattgagtgtcttttcgcgctttttcgcagtgattttgagcgattgtcgagcagatattgtggagtttgcagcgccactcttttggctgggaagggccgtgttctgctgctgaggcgcagtcgaagcgacaagcgcaggcgaagaattagccgacgaatgggccgctgtttcggcaacttgtttaaattcctgcaagaaaaattggagcatattagcaaccccccgttgttttgttttcaaaaattcacttgttccatgttgaagaattgttgcatcatttgcgctgtcaattgtgggttgaagtcgctaatgccaggcaataattggtcagtcttcgcgggaagtgcttcgtcatttcccatttcatgctcacttctgtccaaaccgaacggcatcctcaaaaaaaacaaacaaataatccatactcaattgaattgttagctgaaaaccaatacgttttagaacgacgttctctgtcgactttgtgtaatgcttgaacatatgaacctctctcgatggaataacctctggcactttcaaatgctgaaaaaagcaaaaatattatttaatttattagaaaaaataaatcatccaacaaaggggtgacgacttaagttagattttagtaataaacaatgtcgagtccaaagagctcttttacagactaaatttcagtgtgactcaatccatttacttttatgttttttgactaacaataagattgtaggggattcgaccagaagaaaaaagcaaaaagattgttattaatagtagcactattataaaatgatcaaaaatttccaaccattcaatgcatcatgagaactccagccaagtcgattgatgagatagttacaaatcaaatagccagaacggttaattccattgctacaacaaaccgcaattagcaaatctaaaggaaatggagaagctgaatacatggattgtcagaaatttgtatagaaccaaccattgtcactgttaagttccaaaaagtcgtctattgtttttatgaaagtttttacggcatcagtacgatacagaaagccgcggcctggacatggtatttctttgtagcaaatcccaagcccttcgatgtctcttcgacaaaaatatcttttagtattattgcagttaatcacaagtcccaatgaacgattagagaaagccaactgaaattaatcaattaattgtcaaaatttgtgataaaacctgttgtaataaagttaaagttgaaaaacgacactcctttgggattgatgtttgcaactcgggcaaaagtggtgttttaaatgcaaaaatcctcgatccctcaatgcttgcaccaagtggttggtattttatccaactaaagtaataaaattaagaatttaccaaattagaaaatgcttgattttattatattcaaaaggtatatcctcataatttactctgtgggtattttccgagatgttctgaccattaaaactaattggaagatgaccaagcaattctaattagaaaaagactgaaaaagtcagcaacggcacaatggctgggtcaacgcctccgcctttgttagacaaaatgatccataacgccaagttgcgtaattttatgcgcgttaattcaaaaaactagtcagattcaaaaaaactggtcgtttttttttgatcacccaacgcatcccaaacaaaaccttatacagaatatcactcgatagttttagaaagaaataaatacttttttttaattttattttttaaattaagataggaaaacgctaaaactctaattttaagggtaatacgctaaaaactaatttgtaagagaggatgtcaataccatggtaaataaatacctatattatatttgaaatttccatattttactctcacagggttgagaaatacaggcctaagacattgggagatgtcattgggaattcggaaataattgaacgtttgattgaaatctcaaaagtgggaaatatgccaaatttagtcatttctgtgagtcattttcactaatacttacttaattacccaattaatttccttataatcgataattaaagggtccgccaggctgtggaaagactacgagtgtttgggcattggcacgggacatgctcggagaaaaagttagggatgcttgtttggagctgaacgccagcgatgagcggtagtggaaaataaataatttaattgatataatatttaaaaaattttattatttaagaggaatcgacgtggtgcgcgaccgtataaaacgttttgcatcgacgaaagtgactttgccggagaacacgcacaaaattgttattttggacgaagcggacagcatgaccgaaggtgcacagcaagcattgcgtcgaataatggaggtaggtttatatttccagaagctctgatagtacttttttgattttcattctataaaacaattttatataacaattatgctcaggtattcagttccacaactcgttttgcgttcgcgtgtaatcagtcggacaaaattattggtgtattttccaaccataatctactgaatgggaaaaccttttagaaccccttcagtcccgctgtgccatcataaaatacggaaaattgacagaccaacaaatattggaaagacttgtttgcgtctgcaaaaaagagagtgtccaatataacgcggagggcctcaatgcgatactttacacagcacaaggggacatgcgacaggtgcttggggttgtcatatagccacttataaacagtgtttaaacatcgtatctaatgaattacgaaaagcaagtttattattaattaaatttcaactacaaaatttaaaccttttcaaggcactcaacaatctccaatgcaccgctgcgggctatggaactatcacaaaagactatgtgtacagagtgtgcgacgaaccacaccccgagaaaatgtgtaatattttcgactgttgcatcaacggtcgtacccaagaggcgttcgatttaattgacgagctttgctgtttggggtattctgtcgatgaccttgttggcgttatgttcaaaacggcggtaaaaaaaaaacattaaaatcctcgtaaacttcccctttagaaaatagcggatattcccgaaattttgcgtttggaattcattacggtattaatgtaccacggtgtagtgttgccacggaaatgcatttattccaggaaattgggaaatgtcatgccttggtggtgcagggggtggccactcgactgcaactcgccgggttattagcgcgtttgtcacaagcgaagaacagactcgagatgggagcttgatataacgagttctttgcataattttgtcagtcaatttttaataaattaagaatatttttttcaattgttatagtaagatttatttcgctttgctttttaaacattaaaagtgtaaagcaacatattatacacataagcaatcaaactanagtccttcatttgtccctcattttcattttgcattt

SEQ ID NO: 4123 - DNA, 1308 bp, Heterodera glycines
  unsure (1)..(1308): unsure at all n locations
atagaagagatcgcagcgacattnttgcacgaaaatcgcctcncaccagaaagttttgccgattcatntaatgagtaaatgtcacaagttgaccctaaattagtacaatgaaaaagtaattgaaaatcgaataaatccacaactcacgactgacttcggatggattttcggaaatgcattcgaattccttgaacagcttcgagttgcgcagagttagcaagtcacaacgatagtccaacttctggaaaacttccaattgtcgtaagaaagacggatttggcctcaaaaatataaaaatttatatgcattacaaaatatgttcgtttaactgaacgcatgaacgtcgcgctttcacaaaagaaaacgaatcgttaacattccatttgtatttcctcatcagataagccatcacaactgttgccgatcggcttatgccacattgactgaatatagataggctactacattttgaacctactaacattaaattcgaataaaaccctaatgaaaaaatataataatatgtatatataatattggtatgcccaactgaccaatgaacaacaatgttgattcctctgttcactgagtcttcgacgtaatccaatgcattttgcagcttctgactcgccaacagctcctccgactcgacatcagccattcgaatgtgtcggtactccacattttgaaggtgccgaatttggggaatatggtcaagtgcaacagtgagaacacggccaatcaaaaaagtggaagaaacaagacacaacaaaacccatttatcaccttagcatcaatcaaatacttttgagcatattcaatccaaaaactgaggaagagatggtcctcaatttgagacaacatttggcattaaatttggcactgaacaaaggttgaggaacaagccaataaaaaagatagcatagtaagtaactgatataataatgcaacaattggttaattagataatgactattttatttttataaaaaatataaggattggcacattaaatgtgtttttcaatagaatgttcgatttttaaaaggcctgatttgagctgaaatgagtctgcctcgtctctgtggactgagcaatgctttttattcattgcacaaaaccgtaactctgtgccatgcattgtgcagcagcccacggacattccaaagtgcgatccccgtctcgggctgtgtgttataagaacggtccgtcgccttgcacaccaattccatccgaccattccgaattgttgcctcggaaatgggcagttccacactccacaaagtccaaccccacattgttctatgt

SEQ ID NO: 4124 - DNA, 166 bp, Heterodera glycines
ggggggggggggttaaagtaaaagtgtcaaaattgctaattctggttaaaaaagaagtactattagaataatgtcttacttaccaataattacttccggtcgcattgctttttcaaatggaattgaagcaccgtaacgagaaccttaaatgactattaataggggt

SEQ ID NO: 4125 - DNA, 3348 bp, Heterodera glycines
attaaaaaagcccgaaatatggactaaaaagctcaaaaatgggccaaatatggactaaaaactacaaattataagttttaaactctcaaaagttccaaaaagtggatgtgtatttataaattcaatctttactaaagcagacttaaaaaatacactaaaacagctaaaaatggattttaaatgccaaatcttatcaaattctagcttcacaattgcaaaccaaatacatttcaaattttgtactaataattagggctaatatttttaggcaaaagcctattttttcctgaactccccgtggcctgaaacgtacgaaaaacatgtttttttggggatgttgttaagctacttttcgagttattagtgcctattttctcggcttttatttttagcgcctaaaaaattttgaaagaacctatcatttgagcagaaaaaatatgttaatccatataatttacgaccctacaaacaaaatatgtgtttattgtggttgctaatcttgttgtcgtcattcatatggatttgatcaaaacgctattattattgttaatcaaaatgcgtaaatcttgattttttgtgagaatcaactttttgtataattttgagtagagaagaaatgatagttagtttgattcgtatcatcatttgctgatctcaaaggcgtcaatgaagatttttctttttaaattgatgattttcaaaactaaaatcacctaaaattgctaatttttagtgaaaatccagaagcatcgatgaattatttaaaaagatgcctttcgaaccaaaagcgagtggtactataaaattcaatggtgacattgttcaccggcgccgccgtcttcccaatttggcatcgcttcaaacaataaatattagagacaggaattttcaaatggccgagactatgcaaaatttggtgtggatttaaacaagcaggaaaaaaagttaaacaggatgaagtgaattcgtgttttctctattaacagagataaagaaatagtacgccaaaaagagatgttttttctatgcacttagtctctatttattggtacatagcagggatgtgccgaatcggaatcgtaatcgtaatcggaatcgcaattaatcggattttgggccataatcggaatcggataatcgtaatcggattttggcttgaaatccgattattacacccataagaattgacctttgaaggaattttttttagcgagaataccaatgaattttgaaaaaaatgttttctgaaacgaatgttttaatcttattttaacataatgactgaaattaaatttttctcacaaagcagtgccgggttaattctccccgatataatcaagttttttgttatttagcaaaaatgtcaaagtctttgaagggttgttaatggtgtcagtttaagaacatggcagccaattcaagtatttttgaatcccggacccgaattcgaaccaaaagtcgaaattttgaagaaaaaatttgttgggacattaaagcagaaaagaaccatgaatgaattattactaagttgcaattttcctatcaggtgcgttggtcatccaccttccaaatgcttgatcgttttttgcaaaacaaaacagttgttgggcttctgtatgcagaagacatttcgtttccgaatctaagcaatcaaaaaaatatttctcagccccagctacatcgactgaaagcgaacggcttttctccaccgctgggttgattgtgacagatctgagaaaacgtttattgcctcagaatgtggacaaacttttatttttgcatcacaatcttaaaatttatgattttgattatgaataaaatttttgggaaaaaattatttttaaaaaatcggaatcgtaatcggaatcgcaattaatcggattttgggccataatcgtaatcggttttaaaaccgtatcggatttttggccataatcggaatcggcgatttaatcggaatcggattttgtctggctcggcacatcactggtgcacatatgatgaatgcgtatgcgtaagtaacggacaagcatctttcaaactgttaaaaaaataattaaaacatttaaaaaacacaaccgtttgatggccgctgccaacgattcaaaatgttcttcttgctgctgtttgaacacaacctcccatccttcgatggtgtccaatacttaaattcttttttagataaaaaaatataattctatatcacttaccgttaatatagtccgtccaaaaattgtacttgttctccgcatgtgtatccgcatgggaccaacagcctgtcacaaagtaatccgcagcagctttccaacaatcaaataaattttgtattatttgaaaacgttcggtatccttcttcttttcctcaggaaattgactaaataaaatggttgctgctgattatagaaaaaaatttaataacacttgaaaattataatttcatgcaaaaatcacttcatccgcttatccgggtgacaaagaagtgcataacgtctatatttacgaacaactgcactcgagccttctgtagtgatgctttccgatgcagtaatttgcccctgcccacttgagggtgactctacaccaagcactttaaaaagcgaaagcatgccaaacaggtggcgcaagtcaattatcaagccgcgcacgttatcaaacattgttggtttttcacaagtgccacgaactctggcccctgccccaaaccactcattaaattcctcctcactcatcactcgctctgtagaagacatttgacaatgttattgcaaatataaatctgtttctaaacaaatttgatttaaaaatcaattttcaaaacagataacacgaaaaaacgcataaaagataatgcttgtaaatgaacgaaataatataatcaaaatttaattaaaaagtcaaattcatcataaaaccacaaagaagcataacacatgctgcactccaagtatctcatttaaaattgcctatggcgcagtaaattggacagcggcggctggtaatacaagctccgtgttggacaacctgaattggatcaatcttagcattttaaatttttttcaaaaaactaaacaaaaaaatactgataagcactttgagtatataatttgtaaaattccttttaaggaggatgtgaaaatttaagaaaaataaaaagacaatattggtgtcccgcaatgtcgaatgcaccgccgggagctatttgtttgatcggtttatactgacttactaactccactttgtaacagaggccgacaattcgtaaatttgcccgctattaagtggtgacatcgccacaacgttcactcagtcaacaaagttttttaagctaaacataattatttctcaaat

SEQ ID NO: 4126 - DNA, 4156 bp, Heterodera glycines
  unsure (1)..(4156): unsure at all n locations
ccaaacataaactgaaaaatatgcttttgaaaccaaagatgttcgcatgtcagttttttacaaaatcaaacatttctgttaaagaagtttgaaattatactttagcaattgaaaaataaagaatatttaattattatttttaaaattttattatacagaaattgattattactgacaaataatttttcaaaaaccgttatctaatcagacaaatcaaccagaccagttctgacacgcagctgctccgtgtgaccacaaaagtgcccctgcaaggtggtcaaaacgtgagccttacgcaaacgccgcctagcctggcctcattgccctttcaacaacgttaacagttgaacaacggtcgttcctcattcagaaggaaacaaaccaccattaacatgaattaaattaaaaaaatgtttactcccagtcatccaaaaaaccgtaaatttttaagactttttactaaacaaaatttcgaagagattaagaaaactaaaaatagaatttatagaggagaaacggcattgggcgggggcagtgtcgtgcccctaaacacacagccttttaaattgaaaaaaaaaattgttgtccgactcaccgcattgttcccaacgtggtcatgcgcggtcaggtcagccctatgcttgattaaaaagcggacaatggagtcctggtttgtctggacggccaattttagatgatttttaataaaaatattgtaaatgtaataataaaatgaaagcaacatgctaaagaatgcaccttacacaaagaaaaaatataaatggtttgaatttatatagatatataaaccatctaaaaagcattatgatatagcgtatataccctctttatatgtattaaatgaaaaagaacaaaaaatttaataaatgtcccgaatgtcctattaaattttgttttgttctaagcccctgccatcaatgcgatactcatcgaatcactttttaatcatcagaagacaagtaaatcacatcatccgactcgtcgttcacagagctgccactactatcatgctgatatgaaaaacaatttgatgttgacggcatttttgtatttttctgattctgttgcccatgtcgttgacgcttcttaggacagttcttggcaaaatgccccgtagtgttgcaggacgagcagcttaaaaatgtaataaatagatcaataaagaagaaagatacaaactcacagatttttgaagcaactttgtttcggcgagacggtttacgacgtggctccggacattgattcgttttgtgcgctatactcgcacaattccagcatttgtccggatcccgtgcgcttgcattctcacaaagtgctataaagtataaatgaatagttcctaattataagaagtaaatatttttctcttacggtaactatcgggatgacgatatgggcatgacaattgcgtgtggccgcccctgcccaatggccgttgcacgccacagcaaaaacaacgaattagttgctgcacatcatacttttgcaacaattcaatctcatccgctggtctcgcatttcgcggtaagcgccctagacttatagtacttgaactacgtccctgcctcaatgttggtttctttgcagtcgcgtgcacagatgatgaatgcgtatgcgtaagtaacggacaagcatctttcaaactgttaaaaaaataattaaaacatttaaaaaacacaaccgtttgatggccgctgccaacgattcaaaatgttcttcttgctgctgtttcaacacaacctcccatccttcgatggtgtccaatacttaaattcttttttagataaaaaaatataattctatatcacttaccgttaatatagtccgtccaaaaattgtacttgtctccgcatgtgtatccgcatgggaccaacagcctgtcacaaagtaatccgcagcagctttccaacaatcaaataaattttgtattatttgaaaacgttcggtatccttcttcttttcctcaggaaattgactaaataaaatggttgctgctgattatagaaaaaattttaataacacttgaaaattataatttcatgcaaaaatcacttcatccgcttatccgggtgacaaagaagtgcataacgtctatatttacgaacaactgcactcgagccttctgtagtgatgttttccgatgcagtaatttgcccctacccacttgagggtgactctacaccaagcactttaaaaagcgaaagcatgccaaacaggtggcgcaagtcaattatcaagccgcgcacgttatcaaacattgttggtttttcacaagtgccacgaactctggcccctgccccaaaccactcattaaattcctcctcactcatcactcgctctgtaggcaaaatgccccgtagtgttgcaggacgagcagcttaaaaatgtaataaatagatcaataaagaagaaagatacaaactcacagatttttgaagcaactttgtttcggcgagacggtttacgacgtggctccggacattgattcgttttgtgcgctatactcgcacaattccagcatttgtccggatcccgtgcgcttgcattctcacaaagtgctataaaaggccgcccctgcccaatggccgttgcacgccacagcaaaaacaacgaattagttgctgcacatcatacttttgcaacaattcaatctcatccgctggtctcgcatttcgcggtaagcgccctagacttatagtacttgaactacgtccctgcctcaatgttggtttctttgcagtcgcgtgcacagcagggatgtgccgaatcggaatcgtaatcgtaatcggaatcgcaattaatcggattttgggccataatcggaatcggataatcgtaatcggattttgccttgaaatccgattattacacccctaagaattgacctttgaaggaatttttttagcgagaataccaatgaattttgaaaaaaatgttttctgaaacgaatgttttaatcttattttaacataatgactgaaattaaatttttctcacaaagcagtgccggattaattctccccgatataatcaagttttttgttatttagcaaaaatgtcaaagtctttgaagggttgttaatggtgtcagtttaagaacatggcagccaattcacctatttttgaatcccggacccgaattcgaaccaaaagtcgaaattttgaagaaaaaatttgttgggacattaaagcagaaaagaaccatgaatgaattattactaagttgcaattttcccatcaggtgcgttggtcatccaccttccaaatgcttgatcgtttttgcaaaacaaaacagttgttgggcttctgtatgcagaagacatttcgtttccgaatctaagctatcaaaaaaatatttctcagccccagctacatcgacataaagcgaacggcttttctccaccgctgggttgattgtgacagatctgagaaaacgtttattgcctcagaatgtggacaaacttttatttttgcatcacaatcttaaaatttatgattttgattatgaataaaatttttgggaaaaaattattttaaaaaaatcggaatcgtaatcggaatcgcaattaatcggattttgggccataatcataatcggttttaaaaccgtatcggatttttggccataatcggaatcggattttgtctggctcggcacatccctggtttgtatcgaatttttcattcgccaccctgcccgcataggcggccaaggttttttgtcgccatcgtacacaggttgtagtttgtcatctcgtaggaacctcgtcgaaatcgatgaaacacttgcggttcgacgaaaatacgagcgtggaaggctcgtcgttaatgacgtttggatattcggtggaattgaacgaggaaatccgcagcgttgttttatggtgccggttattagtgatgctcgagaccaaaaatttcccgagactcgagaccgagactcgaccccgagactcgagaccgagacccaaaacctcgagaccgagaccaaaaaaacccgagacttttctcgagtcgagactcgagactctcgagcatcactaccggttatgcgacgcgacgctgccacgttacttccactcattactngaaacatcttgccaggcagcgtcatccacagtgacatgtggagagc

SEQ ID NO: 4127 - DNA, 1710 bp, Heterodera glycines
  unsure (1)..(1710): unsure at all n locations
atgatggcattgaactggtggacggcctcttccgcttgttctgcttctcgttgacacaactggacacacagccgacctaaaatatggaaaacagatttctgtaatataaaaaaactgcatattttatggattggtgaaacatgaaggatatatatgggtgcccaaattgaaaattcaaaattcaacccaaaagttatagactaggtttttgccacaaaaaattggaatgcaatggaaaaattaaaaaaaaattattatttttttgtaccttggtgggtggacaacgccgagcatcgcatatgatcagactctccagcaacttaaccctgaaattttttgacatgcttaagcggttaaaaacaagagtgacattgaagtcacagtcatttaggatattttaaaactgaaatcgttagactatcgagcattagcgaatcgtgcacatagcgcagtcggtagttttttattaaactgtttaatttttccaggggcgaaagggcaaggtgctcaaaacgtcgcggtctcaaaaatgggtgaagaataactgacagtgggccccaaaatgaattaacctcaaaaaatcaattaaattactcgttcaatatggcggccaaatgccgtggagtctccccgtgcgcattgttcacgttcgggtcggcgcccagacagagcagcaagcgcgtgatctgcaggctgcgattggacaccgcaaaatgcagtgccgtcattttgccactgtccgcctgctcgtcgaggccggcaccgtaggagagcaggcacatcaccatccctggataatggggaaaacaatttttaaataggcacaaaagtttggaggattggattcagcactttaattaacttatgtatgttcccggaacccaaaaattctggaagattttcaaaaaaacaaacaaacaaaatctttataaatttttttttgattttaggaaatttttttttgaatgccaattttaaagatcatatttttccgttcgctcttaccgaggtcttcacgcatcacgaactgatgcaacggggtgaagccgtccttgtctcggacgttcaggtccaattttcgtcgtcctgctcaagcaggttcatcaacatgcttttgttgaagcaatcatgcaatgatactatcatttttagtctaaaaagcaatcaaccaatattttgacacggcgattcattttgggctccttgtacaattaagttggttttttcgtcttagtggtctgtgcgttagtcaccaaaagggggtctcaggttcgagtccttcttatgttgtgtgttaatttcaatttctttttttacagaagaaggcagaattattttttcattaataaaagttttcgtgtcaacaaaaaatcatattcaaaagcgttggttacgtacaacatcgacaattttatgaaattttcttagcttataacttggtgaatactagagcaaataaaaccattttatgctcattttgaagggaaaattcttgagaatattgtaagttttatttggtttggccttaaatcgaggacttggctaaaaaagaattaaaattattgaaatgttcgtccctttcaaaaaatttttctagctttttaaatttcttaaaattttgcatagaccaatattttgaccccctctagcgatcccaagtttattttgtgaaacttaagttnttaactcgagatcggctcttctattttt

SEQ ID NO: 4128 - DNA, 5741 bp, Heterodera glycines
aatgagagagaaaaataaatgaaaaaaaggcatacagtaataaggaattgggaaacggtagaaaatgcctaccgtaacgattaaattcgggcgaattgtgcataagatagaaggacagactcagttgtttgtcgcccatttctgccctccccattttgcctctgattacaacggtgtccccggcgttcagtgcattttcaaattttttggaccaactttggcgttttgatttgacagcttcaggcttaaagtaaaaacaaattgaagtcgaagaagtaaaatcaattatgtttgatttttaagaaccttagaaaattcgaaatgaattaaaatatatttaaaaaattccaaaaagtccctaatttgtcaattcatttttaatttttttttcagcaaattccaaccctttgaagtcgaagaagaaaaaatcatttaagagttttgaaattttagaaattaaaaaattcgaaatgaattaaaatatattttaaaaaattccaaaaagtgcctaatttgtaaattcatttttaaattttttcagcaaattccaaccctttccttcacttggggctcttcaatactgcttgggtagacatcgcccgcaatctgagcaagtttaaattatttacatttattaaaattcgaatatttaataattattagggcttccttttttacgtaagaaaaatcgctaaatatgtaaataaattatgtctaaaaagatgaaatatagtataaaaccaccaatatataaataaaatttaaatttttttttaattctttgtaacgggtgaaataggcacaaaatgctaaaaaatgagctaagtaggcttagaatcaccttttagtatttaaaaattaatttttgtatttttttttggtaaaatcgatgttttaaaagtaattttcaaaaaaaaaataataactaagttatgaacttttttgggacacaataaaaattccttgaaaaatcctcaaaaattgcaaaatatgtacgaaaaaattcattaggggctatggagaatccaggaaaaatgtaattaaaaaagaaagccctaaataattataattggatttataaataagtgcctcaatttgcgtgaaattgtccaatttgtcctcctccgtccaccactccgatggttttggaaaatatttgaccgactttcggtcgccgattttcacttcgtagaaataattgtgcaccaccaattcaacatccaaatatttgtcctcccattcgttgtcattttccaccgactcaaacgatttgaaatggtggcccgccgaagcttttttgtccagcatttgctttctgataatgcccgcttcactttcttctccatccttaccacctttaatgcgctggtaaccgccggccttaatcagttgtcaacaataattaatatttaattaataattagcgaaatttaacaaatggtgaattgccccctattcggcaatcaatcctagaataagggtccctaatttgacccgaactcgaacacaaaaatatactttaaaacaagtaaaaattttggcgaaaattgcgccttctttatccaattaacaatttaagcattgctttacatccaaataaatagttattaaatgaattcattatttagtattacccttctaatcgccaatttaccgttgaaatattaatgattccatacggcggtttgtccacacggagcatcagcaaatccttttgattttcattgccaaagcgcagctcgatgccctccgggtttttgttcagtcgttgtcgcatgcgaatcgcacggcccacccccacgggctcgggcagtgcaaactgatgtgagtccacttcctggacagtggttgggcagtccacgctgaccacggggtgatccgaaagcagtggcggcacttcgtccgacggatggacaaactttggcacataattttcgattttttggcatttaccttatttacggtatttaaacccccccccccctgaatttgaacccccctctgtattaaaaccccctttttgaggggagttgaaaaatagaacccccgggggttcaaatatcgtaaatatggtaaattattggctaattactgtccctaattgcctaattgccctacccatgcgtgcatttcgcacctgcagtccctgtaaacgtgcaattgcattttgtcctggttgttcatcggcaacacgtccaacccgagcatccaaaggcccgtgtaattacgcaatttcgcgtctcttttgattttgttggataaatacgccttccgaatggcttcatcttttgagaatcttatttctcttccttaattacacatttcaaaattttcactcatttcgttaaattccttcacccgtttcgtccgttatttttgtcatcaaatctttcggatttccaaattcaatgttaaaattttgggtgtcgctcagattgtacctgtaaaataattaaaattaaaaatatttttccaatttcaatggtactatgtcgttatttaaaacatcataatgtgcgttatttaaaaaaccatcaaaataataattttgcttataacttttctctaaagcaaccaaatttttaattcttggtatcattagatagccctaagtgttctctattagcttgcaaaattcaaaaaaaatttattaactttcaaaaaagttatggccaaaaaatgttcaaaaaccaagttttttgagttcctctaatcataacttttttgaaactttacgaacttttttgtaattttgcagactaatagagaacacttagggctattaaataacatcaagaattaaaaatctggttggtttttagcaaaattataaatattttttcatgaaaaattttcatattgatggtttttaaatagcgactccgtcccattccaactccatttttaatttccacttttcttttgcaattgacaattcgatcattatgccgccaaatgctttcggcgcgctcacgcggacgccgtgccaatgacttgcgatttggtttatctttttgtcgaattttttctgatattccaaacactcttcagccactttgctctaaatatttgcaaatgagttgataaatgatttcataatttactgcttttccatttgtgggtttataataaatccaccctctttttctcccaattttcgtgccaatttactcggccataaaacggattttatgatccctgggaatttccgccaccaaacaaagaccacagaaaaccatcattaaatttaaaaatgataatgaaacaaaatttttcaattatagttggagaaaggaaagtaaataattattttattaaaattttaattaatttttcacattatcgatattcgtacccggcatttgattagtgattacttacttcctggtggttcggcacttggaattgaatttcaggactcatgccataagcccaatttgatccgctcgggtccaaactcccgagataacaaattaaaatgctgaaatatgacccgggatttttcaatcgttaagcattttaatcagggctcccagattaaaattttcaaaagcctcattttaggtcaaaaagccgcatttttacaaaattcattcaaaacactcttaaattgttcaaatgttatatttttgattgtccatgatcaatttgagcagttttttagcaataagcattttgtgttttgtggcacatttaattctaaattttcgttttgctgatattgaacctatgtagtaaaaaaaatacagatgcagactttttcaaaatattagaagatatattaaaaacccaaattattaaatgattgtcgaacattatgccaatttatcaaaagtgtgaactttttattgctgtgaatttctttaaatttatgccaaaaatttcagattcccgcggcaattccgttggccatcggcggtttcgctgtcccatttttggtcacattgtcttcaattctaaccttacttttgccattttgacttggtttctgatcggctattcctttttaaatattaatgtttaatgagattaatttcactaattgctcaaagaagaaattaggacaaaaataaataggaattatttaacccataaaagttatttataaatgctaatattaataattgggttgtttgttatcaaagttaattttaatattcatttcttctgatttttcaaagaagccaaagcctatttcttcctttttaccaaatatttctgttgctaaaatattttattctgatttgttcccgtttacccatttgtcttaaatatgaaatttaaatttccattcaaatttccatctgattggcgttttgtttgttgtctttgttcccaaattgttccgcttcggccattagcgcctccttcagctgttccgcctccaatcgttcgattgcttccgcatcaaatccaatcgctttcgtcccgcacggctcattttccgggtcgtggtacctaaggaaagtggaaaaatgccatagaataatcaatcatttgcatgtgtaagcaatgtaacaaaataaatcaaggaaaaatgagttaatctttaaacaaggttcgtaattgagtaatttactcttgattccaatttatgtgccaaaggaccgcaaaaaacggcccatttgatgaatttgcttaaaattagggttaagccccgacccctcggggaagaaatctcaggacgtttgagaggccagattcggtgatcggggagaggcacaatagggcggagagcctggagcccgagctcaaccctaattgaaattgtggcacttatgtctccaagataataaatagcacgaacaatgtgaaagaaaaaaatgcactaataacaacaagaaacatcttatatccgcaaatcaatgcatattaattgaaaaaatattaattaattcattgaattaaattattcttttgatttaatttaatttccagaaaaaggttttttcattgaaaaaaatgatgacaataaaaaaatgtcaaaagtaatcaatgccataaaaattgcaaaagtaataatttgggatgatatttatagttgctaaaaagtgccaaaactcgccctcggcttgcggcggcgttgtggtggttgttgtcgttcggtgatgctctatgcatttccgggctccctctttaatatgctttataacctaaagaaaaaggcacttttaaactggtaagtaaagatggaaaaattttacaaaagtgaaaaaaaataaaaattttgtgccaaaaaatcaaaaaatttaaagaaaaattaaaggttttgtcagctctggaggggaaaaattggaattttgaaacgaattttttgtgaaaaataatccaaattttcaaaaaaaaatttattttattttgaatatttaaaaaagacaatcgcttcaacaaaaatttgtcacagaaaatccgcggcacgccgcgcaaaaaaaaaatcccacagtcgcggattcaaattgccgcggtcgcgaaccgcggaaaaaacgccgccgtcccacccctagtatgaaaggcaaaaaaataaaagtaaaaagtggttgaaaaaagcaaaaaatacaataaaaacagaattagatttttgaatatacctacattaatttgtatgctgtcggcagcctggtcagcatttgccccctgcaggacggctgccactgcaagagcaccaatgaaaatgaacgccccgcgccctccgcgcacagcgcctccacggacagtcaggatgaagaaggacatggcgaaac

SEQ ID NO: 4129 - DNA, 1069 bp, Heterodera glycines
ttcgagaaatttctcaaggaaaaattaaaatgttttctaacggtttttcttttgaattttatgatgaattaatatttttacaaaaaaatttccaaaatcgctagaaaaatttccaattttttgcttgaaaattttaaagaaattttggcatcgagattttgtccggtgcccattggacttttgcctatcattcccacctcgacagagcaccggcggtggctcgttttcttcctcgtcaacagccaatggataatcggccatgtgttgttgttgggaaagatgtttggttggatctaaaacaaaacaattcgtcattaaatcggggttaaaaacaccttggtcagtgggaagcaaagtcgctgaattagctagaatatttttcgaatccgcttttcgtttccgttttggcgacgacactttgacagctaattgtaaggaatttgttttaaaacacattaaaaaataatttgagaaaggtcgaaagcaaaccagcattaggccgtgacgaattcggagttgacccgaccatacctaaaccaattggtgaaaagtgagacaaaaaagcgtgatttatcatgccaactttcaatttcgaggggataagtcagttaaagctagattcatgcgtttatagttctaaaaaatgaccattcttctgcatgtactgctcgacatcgcccgaggcaatggccatcggcgtcgaactgttgctggactgtggcattattcgcacattgccaattgtctaaatattattatcattaaaagccattcattataagcgggtgacccaactggaatgtgctgttgttgtggttggagttggtgaggcggcggcgcctgcaaagtgacaatggcacccgacggagtcagaaaatactgttgctgggaaggggccaactgctggtggtagggcgagtggtgtgacggaccaccgatcatcaccacgggggccgagacaggttggtgggtagaggaaggccctgtgggatgaacaaattgaaaacgatttaaaggtgggcaaaggagggggggggggggtaatttcgtgaatcccacgagtggccga

SEQ ID NO: 4130 - DNA, 3353 bp, Heterodera glycines
  unsure (1)..(3353): unsure at all n locations
ctttttaccttttccaatttcgtaaatttggcctctggggcatttcgtaaagacaaatttctgacccccccccccctatgaattggtcccattccgtttccattttggctggctcaccttcccccgttgtctgctgctgactccccttcggcgctatcgctgtcctcgctgccaccgccgccggtggcattccccccttgggctgaatgccgacaaaggtgcccttttgttggggtaagggtgagggtcgatgatgctgttgggtggaggcaacaaaattcgcttgggcgaccgccgagtgttgagaggagggcaccgccgacgaagtcaaactgacattggcaccgctaacaacactgtttgagaccattgcagctaaaaaacataaaatgaggacggaaaatggtcgattagtggttttttgtattcaggcctgaatttcagtaggtgcacccgaagtgctcctcttttttctcttccgacccaaaatttttggcccatgtaattttcctgaatcactggcgccataaacggacaattttggccattttgagacctaatttgtcaaaaatataaggccgggaaatttagaaaatttgggtcagattaagtgaattgagttatattttttggttacgggcctgattttgttggtaaaatcccattagtatgattggacaaagttagaaattacgcatgataaggtcgtttccggagcgaaagtacaaattgcggacttggtgttgctgttgttgctgctgctgaatgaccatccgttgctgttggtcatccgtcgtttgtcctatggaaaaacaaaaatcattccattctcaaaaaaacaaataaacattcagcaaatgcaatatattcatttgtgtctctcttttttatggaagtatcagtcaaaaattgcgagacttttgcaaaatttttgctttagggcccgacttaaattggcacaagcaatcgcttttgcaaggccaactccgtagcggaaataaagcccaaacttttcgtgacgtttgagtcccaatgtttccacaataattctcaaaccttggaaatgcgctgccgttggtgggccatttgttgcgatggcattgttcgggtcgaccgcgtccggcattggtgaaaagaaaaactgttgctgcgacggtatgacggggatcagctgctgatggcccgacgaagtggtctgaaaggaggagaaggaagatgcatttcaaagggaaatgccatggtttataatttaaataacaaattataatcctacccacccgtaataaaaatgccattaaaatttcttatgaagtaaatcttcataaaaacctggcgtatgaaatattgcgtaattccgccgctggcgcctccgttcggatacgccgccatcagactggcactgacagtgccgttgggcgtggcggcgagcgcaaagtttgacgggaaaagcatgccaccacccggggcgttcgatgagacggatggacaaaggggaaacaaagaggcggtggaagacgactgaaaagggaattgtgtgaaggcagaggaatgactcattgccaatcgaaagagggaaatcggaaaaaatgaagagacaaaaaagaacattaacgggacaaatagcaatttttatttttgttttatttaatcatctgtccatttccatagctgtttatattatagaaagcccttttttgtatgcttttttcatgcaccgaatgatatttacaacttgacaaggacttaaattcaaaatggagaagaatgggcctcgattttcgatcttacaaatatgccacaggacnccgccttcagaagccaatttttaccgacaaaagaattatgaaatagggttgaaagaccaaaattgaaaaaaggtaattccatgatacagaatttattccgttgtttccagttttatcccaatagttttcttgttgctcttgcactacaattccctttgcttgcctgttgaagttgttgctgctgctgcatatcgacaactgaaatggtcgttgtgttccgttgctccgccccctcgtcaattccgttcgtcgcgccattcttcgcttttggcgctgctggtgccttcttcttcttgggcgccttcggcttcaacatttgttggcccctctccgtgccgagttgcggcggttgcccttttgccattgttgcaattggtggttgtattgctgctgctgtactgcttgccgttgtcgtcgttgttagtattgccgtactgctcgccaatgtcgtcgcggttgctgccgacgaataggcaacaacaatttgctgttgcatcgacggatgcggtggggaaatttccgttccggctgccactctgttcaccgtgtcggcaaatttgtccagcgacgatgccgacatttctgtggttgtggtgaaagttgtacaggtgatactgcttgtacttgtcgtgtattccctctgcggctccttcgcttcaatgggtggtgtcaatggtgcaacaacactgccgacccgttgtggtacaacagcagcaaattttgttgttgccgaactaatggtgccattagcaagaactgaaattcaaaagcaattagcaatcagaacagccgaaaatgccctcctgccgcacttttctggttgtgctgttgcaccgcatttgttgctgttggtacagtttttgcgccactgaataccattgtcgaaccgctcgtcagctggccacgaacggatgcaccaccaatgcccaacagcccacttttcagagcccccggtttggcggcaattgccattgttgtgccactaatgttcgcaactgtcgacatcgttgtcgttgctgctgtccatgttggacaattggcatttgcggttgttgttgtagtcactgcagtgctgttcacttgttgggtctgcaaaagggacattttattttgtttttagtttttagtcattgcacgaaatttctcgactcttcattattttttttcttctcaaacctagaaatcttaggaaatgtttttgtaagaaattacaagaaaaaaatttttgaaactttttccagcgtattttcgaaattttatgatgagttactaagtttttctcaaaaattttcctaaaattcgctgaaaaaaatattttttccttgagtctttcatataaaaaatttcctaagattttttttcttgaaaatcttttaggtttgagaaatttttagaaaaaattttccgggggggggggggaactgcctagtaaaacaaaacaaggaaatatgactaccatttgaagtacctttttggccgttggccttggcaaaatgcgcgtcaccggctttggttggatgggcgcgcgcatcaacgcgagcgtcggcg

SEQ ID NO: 4131 - DNA, 1311 bp, Heterodera glycines
cagtggttaaaatgcaacaatcagtcaaaaatctcttacagttacgccgcttgaagccaatggcaccgccacccgctgtttggtgccgttttcgtcggtggtgtcactttgggatgggtttgttggtggcgttgttgttgaattagttgaaggagcggacgaagaaagtataatcgcagcagcagcaccagtcgaattcggtgcggatgaagaaacatcgtctgccgaagcaggcgtttttggtggcgctggcgaagtcgccgccgacggcggtgccattggggcgacggaatcggtcggctcgccaggggcgatggcaatcgcttcttctttgtcttcctttacgcttttcgacgcggccaccgttgaagcggtttctttttccgctattggattcggctgttcctaaaaattggcaaaattgtaaaagcgacaaaaatattaatttgttatggctgtactaatgctaaaatttgcgcttttttctaaattagtttaaaataaattccaaataccctaacagggtttatttagtctaaacacggtttggaacagcaatcttttgaataattgttggcagtccctggcacttgtattcaaaaaaccaaagggaagagacccttttgtcggtgctttgcctacccataaaattttagcaaaaaaggcacgcctctaatgcataaaacataaagcgagggatttattgctgctgcgctaatttatgcatttggaaattggacggacaaaaagtttcgcttttttcacgtcaccaaaacggagaagtccctttgattttgtcgacccctaatctatacaaatatgcacagcttcttttttacaattcatgaccccattgttcagtaagtttgaaccgtttgaacgtcctgctccgcaatgtgtcctccttcccctcctcctccgtcttttgctttattcgccatgtcttccgttgggttcgctattggcgttttgtcgtcaccatttgggtgaacaatgcctacaagttttttttgtttacttaattagtttttaaaaaatgccaatatttccaaccacaattggtgtttggtgttccgcgtcctgtgactgtggtcggagtggcgcacccgcttttgtccaaaattggcatcgccagcggcgattccgctccgcttgtgccgcctccgctgctttccgcgatttctagtcgaagtgagcgctccgagtcggcgctggtcgaacggcgactgccactgcacaccgacaaagggttggcgagcgaaggcgacgccgactcagtcccattttttgggaaaatgctgacgctgaact

SEQ ID NO: 4132 - DNA, 1379 bp, Heterodera glycines
  unsure (1)..(1379): unsure at all n locations
aagggaaatcaaaaatgcggcgggacaatagaaaatagattcaaagaattaagaaacaagcaaaagaaatgtttgcaaggagagagagtagggtgcgagagaaaaagatcataaacaaacaccagaaccaacggaaggggaaaaaggggggggggggaatcgcacagcggcggcggtcgaattcgtcggcgtcgtccaccaaccaaaattgctctttcactcgccaaccaagcggcgaagggggggggggcaatgttctttctgttctctgtgctctttcttctcttccgtcctcagcagccgcttagactctgctgctgggtaccaccgtccaaaagcaaccagtaaaaaccattcatccatccttccgccccctcccctttccccgctcattagccgaccatcgatagagaagggcggtgatgaataagccagagtttactgcatttgtaaaactcatgaaaaactcatccattcgcatcatgatgagtacagtagaaagacagcgaatcttttcaaacaaatcaagcaaaatcagcatcaacaagacatttacgcagatggattctgactttttcatgattcgcctcatcattaatgtccttttttctcccttgtcaattgtctttccctttttaagaagggaggggattagggaaaatgacaataaatgagagaagcgaaaaatggattttacataaaatatgcctgcacataaatgcataacgaataatgcacattcatttattaaagcagttgaatgcaaaacgctttaaattcttaggtggataggtctaaaggttagtaatagctatttttacagtaatataatttataaaaagtgggaggggaagttaattaagcgtgcgtacatttatgatacaacaaatcgcttttgaaaaaagatacctatacgcctaaattctaaataacgaatgtattcggctctaaggaatcggtcgttcggtcgactccaaacgcaattgcagttaaattggggaagggaaaagagcaaaaacggagacaaacgaatgaatggaatgatggtgcataatgtgaagagatgtgttgtgtatttgcgtaatgagtcggaagtgaaaggcaacaaacactttctccctccaaacggcgaaggaatgaaatgaaatgaatgagaggaaaaagtgagggagaaaagaaagggcagagaagggggaaaggaaaagggagagaaaggngaaagcgaggngaaaaagagagggcagagaatagggagagagtgagtgagacgctttttctccccgcgaggctccgccccnttcagcagcagcaagggacgancagcagccaatcagcgaccggcacacccatactctgcccccgcttgtctgcttctctgc

SEQ ID NO: 4133 - DNA, 1151 bp, Heterodera glycines
tccattcgttcgttcacttcgacgactgtgacgtggtgcgctccttctcttgcgcttctctccccccttcaccgcgttgtccacgatgcgacgcgtgtcgccctccggatgtccatgtttgtgctcaacctgccacaaaatgaggagtggtggtggtcagtctttaaaacgcctgcacaattaacaatggatggtaaagcgagcctcattttggcatcaagagttgaactcagcagttcaaattgtttgtggtagaattcaatttaattttctttactaaatgtgatttccaaaattatagaaaaaactatttgaaatttcgaatggttgggggggggatacgtcccactgagaccgtccctgatcaaaatggtccttttttagaaaagccaatgacgcacaatcagccttattatacaacaaacgatccgacctgttcggacttggtgcgcttgccctggttgctcttgatgacttcaccgtcacccctaaatgcagtaaaattgattaaaacagaaaaaaaatgtaaaacagagcaccaaattaggaccttcaccaaaaaacccacctctcatattcgtcagcgatttgagccgcggattgattgctcattttgttgatgattcgcgagttttattatttttggattctaaaaaatagaaacaatttaatacataaattggaaagaaaacatcgacttggacgaacaaatcaataaataagaaatggaagcaattttcgttgttgataatttatcgtttattgtggggtcgatgagtcatacaaataaatgttcggacttatatgtgaaataataggaaaatttttcttgaaatcggagataaaaatgagaacgcctttccttaagtgaagtgaattccatccagactcgtaaaatccgttttttgctttaactggaaaaagtgttcgcccgctgctacgctttctcaacaaaccaagcaatggaacgaacgccctaaagtgaacacaaaactaatatttgcgattctctttaaattttactttctcaaattttcccccagtaaaaggacggacaaatgcatcataattcattttgctgtcaagcaatttaagcgatccagccagaaaatggcgcttaattttggcaatgttaatcgcgttggtctaaa

SEQ ID NO: 4134 - DNA, 5263 bp, Heterodera glycines
  unsure (1)..(5263): unsure at all n locations
tcggtgttctttttcaagttggtcatcttttccttcggtaacatcggttcctacgcgttaaagttaacttcgtctgactgttatgactctgctgggcgtccgcttcccatccgcgaactgctcgccctttatttgaatgacaatgagcagcgcaacgaaaacagtgaaagtgacgacaccgaagcgcaaataaagacgtcgacaaaagtactgctcgagcacaaggatttgctgtgggacttcttctccattcaaattgttgaatatcattcagaagaagacaaaggcgagtcatttttcaacctaattctcaaaaaacaacaacaacagtgccatttcaaggacatccgaagccaatgttgagtgcgttgccctgcattttggaagggtatttgccccaaatggcgtccatccccgcgcttattaatcatttggcaagaaatgttgattactctgacgtaagtcaataattgataaaatagcactaacattgcctcatttctccaggaagtgctctgttattcgtcaattgcgcgagcactcagcgattttttcactccttttgtggttgaaaataactttgacgaagaggatacaaaagtgatggaagagcaccgacgaattcagatagtgcttcgttcaattattttcccaactctgaaaagtcgtttccttcccccgtcttcactttggccatcaattgaacgagtgactgacattgaaaaagccttcaaacaatttggtcgatgttgagactccattctcagggttgtctattttcataatccatccatttgtccaggcctgtgccgggccaactccatcttcaaattttgttttatcgtctctatttaatttttacttgtatgattattagcattataatttcttggaatttgaatttgcgtttgttaccaagaagcgaataatataactatagccaaaatttttgcttttcgttcatgaatttggtggtgtagcaatagtaatttttttttttttctggagatttcatacttacctattttaaaagggattgaaaaaatcatttttaatattacaacaaaaaatgttgattgtctgaattttttgcagagcgtttgcacagtgaacatgccgttgaactatccttcctactgccgtgccatcatttgtgagaacattttttaatgacttttgaagtaaaaatttgtttccgaaaatagagtgggcgggggcaaaattgtgtttctacagtaccaaattttataaaatgctcaggatttagaatcacacaatgaaacaagacaattttgttgaattaaattgaaatatccccttttcagccttgggacgttgccgtgttgaagttgtacgcagaaaccatgggaaatatttgggaccccctttttacgtacctggacgaagtcatcacttcagtgagtctatcatttacagcaaatagttggcattattttataattgacataaataagcaaagtgtacaatcctttattttccaaaataatcaatcagtcttattttatttaacatttagctggaggatcgcacgaattctccctctcctccgacgctcaacggcaccaatttggcatttcgtcaaacacaagcgcaacatttgctatggtgatcaggggccaaaaggatgcgttgctgctgatcggtttcgctctgtcaccgcttttgtcgccattttcccagttgccgacgatggcagtggattaatttgataataattgccgagacaaattcatttttttaatcataattttaatgtgccatcttttcaatttgcctctttttttgctcatttaattcaagtgtgaagtctgcgctagtttttaaccatttcggaacaatttggtttctgtgtacatgtttttgattgattgggtaattttagaagtgaattgttttaaattctttgattggggggtggggcttcgcacatacgtatgtttggggaaccgcccggttcgccgcggccacttcgccgcggccatttcgccgcgggtttttcgccgcggggtttttcgccgcggccagttcgccgcccgaagaaaaatgtccatttcgccgccataattaaaaaaaaatttgttatacactgtgttgcattagaatagggacaccctattttttgggagtttgaccacttcccatgaaccaatcgatctgaaattttaactgtacgtagcaattctgaaaatattaagattctaacaataagaatacgaaaggatgtcggaaaaaaattttacgaatttttttccaaaattggggtgttgcattagaatagggacacctgtgaaaattgaattaaatctcaacaactactaaaaagaaactgataaaacaaactaaataagaaagaacaaatcttttttcacatttctgtttattttgcgtacagaaatatgtcttttggggagagttatgttgaattttctaagttttcaggagaaattaagggccaaaaggcttaaatcgcctctaacatttgaccaaccgaatcaaactatcagccatcaacactaagataacgtacagacatcctttaagcattttttattcattttatgccataaaaaaggcattaaacacaaaatttgttccgaaacgcggacaagcgcattttgaatattatcgaaaattttgatgcccaaaatattgttgaatttctccggggaatttcaaataattgtgttatggacccgtaatttgattttgttcatttaaggttgttaattttttatgaaaaaggattttaataaagcatgattttttatacatagtgggttgtttaacataatttcaaaatttttcgagatttttaactatgacggcgaaatggacatttttcttcgggcggcgaactggccgcggcgaaaaagtccgcggcgaaaaagccggcggcgaaaaaaccccgcggcgaaaaacccgcggcgaagtggccgcggcgaaccgaccccgaccctatgtttgtgctcaattccgtttggtgtcactacaaatttttatttgattcatttcaccagttgtggttgttcaagttgtgtttccctaacgctttatttcattgaatcaaatattttttctttcaatttcacaatgattcattttcgacatggctcacgacacgggataaaaatgcaaatcttatttgttcgactcgtactgccccaattcgtactttttgcctgggggcggtagacactaacaagttagacagttcatatacttaaaaaacacatgaacaaagcgaattggggcaatttttgtatgacaaaccatggtcatgaaaaatcaataaattctctgtctgtctttctttgctttgtttttgcatatgttccttcatttattgtctgtctgctgctgctgaatgaatgaatgagttgatgcaaatgctggggatgtaaaacaatgtgtcttactgactgacccctgcctcttctcattacattcattcatttgtgaggtcattccgtcatttaagatggcacacaaaaaaagaacatgaacaaatgaatatttttggagataaaatttgtattaccatttattgttttttgtttctaaagccaacagtcaattcttcttttctttgaccaaacatttttatgtatgaatccgaaaacaaaacatatgtatgtacctaacaattctaaaccccccccccccttatgtatggttttttcatctgctggtccactaaattgcaaatttgttaaaattagggctgcaattttcgtctcaggtcgacacccgaaaactcggtttttgccggacctattagacggtgcaagccccggtaatactgccaaggctgccccccttttttgaagaaatttttgtttgttttcaaaagacatgaaagcatgtttcctagggtttttggggtcgctgatcaagaatccggcatcaatttcgaccaatttcgaaccccggacttgaatttgaacaaaagttcgataattcaaattttttgtatttttagttcaaaaccggctaaatacgcggaatcaatcaggaactcattaatacttcaataaaacattatataaaccattttggatctaaaatctgaaattcgaaaaatttgaattttcgactttttattcgggttcgggtccggggttcatgccggattcgtgattagcgaccctgaaaaccattggaagcatgttttcatgacttttgaaaacaaaaataaaattcttcaaaaaggggggcaaccatcggcagtattacccaagccccgccctagccttaaatatgttttgtccaatttataaatttagtcttttcatgaataatcaaatgaggacttttcgatcttccaaatatttttctcggttctcttgacttatacggtgtgaagaaaattgggcatttttaattaatttatttatttttaatggcatttcagtaccaacgaaaaatggataaacaaaatgaagtaaattttcgcaaaagggagcatgatttgaatcggttcaaaaaacggtttatacttgtcggatcaacttcccccacccctagatcgatctgtctcaacgagagctatcgattggtaccatattcttcgagattggtccacgagaaaaaaacaccgtataagtcaagatattcaaaatttggaaaaatatgaattttttaataattcaacactcttaaaagtgatcgaattcaaaaaatcaacataaagccaatttttctgcacattgaatcattatgtattggagtaatttgctggcgatggtcacttttaaatattagttaatgaggggaaggcataaaattacggcaaaacaatgacccaaaaaaggtgagtaataaaaataattatttttcgtaatttttattgtgcaaaacgtttatcggaagatggatggatttctcacaaaagagagttaaaatatgcaaatcaaaatcaaagaattaaatgacgaaaaggaaggaaaataaaaaagatatgaattaaaaaaaaattaaatttgttagcccgatcaaagtcaattacggtttttgctcttcataattttacaaaattttgatattatgcagatttaaattataatcataaatcattttacacatggtatgtgtccttgcacgtacttgctgctcaagtacataaacaaaccctttttgacaatatgtaaaataaggacaccccattttcgggcgtttgaccacttcccgtgaaccaaccgagtcggaatcttaanaaatatacttaacattctgctgaaaatat

SEQ ID NO: 4135 - DNA, 2835 bp, Heterodera glycines
cttatacttttctagatcgctgttgacattgctttgtttttttccccagacaattaggaaaggttacatcaattggaagtaaagtggtccacatgctgaagtcgttgctccaaccctttgacgacgacgtggaggaggacagcgaagaggattcgcatttggcagcaatcattgacacggcccaagtgattgcttttgattgtgagggctcacgggcgaggagtgtcctttttgtgtggcaatgttactaaagaatattttcaagaaacttgccgaccgtcaactgtctactgagggggaagacccttccgtcgggactgttgaccgcgcggcgaagccggcctggaaacggctcaagtcgcaactcggccgctccattgcgcgccgttttgaacgccgttgcaaatacatttacgccagttcggtggagtcgtgccacaaacggctgcaacaatcgcaggtgttagtcccgccgagcatgaagtttcgctgctaatttttgtttgtctgtttcaaaaagagtctaagctgggacgataattacgagataatacggtacatgtggagatgcttaaatgagaaaaaaagtgaagaggcatttgataatataatggagcaaattggtgaactttggccatgggaataaatggactttaccaaattattaggaaaaatatcaattgtgatgaacgttgttaaaataatgttgaaaactgttaatgatttgtcagtgtttaaatcagtaattttcctgctctacaaacaaaaaaatcaaccaacgtaattggtaccgaattggcactataaggtatgaatcggttcaaaaaacggtttaaacttgtcggatcaacttccccccacccctagatcgatctgtctcaacgagagctatcgattggtaccatattcttcgagattggtccacgagaaaaaaacaccgtataagtcaagatattctttttctcaatcttccagatattttctccaaattcttctgttgtttttgttcgatggcctttccctacacaattattcatgcgcaagctgatgtatgtttaaattacatatttttgcattgtttatggtcaattagtcaatttaaagtatttatttatatctttcaagttttacctgtacctattatttttgacaataatttattttcagaaaatccaattggcccttttccttttcccccactaatccttttttgcccactgctaatgaaaataaccaacattaaaaacaaacttcccctcgaactcaacgatgaactgcttcattttgtccccgagtttttttgccgaagggttttggttcgctccaacttttcatttttttgtttggtccaacggagtaaaagagcaaaacattggaaacacaaagtacaaaaaaatgggaaaaatggcacatgaaatgccgataaactgctgctaaatgtaattaaatgtgcgattcattttaggacatcaatgcacaggaggagcagaccacgtacggattcggggacaccatttaccgcccgttagtcccgcggcttgagactcatcgcgtgttgacttcctttgtcggcaatctttgtgcgcccaaccattttttccgaccagaccacaacagcggccgtttctgtgtggtgtctatcaacacgcatgaagctaacgtaattataaaattaaaatgtgattaaccgataaactgaattttaattatatatttcattcagccccttggtagttacaaaaatggaaaatgagttgacacagccaacaaaataaaatgtcttttctctacagaatttcgaaatgtttttcgtagtcaatttcatgttagcgttccccgaattctccattccctctgctgaaatggtttaaattggcaaaatgggcaccatcataatcaataattaagaataatattttcttattcgatattcagagagagatggtccgcactttctttcacgacaacgaggctgggttcaccaaaaaatattatttctgcgaactgcaattttttcctatcaatgaattggtaaatggaatttcggcgtttttcgcaaaacttcatttgtccattttgaccaattccggacaccggatccgaactcgaacaaaaagccgaaattcaaatttttcgagtttcagaaattgaaaaatttgaatttcggctttttgttagagttcggacccggtcttcgtaattttatacaaaattttcaggatttagaatcacacaatgaaacaagacaattttgttgaattaaattgaaatatccccttttcagccttgggacgttgccgtgttgaagttgtacgcagaaaccatgggaaatatttgggaccccctttttacgtacctggacgaagtcatcacttcagtgagtctatcatttacagcaaatagttggcattattttataattgacataaataagcaaagtgtacaatcctttattttccaaaataatcaatcagtcttattttatttaacatttagctggagaatggtgacatgccgccgtacatttccgaatcatcgccaaataattcggccaattcactcgagaatctcccgtcggttgaggcaccgcaatcggatgattagttggagtgaagacttttctggcatttctgttccttcaccaaaatgcctttgttgttgttgttggcataataaacaatgaattctccctcgtggattttttttcctctgctcgggttcattatctctcaacattacattaaatgttagcagctatttttttgggactttatctgtgtccagattaaaaaaaaaaaaaaattgggataaaaaaatcattgttcagcaaaattc

SEQ ID NO: 4136 - DNA, 985 bp, Heterodera glycines
  unsure (1)..(985): unsure at all n locations
aaaaaagaacccattttagggttttgctttttgagtaccaaacaaaggaggcggccaacgcagttttgcccattngcgatggacatcgccttgacaaaaaccacactttctcagcgtatccattcaccgctattcgaagcatgaaggagccggaaaaggactggaagaaaccggagagacaaccttatgtcgatttggtaaattaaagtgaattagaggaatttggccgacgacatttattgcccttcataatattaatgctaatttgttaagggtgacccatggtcttggctgcaaaaccccaagtgtttggatcagttcggtctcctctatgaatcgggccagggtggcactctccgtttggatgtgttttggaacgtcagaaatggcgagccaacgcccgtggacaatgcttctcgagaagtaattctgagtttcaaaattttcgagggccaattatgttcagaattggtccaatgaccttttcaaatggtctccccatgggacttatttggccacgatgaacaatgacaagcggaatcagcgactcggagccgtaatttggggcggcgaaaagttcgacagatttcaacgcttttcccacgagggcgtcaattaccttgacttttcgccaaatgagaagtgagtaattagttgtttcttttttgcgttatcgttcctttaatcgaatgtttttttcgatttgttttacccttttattttgcttttcttcagatttcttgttacttatgcttgcgatcagaacagcactcgtgataatgagaattgcttgcgcattttcgaggtgttcactggcgaactgaagaaggccttttcgccctctctgcgctccgctggccgtctccatgattggccctttctgaaatggtcacacgacgagaaattctttgcattttgccgtctccgtggcaattgcgtgaataactgtagcacggatgacttcatgctttgtgagaacaaagca

SEQ ID NO: 4137 - DNA, 1221 bp, Heterodera glycines
tgcaaacacgagagtataaccccaggcgcttccacgctctctctatgcgcatccgtacaacaacgggcaaaactgtggctgcactgtgtcttccaatcggcgcgtgtggtcctcaccggagtgtccaacccaagcagtgcaaataaaatggcggcacgcgttttgcgtcgcatccaacacacacagagcatcacactgggcatccaccagctgcgtgtggtcaacattgtcggtgttcagacctttccccagcgaatcagtgtggagcgacttcaaaacacgctgggtggcatctatgacccaacaattttcccagcccttcgttgtaaattgttgaatggagtcacgtgcctagtttatatttcggggaaggtcatcgtcactggggcaaagtctcttgatattttgcaccagtcatttaccaatttatcaaatattgtaccaaagtattttcgggcgtaatttattcctcacattattttttacaaatttaaacataaacaataaatatcaaattaaaggaaatattacaaaaaaaaatttaaaaaatattatcaaatcacaataaatcataacatcagaaccacccagagtgtccgggctgtgtgggatcttgctccacaaaatttctctttcgtcgatgcgtccgttgtccttcgttcggctgaccatcatcctccacatagccaaaggggcgcgtctgcatcccaggccgaacgcgccccttggcatagaagggtctgtagtctttgtgggcctcatgcgtgtagagatcggcgtacacattgcgatcaatttgcgggaagttgacgcgtatggcacgatgttcgccgcctccgtacacgtaaaggtcgtcattgtccaaggcatcatcgctaaaattcaatttttaatattatgtaaaagaataatatgttaaaaactcacattgggccgtcaatgttgtaagtggccagcgtcaggtctttcatcgcctcaaaggtgagcagctgttgcgcagtgtaggacagtcggaagctgcggatcttgaggttggcgcgctcgtccgtcccgtcccgagcggtgtgccggatgccgtagttcttggggccacccgcaacgaactcgacgatccgtcggtcggtgagctcgcgcttcatctgccccagcgcctcgccctctgctaacacacggacccaccctcttgttgacgtagtagatggagtcggtatctaaaacata

SEQ ID NO: 4138 - DNA, 5056 bp, Heterodera glycines
catgtagtcgtaaagatgaagccggccgtacgaggtgacgaaggctgccactggaaggcagttggtcggtggtgccctggcgaattccggtcgcttccgcacaacacagcggtccatgtgttcagagacgtggacaaagtccaacttgtccagcgttgggtcgtcgaggagcgcgtggaattcggccggggtccgcgtgtagcgaatctccgtctggcccacgcgctgcgcaagctttcccctgtggatgtcattttttttaaattaagcccccaaaatatttaccacaatgagttggccaatgttttggcgatgaggcgcaggccggggttgaactccattttggtggagtccaatcggatgccttccgtccgctcgaaatcgtccacaaatgcctggcgctgctcatgcgtggcacatccttctggccagcccgtcgcctgcaccttcagcccgacgaaggtgttgacgtagctgctgaacagcgtgccgtcccactcttcatagtcccagacctaatttgtgttttcgtgcacaaaattttttaatgagtgactacctcaaataggtcggtgaccacatagccaagctggagcgccttgttcagctcgacgtgcgtgtaggcggtcacccacgagcgcttgtcatcttcatgtcggcacggccgctgctgccgacggtcagcgcaccacgcacacaaaggaaaggtgaatcgcccgtcctttgtgcggtagccgagcaacggcacccggatgttgcgtggggcaagcacccggacgagcagcaacccacggaagatgttgtttttgggtgctgtccacgggagcggtgtcgttggcggacggagcagcacctcgcgcgtcaggacccgtgggttgccgacggggaagcggttgaccttctgcttttcatcatgaatatgcgcatgttttaaaagaaaaaaccgaccatcacgtatgggtagaggctgacaatgtcaatgcacaatatctcctcgtcgtcactgcacacgtggtgcagcttgaacggttcagtgcgccctcccctcagtgcgtcgttgcgcgggtccagcgggcaagggacgaacacggcatcgtaacggcgtttcaggtccgggtcgtgacggagccgctccgtccactggcaggcccacaccttgtggatttcgcagccgtggtcattctctagctcaaagaggcgccgctccgtccgttcgtacagatcttccgctgtccgccctgccgccaattgttgctgccgatcgggaaagcacacgggacagcctcaattttaagatattttgtatacgagaaaaatccgtttaccgtgaaaatagcatccaagccattcaatggccaggggacggagaggcgcttctcgtcgccaaagtccgtccacgcggtagccgctgtcatcaatgtgcgcctctccgactgaccagctggcgcattgcacttgcgcctccgggtgctccagctcgaagaagcggatgtagcgctgcgattctgccgaagcacggcgtccgcgcaggtatccgccctcgggtgagtgaaccagacgattggcgggcaggaaacagcggcgaaaagttgccagcgcaagaccagcagctgttgacgcgtggaggaatgggtcgaggccttgagtgttgtcggcgatgagttggcggaatcggatgaccgactccctcaaaatggccacgtcgttgacgcagtacattatgagctgctcgcgtagctggaatccattgccgttgttgttggcgtgtcaacggagaaattgcgcccgtttctctgccttcatcgtgtccggtgcgtagaactcttgagccggtagaccgttgaggcgctgcgacagatgttgtcgtcgtatgtagagatacggaaaaaagggcttcaacgtcgccagatggtccggcacttggaagctcttcaccaacgcgtccaaggcacaaaaaaagtagttgatggaatccttaaaggtgattcgtctttggttacgcccggacagacgcatcgagtagatcttcaatccggtggtgcacagatgcttgggtggacggtttcggcggtgtagtgcttcaagtacgagatggaaatcgtactttccaccgttgtgggcgatgcacaccgtgtgtgccttctttgggccatgctgcagcaaaaaatccaaaaattggtccactgggtcgttgccgtcgttgtcaaacgaatggaagaagaagcggcgctggttgaacgctggtgctccaactggcgaagcgctgttgtctcccggtgcattggcaaagggtggcgaagaccactggcgaaacagttgacctctcaccattcctgtcatgcagacgcagccaggagcccgtcttccaaggccatcgttcacgctgatgccagcctgcagacaacgttcgcagatgacttcggcgacgatgagcagcggcacgtgcttctggacagtgcggttgttcagctgtaatggcatatcctgtgacgtctcagcgtcaaagaagcacagacgaagcggcaattcttcatcgtcctcgtcgtcgtcaaaatcgtcgttgtcaacagcaatcgatgcacgttgtcggactgagccgtcgtcaatgggctggatgtagcaaggctcatcgacggtgtggggcccattgcagcgtcgacagattccatcgtcggctggctggtcatgtgggcactgatgtgtggccacgtaggcgatacgtccacacgcacgacacacccggcgccattgacagatgggccgacgttgtcgctgaccacgaccgtccatcggagctggagcgtggttgctgagatggtagtcgtagcacccaccatttgggaagatgaacagacaatcagcgcattttcgagcactacttccaccattcggtagcttaattgggttttttgctattgtttttgtagttttttttaaccttaatctacctgttcagtttggcatggataaccaggtccataccgcaaacaaaggcggcatacaactttgcatccgaacgcgtggtagcgcgcgtcggccctccgctcgcagtcgatgcagtagttgggcacatcaaacagctgctcaacacggccaatatagttgaagtgtccacgctccaacacaaggcaaaggttgaatttcgccgccaatcttcaattaactaatttacccaaaacaagaaaagaaacaaaaaaactcacccatctcctttgaatacaatgcggtattcctgctccttttcaaacaccgccaggcgaatttggcctacaccatgttgattgttgagccactgctggagacgttgtacatcgtccagcgtgtacatgtccctgttcgcagcaatgccggcacgagtcagcatctgcgctgctgccggaccgtgttggtcttgacgactggcgaacaggttgaatgccgctttgccgccaccgccagccattcgtgtctcacggtcatgctccccaagagaacggcaagcgcaaggcagagccggtcgttggggttgtgaatccggacaagtgactgcacgttgctggaaacatggtgctccacgtcacggtcacaggctcctatttttttaaccaaaatgtgttaatgaaataagaatggcattcacctcccctttggggatcagcacgaatggagtcaaggggccagaccgccaagactttgatgactgttgttccggcaaggagatcaatgccggctgccgactgctcattgaaccgctcgatagctgccgccaatgccgctgcgttgttttgctccggcggacgaagcccgatgacatatggacgatcaaatcccggcgggtggagctgtagtccgaccatccatgggcgcgggtgaccagccagcacacggtcgaggagttgctggatgtggcctccatcaaaagatcggactgctgcgcttcctccagcgccaggaagcgcagttcacaaatctctccacgtgtgttgcgtggcacgttccgcatggctgttgagcgctcaatgacaaagcactcgccaatttggcggccagccttgaaaagcattacaatgaaaaaaatttattcaaggcaaaataaatttacaaacggggcagctacggctgattctcagccaagggacaatacaagaagtatggaaaatgtgaaaacaatggagaagtggccccctccccaatcacaaaggagcacatgcaaattgggcagtcaaggaatttttcaatatgaatgggtgaaatgtcaaaattcagcagcacgtctttgtgttgatcgcgcaccagcagtacgactcgcacaattcaacgcggtggccgtcacccgtgcgaagcacacagttggtcacggcaagtgggccagctggcgtcggctgctcagggcgatggtcaatcgaaacgacgatcaggtacagcggtctaaaaatactcgcgcacaatttaattatcgatttgcaacttaaacttacggcaatggctgacccaatgcagaaacgcagccattcaaaaattgaaggttgttcgtgccggccgcacagaaaggctcctgaaaaggcagtttaaaaaaatttaatatgtaaaacagaagaaagcaccgccaattgctgatgtgccccgttgacgagcattggttgcaccaactgggcaacctttaaataattgaaattatttctttatttattttttaattatgacttggccaaagggcggcatttgccccaaaacagttggtatttgttgggccataacaactagccgctctgagggcatgcgttgctctattgaaagccaagcctatcctgtcgagttgtaggcagtaacggtgtagacagtccaggttgttagtgcagtagcagctgacgaaaaatgcgtgtctggatgttcgtgcagcagcagctaccggaagacagctgagcctagttgttaaaaaggaaaagaaaagggaaagtgaaaagttaagggaaaagaaatggaaatggaaaagaaacggaaaaggaaaaagaaagggaaagggaaaaggaaataatgtaaacaattttttttatgatgggtgtttcctggggggggg

SEQ ID NO: 4139 - DNA, 2457 bp, Heterodera glycines
tttgaaatttggacactttgtccgcgggtagtcatgttgtctggccaagtgggacactttgtctgacctactcgggcactttgtccaaaaattttttaatctcatttaagcacgttggcaccacatttcacatccaatggcacctctaatgcaccggcccccatccaaatccaccccattttaccagttttccggacaaatgacctactcaaccttgagcaaaaaacgcaaatttttttttaaatgttcgcctcggcgagctctacaatatagtacaacagcgccgcgcctcccacttcaacaaaccacacttttccccggctctaacttttttagacccccaaccaccccaggggctaaagggggtccgggcacttaacttggtgctggcgccacaaatttttttttaaaagacgcgccatcccaagacgcatctttttcacctcttcgccgatccgctccggatttgataaacccatgcaaaaggcgaaaaaccgccaaaattttttcaccaaattcattcaactaagtgtaaaaaaaaattttttgcttaaaacgaaaaagttgcacggttcaaaagtttctaaattagatcctctttcatttaaaaaaaatttcatcccgctagccctatgggaagtgcacccgcttcccttttgaagtttggcaccaccccttatttttatttgttgggccataacaataaagtagaatttaaaattttgctataaaaaaaataagcaatataatagaaaatagttatggaaatttgtttttttatttatttttttagctttaaaatttctatttattattcatggcttttcgttagcttttatttttaatattcgcctgcttttattttcttagctttaaaaaattttttgatggcttttcgtttgcctttttaaactttttttagctttaaaatttctatttattattcatggtttttcgtttgcttttcttttttccctacttttcttagcttaaaatttctttttgatttcatggcttttcgtttgcttttcttcttaaccttcttttcctttcttagcttaaaatttcttttttcatggcttttcgtgtgcttttctttttttcatacttctcttagcttttaaagatttttttttcaggtttttcgtttgtttttcttcttaatctgcttttcttttcttagcttaaaatttctttttgatttcatggcttttcgtttgcttttcttcttaaccttcttttcttttcttagctataaaatttctttttaatggcttttcgtgtgctttctttttaatactgcgcttcttttcttttcttacctttaaaatttctatttatttttcatgtcctttcattgcttggctttttcgcttgcttttcgattttcgcctgcttttcttttcttagcttaaaactttttttaaaatttataatggcttttcgtttcattgcttggcttttttcattcgcgcagcttttcttttcatagctttaaaaaaaaatttcattttcatggcttttcgtttccttttttttaatactcgcctgcttttattttcttagcttataatttcttttctatttttcttggcttttcgtttgattgattggctttttgttttttttgcttttcttttctttgttagattaattaattaaataatttgttagtgagttataataaactgttcggtccccgaaatgtcgaatggacgaacaaataaataatttatttaagacaattaaaataataaataaaatagtcggaggacggcggaggagagcaaattgggaaatgtgaacacaattataaaactgactgaatgaaatgaggggagggcaaatggtcacaaatacaatcaatagaatgtgtctgacagtgaaaggtcagacacaacaaataacaacaaatgaaatgagtgaatgtgtctgactgggaatggtcagacacaacaaataaatggaaatgaaacaaattaaataaataaatgtcttatcgggttccacccgaacaaatttgttcagtccccgaaatgtcgaatggacgaacaaataaataatttattgaagacaaattaaaataacaaataaataagtcggaggacggcggaggagagcaattggaaaatgtgaacacaaaaatcatgaactgaatgaatgaaatgaggggagggcaaatggtcacaaatacaatcaatagaatgtgtctgacagtgaaaggtcagacacaacaaataacaacaaatgaaatgagtgaatgtgtctgactgggaatggtcagacacaacaaataaatggaaatgaaacaaattaaataaataaatgtcttatcgggttccacccgaacataaacaaaattaatgaacaaatataaaaatattgaacgggacaaataaataaaacggataataaaacaatatgaagtggagaaaatggaaatgaaaatgatgggtt

SEQ ID NO: 4140 - DNA, 1089 bp, Heterodera glycines
  unsure (1)..(1089): unsure at all n locations
aaactaacaaataagcaatatttaatatagaaatatttaaaattgaattataaatcatattttataaaatttcaattaattgtttcactgctgaatggcagtcgggagtagaatctcggcaattccaatcggtcgagaaccgatcggggcacctccttcagcagctgatcagtgagcctttccacctccattttgtccaattccgaatcggattcgagcgcaaatattttctccatcaaatcgcgtggcaataaaaaatccttttttaaaaaattaaaattatttaatgccattttatattggcacaaaaaaaacaattacccatttcctctgcacaaaagaaaaggccactaattgatcaattgcaattaaaaggaaaaggacaaattttaatggacaaaacaaagacattttgggggcgaactgttttaatgacaaaatgaccaatttttgtctcggtatttaagcattttggtggacaagcagctcatttgatgggtacatcgttggccaattgatgagaaatggccaaaaaaatatggcagtggcatctgcgcaaataaaattgatggcgctccaaccacaaaatcattccgtcttcattttgtacagaattttatttttggacaagaaaaaattgcttgtgattttcacaaaaatgaataaatgacccagagaagctttttcattttttgttggcagtgaatttaattgaacaaaaatatgtaaataattaattaattaatggacgcattaataaattgtgctcaaagcctttttaagaaaaataaaaatcacacaaattttggtacttgtcccttttgatgtttgtaactcacaattcggacaatttttggcattttttaaaggttcaaagccattttttgtgagttttaaggcatattttagtgcatatttagaaactttcagaatttttaggcgtttttgagggatttttagtgcatagttggcattttttaaatgcattcaacttataatcctgcctgataaccttgtatgatgaaaagcacctataaaatcttggntgttttatatttttcacttcagattcttgattagcgcctaaaa

SEQ ID NO: 4141 - DNA, 2332 bp, Heterodera glycines
ataataaaattattatttaaactatgcgcataaaaaactaacaataaaaaaaagtgaaatgcatcaaaactttagcatctgtttttgtttttattctttagcatgctctgcaaatttcttgcaaaaaggcgaggagcaaaagcaccaaaatgaccatgccgaaaatgaccaatggggcgaaacgccttctgcgccgctgttgctttttcagcttctcttaacaaatgataataataataataatatattgtaatggcatttttttaattaaatttttaaatagtaatctaacggcacatattctacaatacttacacataatgatgatagtacaaaaaaataaaataaataaatattctttaaactttccccataaataacacaattcgggaacccgtaaatctcttagagatggacgtgccaagggacctggcggatgtttgtgccgggacgtgcggacgtgttttcggtaaaataccgttaaaatcattgcattgcataaaggttggaaaagaatttaaaaattactcactaattatatacaaaaaaaatgaaaaataaaagagagagtcctttgccatgatcccctgctgctggtcgtaatctgttgtcaaatcagtgataatcaccaaaattagtattgaaataatgactgaaataatcagagaaaaattaattgttttatgtattcaaatatttaacaaattgggttggtcagaaatcattaccctaattagttagtgcagagcaaccaatagtcaggcccggaatttaatggacgtctctaatttcatgatttttcgtgtcttatttatacagctccagtggcaccaccaatgcaacgccccgcagacagaagacccgactcccgtcaacgaaaatgggccagaaccgaaggatgccacagtgaagacgtttcaaaatcaacgcaggttgacaagacaaacctccaaaacgaaatcccaaattcactccccaaaattgacaattttatatcctccaactgcaatcttttcaaaaacaattcacccattgattcaataaatagttctgcagacctccaacaacatcataaaaattttgccagatcaaacttctcttaccaaaattttcctcaaaaacaaacttctttcaactcataaaaaccaaatttcccgttgccactgcttcacaaatggaaatgcttctcaaaatcccattggaccgggtgctaggtcgttctttaaaaaaccatcattatgatttgatgaaaaattatttataactaattcttgatatcattcgatagcccttagtgttctctatcagtctacaaaatttcaaaaaatttcatcaagtttcaaaaaagtcaaagatgctcgaaaaatgctcaaaaaaacaagatttttgagttcctctagccataacttttttgagacataacgaaattttttgaaattttgtagacttatagaaaacacttagtgctatcgaatgatatcaagaattaaaaatttggttgcttttgagctaagttgtaaataatttttcatcaaatcataatgatggttttttaaaaaacgactccgccccatttgaccgcacttcttatttccaaatgtcatcgtatttcactattacccatttgacctgatttccatcaaaagtgtaagaggcagcttggttattttatttttgaaaataaataaataaaaaataaccaatttgagcattttcttagccaaacttattaaagttcccgtctaaaaaattatattaatgcaaaataaagcgaatttatttaaaattagcataaaaaaattaaattcttttgaaaagataccaaaaaaactaaataaaatatttagacttctttacttttttttttataaatgattattgtgtgcaatattttacataaaataaataagttgaaaataaataaacaaaaattttaattgaaataaacaatattattatttgtagcatcagcagcagaaagccatcatacattcacaacgaaaaaagtttcattttgatgaggttcccattttttgcgcattttttggcacattgaacaatcatcgcctaattcgtacactttttgccacatttgatcaatcatcgtgcctatttaatgtttgatccactctaaatgccttaatccatttatccacaccaattatttttcaacctaattcctgggtttattttttttaatttggtgtccagttttccgcttggtgtccaatttaccggtccccattttactcggcgattaatacattgaaaatgcattaatcaaatcaaaatgcttctgcaggaaaatccaaaaataaaggttctgatcttt

SEQ ID NO: 4142 - DNA, 3212 bp, Heterodera glycines
tataaataagacacgaaaaatcatgaaattagagacgtccattaaattccgggcctgactattggttgctctgcactaactaattagggtaatgatttctgaccaacccaatttgttaaatatttgaatacataaaacaattaatttttctctcattatttcaatactaattttggtggttagcactggtttgacatctcatattccgaacggaggatcattgcaaaggtctcctctctctaattttttattttttgtatctacgtaaataataaataatttatgattttcttaaatttttatttttgtatctaaatagtgaataatttttaaatacttatgcgcaatgtaatgagtttccttcacatgccccttgcctttttccgcctgcttccgccattttttttataaaattaaaaatgccaacaaaatttccatgattaaaaaaacgatgccaaatcaaaatgtgcgtccaacagtgccatcaattttggcgcgtggtggggggggggggggcgggaagcactacaaaacacataaataggagtgcatttcttatcgaaatataaatcagtaatatccataaattttgggtaaacatttatttacgggaattaatagtaaattaataattttaaaatttaaacaatttttaatcatttagcttctaaaaaataaaatgttggcactttgccgcttccttttcccattggatttgggttttttatttttgatcatttttccaattgttaacgctgagcagcagcagcagaatctgtggagtggcttttaccaaaattttgcgctcgaattgccccaagaggagcgatcggacgacactttggcactgtttgccgagatggacgaggtcgacacggtgttgaccgatggaattggcgcagcaattatggcaccgccgagcccagcacacccggcattccaggcaatttgagctaattgacttacaagataaaactgaaacgagtgctaaaatttcgcggaaaattcatttaatggtccattagcagcaattatatttgttccaaatgcctcttacagaaattctatttggacaagaaaagtgtcgaaaagtcggactatcgaacggacgacaatgccggcaaaagcgacgcacaaaatgccagaagtgaaagcagtggggacgtgaagaagcacaagaaaaagccatggcaacggctgcgctcactgtttgccagggcacggctgctaaagcggacggcacgcatcatgcaggtgtaccaacggctgaaggacagtcccggcgggtggggccaactcgtgcgcaaaatgtacaacgaaatgattgtggccaagcggacgggggccggggatgccaaactgttgcgtgagaactctcaacgggctctccaactgttacaacatggcgagtcaggagcagaagggaaagcagttcctggggtaggacaacgcgtcgccgtcgcacacattgagccattccgcgacttttggtcgcttgtgaaaagttcggcacaaacgctgttggcactgttcaaagggccatttgacggcgcagagaatgtcgccgacggggggaaaagcggcagcggcaaaagcatcggagaaagacaaatggcgaccacagaacaatttgtgcgcgtgctgaaaacatttgcagcggaggagaacgaggagggcacaattttcacaagaagtattgtgcttaaaggaggcgaaacggagggtataaaatttcgtataaaattcgaaaaccggaattttttactcctcacccaggcccggacttagactattaccggtactgggccgcctgattaaaaaaagcccgttttaccctggcagcccggccaaagtttttgacctggcgcccgccgggctcgggcttattttaaaattttcaaatatttctttaaaaatttaaatttttcttaatcccaagctaattattagtgataaccttttcacgattttaacattaaagcctacttttttgtaaacattgcaacaaaaaatagttattcttcatttttgaaggaagaacaataaattatctttggtaataataaatttgttattttaattcacggctttggtgacaaatttgaattgacgatatatgcggctggaaaatttttaaatattttggcaacaaatttattaataaatttgtgccaaaaattgtcacttatggaattgaacctgtcccatgacaacgggcttagataattgtccgggaccgggccgctcagtagccaggagattccggtattttaccgaaaaacgagtccgagcgtcccggcaaaagtcctccaggccattaatcactatgtagcgccggtagataattaaaaatgccattacaatatattattattattatcatttgttaagagaagctgaaaaggcaacagcgccgccgaaagcgttttgccccattaatcgttttttgcatggtcattttggtgcttttgctcctcgcctttttgcaagaaatttgcagagcatgctaaagaaagaaaacaaaaacagatgctaaagtttggatgcttttccctttttttgttagttttttatgcgctagtttaaataataattttattatttgtatttctttttcaattttatcacatttaattatttgaaattttgataccttttacgttatgtcacaaaccccttaaaatgttatgatccagaaaaactaaaaaattgtgtgatttttatttcttcttaacaaaaatttgagcacaatttattgtccattcattaattaattatttacttatttttgttcaattaatgaaaaatggaaacgaaatggcaaaaaaaaaaaaataattttttgacgaaaaatgacaaaaatttttgtaaaatatacgccaccctaattcagaatttcaaaaaacaaaaaatacaccactaaaaatcgaattcttggtatcattcggtagccctaagtatcctcaattagccttaaaaattgcgacaaattttgtcaattttgaacaaatatggccaaaattacatccgtaaccaggatttcagtcactattgtaacttttttgtaacttaacgaaatttttcgcaattttgctggatacgagaggatccttagggctattgaatgatatcaagaaagttggatttggttgacaatgaaaaaagttatagttcaaaaactgggctggcgatgaaaacgaccctaccctaaa

SEQ ID NO: 4143 - DNA, 1483 bp, Heterodera glycines
  unsure (1)..(1483): unsure at all n locations
aaaaaagttattncagnaattctggaaattttagatttttcagaaaaaaattcagactccctttctgaaaagtcattctgtaaaagtaaaatactacaaaaatccgcaatttttttctctataatataaattttattttacatttttatctcttttttgcgaattgttataaaaataaaagtgatttttggtttcgggaccataggggggtgaccaggatttttgggtggaaaaattttttcaccgaaaatattccaaaaacatgtctttaggggtattttatgacgctgatcacgaatacgtgatcatattttacttttgacatcgttcagacctcagaatccctgtgtgattggggattctgaggcatcattttgaggggggggggaagttcggatccgggcggtgtacattattttctatgcatttttgggttatttttaatgtttttaattcatttaaaagagtgtttgttttataataaaaaataaattttttaatttaaattaaattatttttttttatgaaaaattttattaaaattaattatttttttaattaaataatttcatatatttttttttatttgagtttttcagaaattaatttcatttcaattattataaacttcaaagtttttttaataataaaaagaggcatttattttacaatttttaaaaattattaatgcatttttgtacctcttctgccatttgttgtacctacttctctcttttaatcactgttgtacctcttctaggttggtaattaaaattagggatggtaattaaaatttttttaaataaataaaacaaatgtttatatttattgcaaaatcttctttttctttaaaagacaattaatttaaaccaaaacacattcatcctttaaattgatttacaattaacggttcccctcttaaaagaacaatggcattttactgagggttttgaatttttacgaaaattaaacttttcagtgttatttaaaaatttaacattgccaaaattgatcggcaaaaactgaatattttcagtatttgtttccaggcccaattgaaccctaataataatttaaaattaatttgatttttaatcaaataaattttatttattttccctgtgaacggagtgaagaaaatgcagagaaaagtgaaaaatatgagagaaatattgtacaaacagacagcgggagaaaggcgttctctgccctaattgtattgtaaaaaatggaggacgtggaagaaatattgatttttaaattttttgtagaaaaattattcgtcattacaattttagtcctacgcagggctggagcgcgcacagaaaaaaaccgcggccgcgcatcgcgcatcgcgcattcaaattgccgcggccgcgaccgcgcatcgcgcaaaaaaaaaaacgcggccgcgcaccgcgcatcgcgcattcaaattgccgccgccgcggaccgcgcatttaaaaacaaattttcaaaattt

SEQ ID NO: 4144 - DNA, 4260 bp, Heterodera glycines
  unsure (1)..(4260): unsure at all n locations
aaaaacctacaatttcaaactttctttgctcgtttttcggaacaaacagtatgagtcgaggcctacgagtttcattttatgccctacaaatttctgttttatacctaatttaaaaatttagcatttccaccactcgcgctcttttcctcaactcgccgctgccgctgtgaacaatgggtcaacgcctccgccgccgccactcgcagcgccggtgccacagcgaccgcctcgccattgtcccacgccggcggtgccgccgccatcggtgcccacccagcgtccgccttcacgcccgtcggcgcctcagcgacaccgccaatgtgtgccaattcgttggcccagcacacccaattgttcaacaccggcgcaggccttggagcaatggcgacgaatgccgcgacaacgccgcatttaccgagccgacagcaaattggtagaaaatgccaaatttgggggttgttttcccgattttgttttggttttttccattcaaaaaatggttggggataaccaaattcaaattaaaatatgcaatttgtcgcgggggttaaaaagaaactgtttgtcttctacccattttttgtttgtttgtgtggtcccagaaaattggaaatttgccactggatttttggacatataggttatatacccttcaaatgttggattcttcccgatctcctaattttttgtgccgatttttttccgttatatcacaattcattttgacattttttcgccgttgcaccttcttacaattaacccattgttgacacaattaaatttgtcagttttcttttaattgcatgtattttgtagtacaaagacttggatcctgctgggtaaccgattcaaactatttcccaagaaatgaatgttaggaattccccgaaaattggcactcacaatcagctgctggcattgaattttgtttgccaataattctaccaaaattggtactcaaattgctgagacatttaaattttgtttttgccaattccttctccgccattccaatttttttttctccattcgggcaataaatgtgtgtaattatttccgtttgttcacacctccccccccccccccccctcagtgatgtcatcctcggctgctgccaatgcacaaatgagccatgccgccgccgccaacaataaccaccatcaattcgccccacacgctcccccgccggtgccggtgccaccacccactaatttgttggcaaatcctggcgcaccaccaccgccggcaccaccaatacaacaacagcagcagcagaacacgacaacaacggcacaagtgggagttttttttgaagaagaagaataaatgtttaattggattttgggcttacattttttaaatgcaaaaaaaacgatggggatgagtaattaagttttggggtcccaataacttttttttctacaaatcgcatcccaaaaaggcggtgaagctttggcgactaaacaaataccaaaatgaagcataaaaaagtgccgaaaatataggacaaaacggcatttcatccctcaatctgatccatccctcggcgcatgtctgtttccttaattctctttttaatcgcaggttcttccaccgtccgagttcaattcgttgtccaccgctcatcaacattcgcttgtcgccccacctgttgggcctccaaatttggcacttccaccacccgtcgagatggcacaccaccaacaaatggcaccgccactgaccgcggcactcggcttttccgccgtcacatcatcgtccatcatcggcggcgtcagtaacgggcaccaaacaactttcaaagaaaattttaaaaaaaatttgagaaaattggaaataaaatttaattagaattacatttttttttcaaaaaaaaaatcagaatgatgaagttccctcaactgaaaaattttaattgaaattataattttttttttgtaccaaatgccattgtacgaactgccattgaccctgtggttggacacaaaaaattaaaatttcgcaaggacataaactaaatttccaatgagtttctaggacaaacaagtggatgacagcagcgatggcaaagctggacaacaacaacatccacaatcggagggcgaggacgacgagcaacacaatttcaggcattgtgccgaaacctactcggatgaggagacagcgtcagcaaataatggtgagaaggcgtcagcgtttaatttaatgaaatttttttttgttttaatggaaaaattttttttttcttttaagaagatttttttattcattttattgcaatccctctccagaaataaataatttcggtcggcaaaaattaaaaaatttttccaaattcagtaaatttttttcttttaaaagttgccgagtattttagggttttttgttacgtaattttttgggatatgataactttgttatcactttttaaactatgtctgaaaaatgtaaactggtacaatttattcaattttttttttgtaaaaaatttttgttgctcaatcgcctttattcgaaaattttcttcttttttagtattccattattttattgattgctttcacaatttcagtttggtgggcaacgacgtttggatggacattttccccgtttttaaccatgctcaactggcctcaaatcggcgcccttttcaatgcgctggtgggcaaacattttgatggcaaaagcgaataggcgcccaaaaacattctcggtttcaaaaaccgctgcgaaataaaaaagttttcaaaattcagcaatttctttcttttaaaagttgccgggttttttagagtttttggttacttaattttttgggatatgataactttatctcagtttttaagctgtgtctaaaaaatgtaaactgctacaatttactcaataaaatagtcacaaatattatttttttctattttttctaaaatttttttgttactctatggccttttttaacaaaaaatttttttttagtattccattttttatgattgctttcagaatttcagcttgatgggcaacgacttttggatggacagttccacttttgaccatgctcaactcagtctcaaattggcactactttcgcactttcaatgcgctggtggacaaacattttgatggcaataaaaattaaacgcagtgagttccaacccttattactggtggaatgtaaatttttttataatttgccaatgaaagtttctgctttcgaatgtttttcatattttagtatttgttagaatattaaacatccaaaaaactgaattaaaaagagcgccgaaaaaaagttttggattgattttttgatttgatttttcaaatattattatgattttttatggcaaaatgattttgaatattcatctggcagctatgattttatactaataatttatcaatgcatcttatatacgaaacaaagcagagactttccatccgtcttaagacattgaaaaattttcagagttctatttattttaaattataccttgctatatataggaatagtttttctgtcccaaatctgaggatggaatagataataaatataatatagcagaggtacgccttaagttctttcctagaataatcaagaacaattaaaactgccaaattgaaaaaataataatttttgcaaattcttggcatttttaattgttcagtcctttattaattcccaatattgacatttatatttgattttttgcaaatatggttcgctgacttaaaaccgattttgggattcgggaccaaaggggtgagcataggatttttgagtggaaaaattttttcaccaaaaatcttcaaaaaatatgtctttttagggtttttgcttatttgctgattttttatgttagaaaatcacatacatttttaccaactccagctagacagatttatttacctttttcatgtaaaaatagtaactttttttagggttttcgttaatcatatttttgtattttataaagtatttcgttactttttcagcacataagcaacgacgtttggatggaaattttcctttttttgaccatgctncactcggcctcaaattggactgctttcgcccgtttcgattagctggtggaccaatattttgatgaaaaagcaaaatgactgtgggccacaaatcgaaaagactaactaaaatgcggaaagtatttaaagttttctcggttctaaaaatggccccaaaaataaaaaaatcaaaaattcaaaatttttttgattttttttttgggtcggtttttttta

SEQ ID NO: 4145 - DNA, 2713 bp, Heterodera glycines
  unsure (1)..(2713): unsure at all n locations
tgctctaaaaataaaaatttccaaatttggcaaattntaatntattttgntaaatgaatatggcacttctttcgccatgtttcgaactttggtggacaaacatttcgatggtaaaaagtgattgttttttatggtttttgttgttttttaatgattttgtgcaaaaaaggggcctccaatttcaaacactttagcctaaaagcaaaattcggtttttttgtaaatgtgaactattttagtgtttttgctttttttttgtaattttatattcttaagattttcagcaaccgccaaaatgtttggatggacattttcccactgttgaccgtcctcaactcggtttaaaattggcactgctttcgcccgtttcgatgttttagtggacaaatattttgatggcaaaaaaagtgattttttagggtttttaattaaggattttgtgcgaaaaggggcctccaatttcaaacgaattttgcttaaaagcaaaattcggttttttttgttgtaaaagtgaacctttttttttagggtttttgcttatttgctgattttttatgttagaaaatcacatacatttttaccaactccagctagacagatttatttacctttttcatgtaaaaatagtaactttttttagggttttcgttaatcatatttttgtattttataaaatatttcgttactttttcagcacataagcaacaacgtttggatggaaattttccttttttttgaccatgctcaactcggcctcaaattggcactgctttcgcccgtttcgattagctggtggacaaatattttgatgaaaaagcaaaatgactgtgggccacaaatcgaaaggactaacttaaatgtggtaagtatttagttttctcggttctatggcccgaaaaataaaaaaaattcaaaattcgtaattttttttgatttttttttgtgtcagtttttttagtgtcttattgttacgtatttttggatttaatgatttttaagctgggccttacatttatatttttccattatagtcataaatttctttgtttggcaattacatggcataaaaaatttttttggaaattttgtatgtttttgcatttttaatagaaaaatttttgtttcgtgtaaaattgctcagagtttcggtcaacaaatttttgtccaaccctattgcttccctttccgctaaattattaactttcataatttcagttggtgttcagcgatgtttggatgggcagtttcccactttttgaccgtcctcaactcggcctcaaattggcactgatttcgcaccgtttcgatgttttagtggacaaacatttcgatggacaaacgcgaattttttcaaatttcggtaagtcttttgtttttgctttttttgtaagtgattggttttttttgtttacttaattgaagtcgtaagtttcatttttttcaaaaaattgaaccttatgaatttaaaattggtctctaaaatcgcagaatttttaagtttctgtggcaaaatcataaattatttaagaaaaaaatcaattacaattagcagaaaccttgcttgattttaaattatcacgtaattatagaaactttaatttttagaaagtttttcattttaaaagataatttagcaattttttagtggaaaacccccataaagccagaaagacaaatatatttttactttttttcatttaaaagtaccaatttttttatgtttttgttaatcattttttaaaatttttttggattttaggagtttttcccttttttggcattgctcaacttggcttaaattagcaatgctttcgctcggtttcgatgcgttggtgaacaaacatttcaatggcaaaagcggattgctgcgcaagttttttttcacgaattaaccggttaaatatttttatgctctaattttttggatgcattcggcaattaaaaaattgaaattttcaaaattgtattttcaaacatgaaaatcaattattgtgaatttttgaaaatctcaacattgttgcggtgatgctgtttcaatcccgcaaactttttgtgagattaaaacaattctctcaggatattgctgtatttggccggttaaaatcaaattcatcgatttgaccatgatttgaataaaataagaaaaaattttcagatgcacatatatattaaattatggcaaagtgtacactaagtaaatagttttagtaacccaaatctgaggttacttatgaaataagtttcgtacactttggcacgcataagctccacaatagtatttaagaagcctttactcttgattaatatttaagtaaacatttttgttttaaaatatttgaacaatcatttgtaaaggcttctgtcctcttattcattttgagattcacattttttatttgtttcaaaatcttatcggtctgctttgcgaccatgatgagatttttgcacgtgccggtctgcttagcgaccatggcaacatatcggtcagcttagcgaccatgatatgtagtgcaaacgccggtctgctttgcgaccatggcgaggctggtctgctttgcgaccatagccaaccgtgtcggtctgctttgcgaccatgactacagtgcggtctgcttcgcgaccatggcacccatatcggtctgctttgcgaccatgatatggaaagcaagcccagacttgctctcgcctagagatgcatgtggctgggccgctc

SEQ ID NO: 4146 - DNA, 1709 bp, Heterodera glycines
  unsure (1)..(1709): unsure at all n locations
atattcatttctgaattagaaaaggtacgtccaccccctttttctttgcgcatttctgtcttgggttatggcgacacttcttagggtccattttacgttcaatttttcttaataaacaaattttaatactaataaacacaaaaaatgaataaatgaagtatttacccatcaagttttgaaagaatcttgtcgacctcatctattttgtcgtcaggattagacggaagcatttgataagccaataaaaatgaagaatataaaataagatataaaattgcaaaaaagtttgataaaagcttttctcaaaaacagtgagatttttaaaggaggaaagtttcagcttttttaaatatttttttaacttggcaaaacgtctttttattttttttaacttctgacattttgatttgtcaaaaattcaaaaacgtatttacctagtttttttttgatttacttttcccttacttttcaaaggcttttacctgataaaataacataattttttttaaacttttagagtgaggatgccttcagaagtgggaatttcgaagcatctcgatttgttacgcaaagagcacgttcgattgcaggttcgccatgccgagttacaacggtcctacgacgctttggtagtgcattttcaatcaaacatttttataaaatgcacgaaaaatgtttttcagttatcagcgaactctttggggtgcgccgatggaattcgaagtgctcaaaatgtttccacttcaaattttatccacgcccttctgcacattgtcacccaactttacgacaaggatttgtacaggtcgttcattcttaagtcgcttatggactttgtttttttgtggatttagtgacattaccattcattttgatggtcatcaattgcgtgggcatcgaattgttatcgccgcaaggaccgacttttggggcgacctttcgacagttgaacgtttagagttgacgggtaaatttcaattgggcagcagagattgtctccactgatcttagccttttgaaatttcagaaatccccggcaaagtggcaaaagtgatgatgaaatggatgtacacaaacattttggacgaaagcatcggcgactccgtccttctgccgttgttggaagcggcactcaaataccattttgaggaccttaaaacgcggtaaatggtcgaaattatgaccaattatttattcatttaaattttttttatttcaaatttgatccaactattttaaaactcttttaatttctcttgaagctgtgaagagattctcattgtgcgcatcgatgtggaaaattgtgccaaggtttaccaatttgccgaattgcattcgctggacagaatccgcgacttttgtgccgaagtcgtttccgaccggtggagcgaatttacgcctgaacattttttggatatgccggcccaactgttgtaccgactgttgaagaggtgagtcctaccaacaacaaaaaatgtttgttttttttcctcaaaaatgcggcaataatttttttttttgtctttatttgaaaaaaattttaaggaaaagcggtgccaatttgctcggctctctgatccgactgcagcgcgaagatgtgctttttctgtttctgattgagaacgacgcacgggtaaaatgtgngaaaattcaagacaaatttaaaagcgaaaagcataattttccaggggaaaaggaattcctcttaa

SEQ ID NO: 4147 - DNA, 2986 bp, Heterodera glycines
  unsure (1)..(2986): unsure at all n locations
cgttcattcttaagtcgcttatggactttgttttttcttttggatttagtgacattaccattcattttgatggtcatcctttgcgtgggcatcgaattgttatcgccgcaaggaccgacttttggggcgacctttcgacagttgaacgtttagagttgacgggtaaatttcaattgcgcagcagagattgtctccactgatcttagccttttgaaatttcagaaatccccggcaaagtggtaaaagtgatgatgaaatggatgtacacaaacattttggacgaaagcatcggcgactccgtccttctgccgttgttggaagcggcactcaaataccattttgaggaccttaaaacgcggtaaatggtcgaaattctgaccaattatttattcatttaaattttttttatttcaaatttgatcccactattttaaaactcttttaatttctcttgaagctgtgaagagattctcattgcgcgcatcgatgtggaaaattgtgccaaggtttaccaatttgccgaattgcattcgctggacagaatccgcgacttttgtgccgaagtcgtttccgaccggtggagcgactttacgcctgaacattttttggatatgccggcccaactgttgtaccgactgttgaagaggtgggtcctaccaacaacaaaaaatgtttttttttcctcaaaaatgcggcaataatttttttttgtctttattttgaaaaaaattttaaggaaaagcggtgccaatttgctcggctctctgatccgactgcagcgcgaagatgtgctttttctgtttctgattgagaacgacgcacgggtaaaatgtgggaaaattcaagacaaaatttaaaagcgaaaagccataattttccaagggaaaaggaaattcctcttaaaacaaattaattaatattaattggttttgttgttcagctgaagacaattctgaacgatttcgattgcgacggccaattgcctttgggcatcgcttttgagttgaagcaattgaaaatggccaaatgtttgcttacgcatggggccgatgtgaacaaattggacgaaaggggcaattcccttctttggaaagcgatcgaaaagggtaattacactaattaattaattattgccaactttatcttccaaatttaattttacgaatgccagcatttccagggaacgccgatgtgtgcgattttctgattgaaaatggtgccaatttgaattatgtgcacgaagagagcggagaaacacttttgcacgtgttggccaagagcaaagcgaagtcacaatggacaccaggagaacttaccaattttgatgtgaacgcattgaacagaaacggaaggtggtgattggggagcagctcgttttaaaaaaattattaacttcgaaatttttcaagaaaaaaatattaggttttttatatgaaaattcttcgaaaatttttttaatttaaatttctggggggtggggctgatacggggtggagaaacttggtgccgatgatttcatatggcatggatatgttgctgttctgtccgttttcacctcctcccaccattgtcagaagccctttgattgtcgcggttgaacatgaaaacattgccgtcattgacttacttctgcaacagctgcccaagttggacgtgaacatgcacgacaacgcgtcacggagtgcacttcaaattgctctcttggaacggcacaatttggaaattgccgaaaaattgcttgccatcgatgggttggatttgctctgtgccgacaaaaagagtcagttgttgttgagttattgcatggattgtttgtgtttgattcaattcgaattgctcttctcatttcagctggtcaaactctgattcacaaaacggttgccttttccgatcaaattgctgcccaatttttggctgccaacggagtgccggttgacgtgccggatgccaaagtaaattttgaggaattactgttagacaatctatggcatcatattgttagtcctcactttcctttaatttttcccaattcaattccacccccaagggttcaactccgttgcatcatttgctgaaagcgttgcccgcctttgatgagacaacggcacatcaccaccatcaacaacagtcgacaattgacccatctcttttgtccatccttcaaattctgctccagtccggtgccaatccgtcctccgtcgacggcgtttccggctgcaccgcgttgcattacgccgtctcaaagcctcgggctgtgctcgacgcgctgttgccccactgtgacagcgccaccatcggcaccaccgaccgggacggccgttctcccctctggtgcgcgttgttggcctccaaattcgacactgccgcccttctgattggggcgggcgcggatatcaacgaaaagtcggcggatggtgtgccgttgttgatcaaagcgatcgcgctaaaacgtgacgatatttcgcgctttctgctggccaacaaagcgattgctgcagttacttctccggtgagtgtgctaatgagtcatcccaattagcatatcggagcgagggagagacaaatctatgcaaattttgtcttaactatcttaaactattttcgctcgtatttttcaggatggctttacccccctcaatctcgccgtccagaatggacttacttcgacggtggaccaactgtgcaaattaggcgcaaatttgaaccatcctaacccattgaatggactcattccgttatggacggcactcgaaaacggagactttggcacggccgaagttttgatagcacatggcgctgtaattgtccattccaatgcacgaaagttcgctgtttgtgctttttctgtaggatacagaaggattgtgcgccaacgacgaacaaacgatggatgagacgcttttgcaccgcgcaattgacaaaaacaatcaaaaagccgctgtcttttagatcaaaaggtgnagttattcttcatctaacaataaga

SEQ ID NO: 4148 - DNA, 2904 bp, Heterodera glycines
aaagagaatggagatggttatctgactgaaggcggttagagattaggagcacaaacgatggacctaatggtcaagatttggggggtatgaagggaaaaactatggaataagaaaagcgaagcgaaacattcatttgaatgggacaaaaaggaagcgaaaggataggcaaaacgacgaaagaaacagattaaacagcgttttcctttcatttcaacaattactttttgcaattcgttttggtagattccttttaaatttatttttctctcatttttgtcaatttctatttttctccccattttaagcggttgcaatgtgaatgcgttgcgctctgtccgcgattcgccctcctcccgtcaacaacaaaacgcgtcgtcttcgtctcccaccccctccacccccgtggccgagctgtacgcacgcagcaaacagacgccactgcacaccgccgttcagtggggcctcacagaagtggcacgggcactgatcgccaatatgagctgccgcatcgacgcgcaggacgcggacggacgaaccgcggcacacattgcggtgctggagcaggatcagcacactttggaactgctcttggcccaccccgacccatcgccgctgggcgtccgcgaccgttacgggcacacgccgctggcgttggcaatgcgtgccaaacagaacaaaatggcggaagcaatttgcaaacggttgccccatgccgcgctgcaaatgaacggaagcggcgaaaatctgctccattgcgctgtcaaaggcgctgaccttgaatcagttctttttctgctcggcatccatgtgaatttcaattctttttcatggactgtactgtttaacttttctgatcccaaattggtttggtacaatatttccaccccccccccccaagaaatattttataaaaaaataatcacttaaaaatttttcaagaaaaaaaaattagaaaatttttgttacaagaaaatccaacaataaaaaggattttttgatcgttataattcattataaaatttttcgattttttttttacaattagacaaaaattctctgggagggtaaagagctgctcccattggttttgtcgctttcaccacattcatttcacagattgacgtcaacattgcaacccaagaccaggaacggatcacggcactgcacatttgtagtcgcgtgggcgaggaactcattctgcgcaatttggtaagtgttttttacactttaaaatgctcttcattttgacaattttgccatagattttggccggtgccgaaatcaatgcgaggaatgcgagtggccaaactgcgctggccattgccgcgatgcatggccatgacgaaatatgccgcgcactgttagaaaacggcgctgacccaaacattgtcagttccttttgttttcatttttacattttcatttttaggcaaatgatgacggaaacaatggtccgtttttcatccatcccaatttttgccatttaaaatccgtaacattttttgttagctttgcatgccgcagtttcccgtggttcggtgaaagtcattcgtctgcttctctccgagtcgcaagtggacgttttggcggtcaataaacggtgggtcatttgcagaatctgaattgtttttccatgctaatttggttgctacatctgtggagagcaatgcaattttccgtcttcaattgatcactttttcaggcaacaaaacattttgcacctttgtgccattaacattggccatgtttcggcggaagcgtttgtggagattctgagggtacacccaaactatccgctggaggtggccgatttgtacggcaacacaagtaaaactatggcatggcaacagcagcagccagtttctggtcttgccatttcagtgtttcttctcgcttttatcaacggcaattcggaattatgcaaattggcactgaaaaacggtgcgtgtatgggaacaatgaacagccagggacagaccgtgttcaacttctccaccccaacccaacagttgctcatcggactgctcggtacggatggtttgccatttaatggcttattttgtcattgtaaaaataagaattggtagtcataattaaaaaacacataatttttgaatgtattaaattttgttggaaaataattggagcgcttcattaaaataatgacaaatgaatgaatggcggtcgattaatgccaattccaaaatgtcttgggattgggctttgaaaaaagcaaatcctttgtttgtttgttttttataatttcgccctttgcacagaaagcctcgagagggagcccaaatgggcggagggcgacgcgtgctccgaatgcgccacgaaattcacgctgacaatgcgcaaacaccactgccgccactgtggacggctcgtctgtgcaaagtgttcggaccagcagattccgattctgaagtacaacttggccaagactgtccgcgtgtgccaaatgtgcttcggcgtgctgactttgggcgccgcccctccgcagcgaaaataatttaaaaagtgaaaaaagtgccgaagaaccaacgaaattgcccaacttttacagtttaacttacgagacgcaatttgtaaaaccaccaaaaagcaatagcatcaaaaacatatttatttatttttaaattcccacttattttcttataataattagttggcggttttttcaattgcgcgcctctttttcatcatttattttttcactttgttattattacctccagattctatgtgttatgtttttaatgttagtctcttacaatcacttgtatttttccgtgtgacttttccttttcgacttttttaaattaaagagagattattaataatcaagtctaaatggactcaggaaatgactagggaattccttgatattttcacgtgtgc

SEQ ID NO: 4149 - DNA, 1095 bp, Heterodera glycines
  unsure (1)..(1095): unsure at all n locations
cgttgaaaatttttgattcctaatttatggaaaatgatcgggctggggattttatttcaaacggcccgaacnaaaataggatttttttccaaaaaatcaaaccaattaactcgttttggaaacatgtttccacgtttttaaaacaaaaaaaattcaatttgtggaatgaagcagaaggcttccttcccgcctgctttttatcaggattttaagagggggaatggcatgggaaattgggctaaggcaaaaactctgctttgccaaccactttttatctcctacacaagcacagagaggaaagcaaatttgaaaagtatttattggtgatgaaatgacaaaactgtcttacagcacggccataataagttttttgcatcgtcggcttccgttcgtctcaaaaagtcggatcagccgctcttaaacaaaagaatggccacttggcccaagtagaagtaaatgaagtgtttggtctcgtgtctgaaaagttataaaattttgaataggtcttttctctttttttgttggaattattcggtttttcctctcccctacttaaaaaagattcacactttccgaccatttgtccaaaattcgtgtaaagtccaaaagtgtcatttaattttggtttgcctctattgcagtttacatgtccaaccattgaccacacactaatctttttcttgataaaaaagacctacattcttggtatttttctaaagtttaaagtctacaaagtttttgtaaccaatttgtgtcaaagataataaacaaaaaattatcgccgaatatactcgaaaagctgacttttgatattctcattgtgtttttcttgtatttaagattccctaaactttaatctttcagatgtttgtagcctaagaaaataaggatggtcactgattaaacgcgtaaaaatcgtttggcgagtaaagcctttgggttttcacgccgtaaagccattaaattcaaaatcccccccccatctaaaaaaactcacgtgacgtaagagccgaagttccgtccgacgatgcaatgccatgtcgggttgaacagatggtcaaactcctttttgatgtacgcagacgatgtccttct

SEQ ID NO: 4150 - DNA, 3812 bp, Heterodera glycines
  unsure (1)..(3812): unsure at all n locations
aattaaattcgagatttcacttgaaagtcgaataccacnncggtaaaaaagaatataatagccgatgtcttatcgcgctcgtttgcttcaccaaaaacncctgaaatctgtcaaaatgacgaagagatcgcaattatcggacaaatccgagaaattgagtcaaattgggacgaattggcgcacaattatcagggttgggtcgaagaaaccaaattaagcgaaatgggtgcactttatgatttcctagaacgtaggattataccgaaggaccccagggaacagcaaagcatttttgataagtgtcataaatattcggtcatcagtgggcttttgtatctgtttgaaagtggaagcaatatgagattgttcgtgcccaaaaagtttcgtgaggaattagtcaaagctcatcacgaaggaaactgtgctggccatatgagtggaaaaaagttgtgtaaacaactttccgaacaatatttctggcccaatatgcttgccgactgcgtcaagaatttgtgcgcacactcgaaatccgcgtgctaatgagccgccattaaatgtcgttaaatcaaccgaaccattggagttgatctgtatggacatcttagatgtggggccaagtcattcaaataaaaaatatatttgtgtaattgtggatcatttcacaaaatatttggtcgcagaaccaattccggataaatctgcaggttcagtggccaaaatttttgtcgaaaagttcatcttggtttatggtacgccaaaaaaggtccattcggacagagggaaagaatttttgaattcaaccatggaagaaatatcaaaaatgttgagcataaaaaggtcatttacggcagggtatgacccgcaggcaaatggtcttgctgaacgtgtcaaccgaattttaattggaattttaaaaaggtcaactgcaagcaattggacgtgggacgaaccattaggcttatgctactttttcatataacatcacaccttcaaataccacaggattttcaccttttgctctcatgtttggaaggattgcgcgctttccccttgatcaaaacgtacctttttccgtaaatcccgcttatacggtggattcggacaaatacattcagctgtttagagaaaaccttctaaatatgcttgaacaagcaaacaaaaatgctttagaagcgcgcaaacaaaataaattatggtttgactctcaaccacgcgtaacagccaacaaatttaaagtcggagatcgcgtaatggtcatttttcccgggctccaccgccggaatccacataaaaaactcatttggtcaaatttcggtccattcttaatacttgaaattggcgaatcttcagctaaagttgtgccaattgataagcaaaaagatgaaccaataaaagtgcccattgaacgattggtcaaagtcccaaaagggataccggacatctcaactttgcctaagggaaaaaacccgttcaaaaatgaactcaaattaatggctctatatgctggcataaattggaaattcaaaaacgcctacaaagagactaaatgttgtaaaaatgaggccccactgcaattggggacaattgcttttgattgtttgggggtggaattgggaaaaccaaaattgatttcagctcgagtgaacgtcgaaaaaggcatcatgattggctttggttggtcatccacttgtgccggagacatcccaggccatgatctgtgcgaaccaatcacccttggcagcctcgatcccgttctcggcctcacgaagcttggatcgatggtggccaagactcctctgcaagcgctcctcggcatcttcctccttcgctcgggcgttgcttcttcgctgacggcagcacagacgttggttgaagtgattgtaaaggctcagccaaaattggagctttgcatgtattttggaaagaggggtgatcagatcagttcgggcaaatacccaacggaggaagaccagcgaaaagccctggagaagtgggctgggtcatgttatgtggccagacaggctttggcagccaccggattcaacccgctggaaatggaggagccagaaggagtcaattcccttcctgaatccgaaaagctgaagtggaaagaagtgtttggccaaagcgcttgggccctcgaatgtgtgcgggcgacggttgtgcacaaagcgggccgctttttggcacaccagcgcgttttgctcggagattcatcagctgccgccctttcacaatatatccccaattcattttgcattggacaggaggggtcaatggcagacatcattcgacaatttcagccgaccattttgtcaagtcgagtaaaagcgatgcttataatcacaggccgtgactcgcttgtcgccggagaaactgccgaatccattgccgaacaattcgaaatggtggtggagctgtgccgtcgcttcagtcatgtcaaaatttattggtgcccgcccccgtatgtccacaacaaatccgctgaatatgatcaattgatcgacaaaatgagggccttaataaataatggacccattatttcaatttgcatcacagaaaaaggccgctctgttttggaaattttccgttttggaggagccagaaggagtcaattcccttcctgaatccgaaaagctgaagtggaaagaagtgtttggccaaagcgcttgggccctcgaatgtgtgcgggcgacggttgtgcacaaagcgggccgctttttggcacaccagcgcgttttgctcggagattcatcagctgccgccctttcacaatatatccccaattcattttgcattggacaggaggggtcaatggcagacatcattcgacaatttcagccgaccattttgtcaagtcgagtaaaagcgatgcttataatcacaggccgtgactcgcttgtcgccggagaaactgccgaatccattgccgaacaattcgaaatggtggtggagctgtgccgtcgcttcagtcatgtcaaaatttattggtgcccgcccccgtatgtccacaacaaatccgctgaatatgatcaattgatcgacaaaatgagggccttaataaataatggacccattatttcaatttgcatcacagaaaaaggccgctctgttttggaaattttccgttttggggatcatttcaacaaatatttggtcacggatgacggtaaaatgcgcaattcggggtgcaaaatccttaaagcttggattttttcccaatcgtcattccccggagacattgagctgagtgtgcgcacgctcaagtcagcggtaggagtcccttcgagagatcaggccgatcctcgttcggacacgaccacagctgttccgagagaccgggtcggtcctcgtcgagaccaaaatccgtcgttccgaattctccatggacgccgtggatcggtgcgctatcagccgtaccaaggacatttgcacggatctgcgcgagtgcgtgactccgatcgccgaaatgatggccgcccccatcgtcgttgatctgctcagaggaccaccccttttggttttcaaggaactcaaggctaaaggcagggacgccttttttgattgtttgggggtgttggactttttgacctttattttattttttatatttgtttggcattatgtttaattatttgtgaccgttttttcccaccttttcttgtattcgaattttaattgcattagttttatgttttgtcttctccaaagaaaattgattgtttctttttttaatttggaataaataaactctctgagaagccttgacaccttccttgaatcccgaaccaaaagtgaagaaaaatcccatt

SEQ ID NO: 4151 - DNA, 2166 bp, Heterodera glycines
aaataccctctcctcccctctccttccccccttttcccctcccctttttcccctccccccgccctcccctaattctgccctttccctcccttctctccctccacttttctcccgtcctctcccactttcttcgttttcccttcactttatttttctcgccttcgttgttcccttcccaagtttcattcattcccacaaatgttatgctttctttttgttcattttgtgccgctggagtgttaagcgttgcggccaattgcccctagcaacgccgccgaccacaaacatttctttttttataagcggacccgtcccccaaatgaatggcactcatttgtcacaataattcaactgataaatcaccccttacctttttcttcatttcattttcattttgatctctccattacagtccaacctcttttgagtggattactgtaatggcttcttcggagaacgtttgtttggttgcgcgtgccatcccattgaagaccgtctcctccgatggggtactcactatatttgcattgtttctctccccccatttccatcaatagaaggatcaaattgtcgcagtaaattccttggccgctcatttggattcgctttcgttggggttaaaacaaagtaaaaatgaaacggataaaaagggagaagagagccgaaagaaaatgcgggaggaagcgaacatttcgccggccgatcatttggcactccaatcacttcgatcgtcggcattggcaaggaaaactaacacaaccacaaaactgacacgtgattgccggaaattgttcgccgatttgatgacgggagaagaagacggagaagagaagcagaaaaagtcgaatgagaaaaaggaaaagccgaaaatgaaagaagcggacgaaaagaaaaaggagcaggcgaattgtgagaagaaagagcaaaagagagaggaaaaaggaggggagaatgagcgggagagagggagtggcgcggaactgatggctcgtggtccgatcagagtgccaccggtggtgggccggtaagcgtttattaccatcccccccccccaaccgatcgtccatttcattccgtcactgttctccttcagcggtgctccgtccgccgttttccacccttacgcctcttctgctgctcatcccaatgcgcagtcttctcccaccaacgactttatgtccgcatccgtctccttcaacgccactgcgcttcagtcaacagtttttgatcaaagcagttacaattccatggctgctgctggctatggctacgagtgcgggctgccgagcaattggagttgcgggggagggagtttcgggtgctattcgggcctttcttcgccgagcactacgcctgacacagtgtcggcgatgtctccgggcgatcgtagcgaaaaggtcggtcgagaagtggagaagggtcggcgtaactgatgatcattggttgcagagcgagttgcctgacgacctttctgacttcattttggaatactcgcgccgttattcgcccgaactgtcgcggaagtgttcgcttggctcgcaaggaattgccgggggcagtcccctgtcggactcgtcgaccgacgacgaccgactcagtctgtccagcggcaattcgccgctctgtgccccccaaacgtattccacccacaacctctctttctccaaatttgaccgaatgctttttgagttcgcccgcagcgcctcggggcggaattgcaaataatgaaaattctccgcagttcaacacaaaaggcacagcgaaagcgaaggaaaagccgcgaccggcgaaagaacggctgagagcaatgattcgaagcgaagacatggacaacgcatgggcatggacatgcaaatgcattcaggtgagaaaggcacggggagccaaccaaacagacaaaaaaaaaacatacgaatggacagcgccatccgatggcattgcatttccaagacggcgatggggacacactcctgcacatcgtcatggcacatttggactttgccaagatttacgcactcgtcgagcaaatgcttaagacagaagaggcgccccaaaagtcattgcttttcgacattccgaacagaatgggcgagactccatataagtcatataattaacatagaaaaattgcttaaatgtaagcccaatttaattacaatggagaat

SEQ ID NO: 4152 - DNA, 3306 bp, Heterodera glycines
aagtaattcatggggcactgagtcaaaaagtttctgaaaatcaatataaatacagtcaacatttttccattttattattgcctcgtcccaatctttctcaaatgttattagttgactcgtagtagacctatttctaacaaaaccaaattgaaattccgaaatttttttgttttttaatagaaattgtaaaatatttttgcttaaaattctttccattaccgtgcagagtgagcaggttaatggaaattggcgtatagttttcgagattatttttgtcacccttcttaaaaagcggaaaaacaattggattcctggcagatgtctggatgtgagacagtgtataatgagatcgtaagcgagtcagtaataacagttgccagagaaggagggcaaatttttaaaattttataactaatattatcgggagaagtgccatttttattcggaagttttttcaggagattttgggtctcgatgatgttaaaatttatagttgatatataagcatacatcaaattctataagattggacgccgtcctggaggtgtgttttttccacttttcatttatttctaaatgaatttcccttaggccggggcttcgccaaactctcaaagtttccgcctccaacgcgacatgccattgcatttcgctgctgcgcatggaatggtcggagtttggcgggggcggacactcaccgaccttctgacatttccagactcaaatcgtcaacattttgtgcgctcactcttcgatttcattgaatgctcagaatggaaatgtaagtatgggggggagggacaatccgtccgaaattacttattttgttttatacttaatttccattgccttgcaaagccttctcatttatcttttccatccccagggccttacgcctttactaaacgcgttcaaaaatcacgcggagcgtagtgaagagtcgcagagccaaataaacaactttggcacaatcgaagctttgctccgtttcggcgccgatgtgtcattagccgactcggccagcggaaagactgtggtgcattacgcggtggaaaagatggatttacaactcattgaggtggtgcattttatccattttataactatacatagaacttgcacaaagaaagtcaaataagaaggcgtaggggagctaaattaaatgttaagtttttttgtctaaaattttttcggattcatacaatttagactcagtggaaccgaaaagtataatgtaaaaacgtcgtcgtttagctccttcgttcaaatgtcagtgagcatcgaatggcccaattggttgatcagaaaaatttttgtggtgagacaccaatgaacaatttgagcggaatgactgaccgcgtggaaaaatcccaaagggaacaaatgtgtttggcactgatcacttgcggagcaaacactggcactaagcaatgacaatcccctaaaatcggaaatcccactcgtttttcagaatatcccttgaaccattacttacatttcatttatccaaacattgtgacccttctccatttatttcctacaattcatacataggtagtttaataattaattatatttcaattatccatttccattttgttatttttccattcgtttgcgatttttaacatccattttattatttaaaaaaattaatagattctagtgcagaataagcgccccagggtgtaccttagaagtggccccgttaaaaaaacgcccaaaacgtgttccaatcaatctcttatgacctctaatcatcgtaaaaaatattcccgaggtgcggaaaaatcaaaaaaccggtttttgagccggtttaaatcacgaaaaattgcaccaaaaatcagccaaaaacccatttaaattaaaaatttccaaacaaatttggtatcattcgaaagctcttgacgagctaagtctaaaaatttgggatggagtcaagacgaggccatcagagcactgggacaactagtaccagtgaaaatggacacttaagtaacaaagaaataaaggatgaacaaaaataatttgataagctagtgtgaacaatgattaaaagttaatatgccctcatttaattattatgcaaatcattcaaattgattgtttggatcgagaaatgggactctgaagaaaccctcgaaaaatatgatttaagcttgaataacttatttatattcagaataaaactatttagctcatggaaacgagatttcttggtaaaagtctgaagaaaatatgagaaaatttttctaaattaattattcaattatttgatagctgcctctgaaatttcgaattaaatcttaatatgccctcatttaattattatgcaaatcattcaaattggttgttgggatcgaagacctggattctggagaaacactcgaaaaaaaaattatgaaatatttgaaattaaatatatgattaatatgatttaagcttgaataatttatttatatttaggacaaaattatttagctcttggaaacgagatttcttggtaaaagtctgaaaaaattaagcgaataatttggaaaatttttaatttagttataaaatagcagcgctaaattttgaattgaatctttatattgcctcctttaattattatgcaaatcattctcctaattagttggggtcgacgacctctgttctggagattcattaatttttatatttcaatgtattcgtaaacaaacctataatggctttctttttaacctcctgttgcataagagcatgaaaagtaggatggtcaattgatttaaatgtaatgttgttacagataatgtaatgcattatttttttgtcggcaatggtaatcgttcctaattactaattactgatactgaataaaattaatggataattctaccggaggaagtcatgttcatcacgttggtaatttttggctgttccttctgttgcttttgtttggcgcttttccattctgtctcaagttgttggaattttttgtcatattccgatcctttatgaagcgacgaattgaggtggacaattaggctcttcgtggagctgtcgttgattgagaattcagacttttgtctattttgctccttgcacactaagcaaattccaattttgccatttttactttttttgaacaaccctatattcaaaattaaagaattcattagtgcctaaaataaagaataaaataaagaattttaaattaacatgtccaggtttttcatgcctggacctggatttccaaactgacctggatttcctggacaaaaatccaggaaaatccaggtccaggaaaaatccaggtctgaatcc

SEQ ID NO: 4153 - DNA, 7336 bp, Heterodera glycines
agaatgcagagagctgatagaaagccggaccaaattttggtccattttggcaggcgttggttcctatttctgtgccggcaatgatttgtccaattttacgcgcggcgtcaaaacgagcgacgatttgcgtgctatggccgaccgtggggagcgcgtgttggagcgttacgtgcgcgcgttcattgagcatgaaaagccgctgatcggactgatcaatgggccagcgattgggtggaggaaaaatattatttttcgagcaaaattaaattcgactttatacgacattacatgccccgaatctttcagaatttctgtcactgttttgcctctgttcgatttggtcatcgcttcggataaggtaacaaaaaatgccggcgatcgaatcaaaatatggcatttttctcctttttcactcgctttaggccactttccacgcgcccttctcttcgcttggccaatcccccgagggctgctcctcctacacttttcctctgattatgggcacgtcgaaagtgagttttgttgaattgaattgcaataattttgctgcactttttaatgccattccgtttaatttccattaattccttaatttgttaggcatctgaactccttttgttcgacaaaaaaatgtccgccgaagaagcattggagcgcaatttggtctcccgcgtcattcccaacaacagttttggcaccgaaactgaacggatggtacagcacttgatgatgagagccatttttcttttaactttttggaatatttctgaaaaattcattaatctcgaaaccataactcgagtttcactaatctctaactgccccacccccatctaattaaggtaaattcgctggcgtcccttccgcccgagtcgctgcgactgaacaaatcgctgttgcgggacgtgcaccgcgacgcattgctggcggtcaacacgcgcgagtgcgcgctgctcaagtcgcgatggttgtccgaggagtgccaaaacgcactgcgaaagttcatgacacggaagagcggtggcggttgatgggccaattgtaaaaagtcaagggcatgacaataataatgataattacctatactgtaagaaacagggcaaattttactgaatttatgtgtctataaaaatgtatataatttttgctcacggatatgcattttttttttgtctgccagtcgaataaaatgatgccaaaaattgaaattgtgtttagaacattatgtcagattttattaccgatgtgatacgataaaaagtctgttaacaataaaactattagcatttttaaattgctttttgaaaaattttcaaaattgataattctttttagaggcttttgggtcagaaaaactgatttcaacacctatttcggcccacttcgaacccggattcaaaaactaaattttcgacaaaattcatatttatgcgacaaaagtaattcaaattcacgaactgtcaacaaaactttaagtcattatttcggaaaaacatgtgcaaaaaccaacaacaatttattacaactccaaaacgcttaaatgtctcatcaacaatactttgcaacaccaattaagcacacattaaatactaaattttcatcaaacaaatcgctccgctattttctcatcgacggtggcacgtacttggacttctgaggctgctgctgcgactgtgctgcctgttgctgttgttcgtcctccttcgccttcttgggctgttgctgtgtctgtggcgtttgctgctgctcgacttccctcggcttttgtggctgttgcgtctgtctttgctccttcgccttttgcgtctgcgcctgtgctgcctgttgctgttcggcctcccgcgcctcttttttgcgttgttccttcctgcgctccgctcggtccttttaaaaatggagtttaacagcgaaaatgtgatggacacaatagccagtgccattgcaaaagcaaataaattttaattctcaatattgtcaatagcccaagtgttttacaataataactttctaaattccaaaaaaattccgtcgaattttgaataaatttatagccaaaagccattgtattgctcttcaaatgtgcctcttttcaattaactactctcctcccaccttcaatgttttgttccgagcttcctcaacacgctgtttccacgccgcctgctgttctttgaactcttcggcatgagattgaataacggaacgcataaattccttggccccctctttggcgctcaccaaataagcatatttttcgaatgacaattcgcgctcctttcttcaaaacaatgaatgattattgcttgattaggcatgaaattgggttaaccaaatcactcacaccgctttttcaattcgttttgtttcgtaagcctcatgaagtcccgggtaaattctctggcgttcgtccgacaaatgtttccacagtgccatttcctccaaatgaaatgcccggacggtgtggtcatatttcttctccaagttttgcaatttggtctgctgctcgcgtcgctcagcgtcaaaacgaattcgctgaaaatgttatttcatgaattataaaaataaattgcttggaaatgccttctctctgatgagtttgtcagggtcaactttgtcgaatatcgcctccccatgctctttgaccaactgttggaagaaagggtgcgcctggtacttcttcaacttctcggattgcaactttcgctgaatctcctcctgaaagggatgcccattttactcatctttttgccccttccgtttgtttgttttttgcctgttcgttcagtttgcgcctccgctcgttctctttgttctcctcctgcaacttcttcaactcctcccttctgcgctgttcctcctgtttgttcgcctgtgcctgttccttctgcaatttttcccgcttcacttgctcattggtctctttgtacagctcaattcgcttccttctcgccaaaattcgctcaaaatcggcgtccttttggttttggtaaatgaatattttggcgctttaactgaaaaatgtgaaaatgacaaatcgtgtgccgacaaaatccctactcagccaaaaatgacaaaatccctacatgacaaaatccctacccagcaaaaaaatgacaaaatccctacccgataaaatccctactcagataaaatgacaagtttcaaaacttgccagctctgatagtcttgcacgggagcaacatatttttttatcttaagatttattttatgattcattacgtatttagagcaagagtcaatttcttgaaatgaattgccatgaacaccttgaaaagaatttaaatttgagtaaacggccacgcattgcatcaacagacgacagcattgtagttgaggagcgagcagttgtgcaggtggcagaaatgcgagctgctgccactgacgaccatggcgaaggtgtgttaaaggggaatttgttttcacatttccttttagatttgctccttcagagaggacaatgaaaggagttgtaatcggagggattacgggaggcatcgaaatttgcatcacttaccccactgagtacgtcaaaacacaacttcagttggatgaaaggtcgacaactccaaaatttaaggtgatgatttcacggactttccggcttttaccgcggactgtccgttctgctgtacgttttgccaaactatttccattttttgccctctttctgttcagctacggttccatccccaagtccgcgtttcgtttcggcactttcgaatttctaaagggtcatgcggtggatgagcgcggcaaatggtgttcagccattcaaaagtttgttgtttaaaattttctttaggcttcgttggtggtctccatgttacgaacaatgaaagcgatgtcgattcggaagatgattaagcaaattgataaggtgatgcgcctttttaatattaaaccctatttttcccatcacattatcccgttgttaccatttcactttttttttggtttaaaaatatattcgaaaaaagaacttttttaactgtcggtgtttttggtagggattttgtcactttcaaggttagtagggattttgtcattttttgctgagtagggattttgtcatgtagggattttgtcagtagtgattttgtcagtagtgattttgtcagcgcgcctgacaaatcgcttttcaagtcgtttagaatgtaccttttcttgcataatactgcgttcctttgtattaaattggctcaactccttgtacatttcctccaaatggcttcgtgccttcaaaacctaaaaaaaatgcaatcgacagtgttacattaatgaacaacaaatgtgattgaaattcgtcatttacccacctccgatgtgtttgtgtccacctcactctccaaatcgttcgcaaatccattttcaatatggccaaaacgaacgcatttagttcgatggtcaacccgagctttcaacgattgctgcttgcacacgttcaccagccgatgctcgagttcaatcacttcgtaaaagggaatcagcttatgaagacgagtgagagaaagtgtttcgtacagcgcagacaactcaaagggagggaggagcggattagttgatttacgattggatatccccaacttgtttaaaaacacgtgccgtcacaacatccttcactggctcggcatactgattatactccaaatgtccaagtttctcgatgtccgacaaatgcatttgaacattcactgctgtacgcaatgggtttaactccatctccacacatttgtaaagtgcgtaggcggcgggcgaggccaactcggggatgttcagtcggacaatttctttgaggattccgcttcggcttggcgtaattggcaaacgtaaaagagacgaaagaatgcttaaacaatcaatggtttgtttgagaataattttcattatatgattcacttcaacttttttattgctttgaatcattaccgaatattggccgagtgttgctcctcaatgtccaagtgtttcgtcaacatcgacgcactctccgccccctccggaatgctcaaagttgccaacaacacgcgggttgcttgatccatcgcctcttcaccgccaaattggcggcgcatgtctttgaaaatgcaaaaccgttgaagcagcgaagcggcgtggaaaagaatgttgccgcccttccaaaaaaccaaagaaatctaaaaccaagttgagataatcaaagcatggcacgacttatgcaatgaatggcatgccttctcgtaataattggcatagctagtcggtcggatgatttttttgtccttctctttaccaagttgcataaaactgtgcaaatcttccgcacttttgaacgcttcctgccacaagtccatgttaatcgcggtgtccaattggataagtcgcgtctccagcatatgacccaacgattcggtgttgctcaggcgaattctcaaaagaaaagtataagttcccccgagaggttgtggaggtcatacggatgcaaggcagtcgactgctgggctttctgaatttggaccaaatgttgacgcagcatttcacacaattttcgaaattcattgcgacgctgatatttggtacagaaggcgaatgattgacgggcaatttggtggtacaaattctccacataaacattgttgcgcagcaaatccaaacagtttcgataggcatcccaaagaaagcgaagccacgggctcagaacggtacggtccattcggtcttgtgcaacagcaccggaaacggagagcaatagactgaaaaaaagtgaaagcaatttattttgaatgtttcaaaacaagtctaaaaattctaattctatttgtttcgatgttagggatttggaattggttgaaacagtgcccaaaaccttaatggaaatttttcacaacttattaataaaaccctaaaatttcggggtcttccgtgttttgttaccccccttaaaaattcatatttcggggctttctaagtcactatcacaaacaaagtatcaccaaaggtcgaaacaaacaacatctgcgtggacagacaccgcaaaaatctcccaaaatatgaatttttatattttcaaggggggggggggggggagcaaaacacggaaataccaaatttcaacttcatctatcgatcttttttgagtaatgtgtaaatagaaacaaattgaagactcacttttctggcacatcagcaacatcgaggtcgtcaatttcttctattttttcgatcgagtgcttttgagcttccacagccttttgttcagcaagctgcaaaaacttctcgagcacactttcgagcgacttcacagaaaccttaagaaaaacaaataaaacaatttaaatcaaaatgacgaaacataagaaatggtaatcctctggaattgttcagtcggatctttatcagcctattttttatcctaaacaaactattccgccggaacaccaattccgaaggattaccaaaacattggttatcctgacttttattggtctcataaaaaagaagtaaacagccagttttttacgtttctatataccactcgtggttattggaagtgtcatatgacatagtctaatctgtaacttctttgttaactatggttttccgttccgtcaaattcatggaaaacggccctaataacactcaagtggtatgtaaaatccaaaaagcggttgtttattcttttttagtcaagattaccatgaatttacacaaaggaaacctgctgagtgataattttgtattggtaaagaccatcctttgcaagtggcgaattacgtaagatcacacaaagctcaatgtaaagcatcattatttgctcatatgtttgggtccattgtttgtgacgacggtcctaaaatttcattggaaaaagttcaagatatggtaacaacttttattaagtcatgcagcgcctgaagagcatccttttgcttcccaactgacaaaaattcataagcacgttgcaacgctgcctccggtttctgaccttggaaatttggccgcattttcagaaatcgatctgtaaaaaatcatagtcaaattcaagatgtttcgaattctgtgttcagatccgtaatcagtaaatttttatcctagaatataaaatcgtattctaattttagaaagactttcttttttgcaacccagtccaaaaatcgtcggtggtttttgtaagatagtaaagggaaaaggggtagttttggaaattacatacctacctatttttaaagatttctgccataaaatagaaaattttagtgtttttaaaaccttagaactaacacactaaatggaatggagaaaattgtccatcctatttcacaatttacaattagttgag

SEQ ID NO: 4154 - DNA, 2581 bp, Heterodera glycines
tcccagctcgttcaattgagaatcgacgccagctttactattctctttataaggtgggaaggtgtaaaagggatttatttacaaattgttcaaattttagaacggaaaattgaaatgctgatcatcgatgtacaatttgttgtccttcccggtcggtcatccccaagaagtgcccagtaaagaacatttcgttgtaaccgcccacaaattccattttaatttcactttaatttatttatataaatcggtgctgtgtctgtctgtctgtctgtctctccaattgacgctttttctctttccgcatgtctctctctttattttcctgtcaattgtgtttgttactttctgtcttctccatttctctgtctcttctcggctatcacatgaaagtgcgctttttgaaaagtgtgatattattatatttatatgtttgtttttcttaattgcttaattctcttgatcacttttttgtttctgtgttagcattaattactttttcagtctgttttttatcgcttttcagcatttttatttgttccatttttcgctattaccaacatttgtctttatttttgaatttttgccttgtgaaatcatttacacttcagtgataaatgctcacaactgaatataaatgagaatacaatattgtaatattggttaatggccttctaatcatataaaatctcaatgatcaaggccattaactcgattatcgctaattaggttaaaacacaattaatgatggtgatctgattatttgcttaaacgctgaagagtgagtgagtggaaatgtgttgttgttgtttgttgtccagtgatcagtgcagtttggccaacagatcgttgtattctttggactgcagaaatcgcacgtacggatcatttctgtgatcaaaattatcatgaaataaatccaatcgttttataaaagtgagtcactggggacaataacctaatccgtcgagaattttaaaattaatttgctggaatattttgactattttttaacattggtccacctaattaggtagtttacttcaatatctgttccacgtgtttgaccgcttcgtcgaaaagtgtttcgtccacgtccttttcccgaattctcttctccacccgttgccgaagaccaaacggcaaaaacacctgcggcagaacgggatttaacacaatttccatgaacattcattcctactgtagttggcctacagtacctcgttgtgggcgccttcccgcaaaaattgttgttgtatggttttgcccatgttctgcaaatgtaaatcataatattgaatttctttttccagcatttgcctgcattgcggtgcttttgtttttcaattggcggaattcgatgacggactccttaattagttataagcaaaatccaattaagggtcattagtagggaccggatttgcatggatttccatattttttttttgcacactcatttcggcttaaaaactacgtaaatagtgtttttagctttgtttgatgcttctaggatgcctttttacttccatatttcagatttttgtccatatttgacatccatatttcggcattttcacaaaaaattcgaaaatacaccccttaagatggaaaattttttggaaaatacgccctaaaatcgaaaaattttgggaaaatttccaaaaattgtgcaaaaaatttttcatcagcaaaattcgtgtaaaaattattttttgtaatttactaagttttgttttttttctaagtaaattcaatttttttagtaaagaataaataggaggccacaattatcaaattctatacttcatgtattaaaatgatttttttctttcttgaccggaaaatttatgggtttatgaattttttcaaaaattcaaaccaatttttcagagattttttgtccatattttcgtatttttgtccatatttcagcgtttttgtccatatttcgtccatattttgcgaatttttcaatattataatccatattttggatttttttgtccatataaatccggtccctagtcattagttgtaatgccttagtaattattgctttttattatcgctcgaggaaaaattcaaatttttggcattttttctccataagttcaactttcactcacccaaaagcgcagattttcttccgcgtgaacattgaacaaaaattgacgaaagtggtggcgaccaacctgttgaattatggcactaataaattgaactgatcattttgcttggattttgccctttctttatcccctttgatccctttatcccctctcccacttggttgcccaacaatgcgtcaaatgacgtcgtccaccgttcggcatacgagcggggcagcagcgcctcgagaaagcccaggtaaagcggcgaacggcgaaagcgcgggaattggtcattctcgagcaatttataaatctcctgggaaaggggggggggggaattgaaatgccgggatttggactgatttaacatctttacagcccactgatcagagagggcttatgttttaggacggggttaacaaacttttcaaaagtcacaatatgaaaaatatctgctagtcggcagaaat

SEQ ID NO: 4155 - DNA, 2983 bp, Heterodera glycines
  unsure (1)..(2983): unsure at all n locations
gctattgtgccattgatcggttgttcatccccaccctcttgcgccatctccaagcacttcgagtcgggcatttcctctctggttgcttcgcggagtttctgcgacgaatttggtgccattcatttccgtgccttaaatgcctttgccccacttacgctcatggccaccgagctgagattgatgtacgcgccgtacttctccagcagtttctgcactccgttgcggatccgctcaggctgcttctccttcttcagcttctccacttcttccacaaaaagcagattctcttccgctagcgcctcgtgcagaaaacagcggaacacttgacggcctgaaaagtgatcagaaccacacaactgatcagcagaagaataagaagaagcatcacagggacaaagaaagacatggaacggcacagaacggtcaaaaaaacaagcactgaccaattgaatcgcgcataatctcggctacggtggacgaactccaggaggccgcacgcgggtactgtaacagcatgtacaattattagagactgagatttacaactctgccgggccgggccggactgacattttcagaagcaacggnctcccgggcccggtaaaaaacggtaccgggcccgacccagcttggtctctaacaattatacagtggtaagttgtgtatggccatgctattcaccggggggtttggagatgccgataaagggtcaaaatgccaagacattgaggttactgagcccgaaaatgctcccacctcaatgccgtcagtggtcggcattattggcgacggtccggcactttttccgttcccttccgtcgggcgctcgaaaatgtttgcgttggcattcccttcgccgttgttgctactgttggcattttgctttgtcgttgcctgtgggaaaattggccaaatgaaatgacttttggtgtttggtttgccgtcatatagtaaatattatgcctcggttgcgcccatttcggcacttccattcgcgtccatcactggcggcatgcttctgctccgctgctgttgctgcagttggcccagcggcggtgttctcagtcggcactcgtcgtcagcactcgcggcactttcctttcgttcgcttttgagcgcggacgatggcacagccaaatgattggtgccgctattgctaccgttagtctaaatggtgcgcaatttggtgggaaggacaattgagggatgaaagaaatgccaaaattccacaaataaagtgcccatttctccgcgccctactcttccgtttgcctgttgattctgcgaatgcttccgcgcgacaaaaagtgccggcggcgaagtccgtcgctgtgccgaatggacgggcccgctgatggacggcgcggtggggtcgaagaaggcgaagttgggcgaggaacggtgggacgaatgggctgctgatggactgggcggagggacctggacagggtggacggacactaatgattaatgccgaggtggacgtgatcaaactctgccgatctcccgactctcccaaatgcgtaatccgtaattgtgcccgctgatacgatgaatgaactcaatgattttagacttggataatttaattcaatttactcttttatttgaactgaatcactttctgttattcatttatttttcgccatttggtcacttaaattcccttttttcattttatcgctttatatgatcacttctgatcaccaactaacttctctttgtgccatttgatcactttctccgattacttccattgcctcccccacctctttctccgcttccgcttcttccgctgcgtttccgttcgcttttccgctttccctttgcttctgctgctgctcctcccgtttgagcagttcctcaattgacgccgagattgaggaggacccgtgccgttcttcgtttgcccaatgcttttgctcggcgctggcggggcgttcgtttgtttcggcggcacgcgacgaatgggagacggcggaaccttttctgagaatgggcacaaattattggcaaattcatttgaaacgaacaccaaaaaggagaagggaattgtttaagccaaaaatgtacataaggaaaagaatggcaaatgccatattttattagcatcgctttttcttttttgataattcagaaaatgccaatttttggcaatgttttccattctcaacaaacggagaatgaaagaatgaattgtgagagaatggctttcgttcgctgttggcacaaatggtggcaaatgaaaaaatgccggatggacggcgcggattattgcggccgataaacgcgcccatttggccattttgcggcgggtaatagcccgttaattgcgcttgtgggccattaatccagccaaaaaaaaacaaaggtaccggaaattatttgtgtgtcccccggcggaggaaaatccacgtcaaatttttgtacccagagggttaattaggcaccaaaattgtttttatttaattttcaaattaaatttaaaaatatttaaattatttgattaaaatgatacctataattattcaagcgtaattaaacagtgcattatacataatagctatgctcattagcgtataattacttggtaattaaattacctttatggcacggccatacaaaaatattttatttccttttttcctctcgtatttagataatacgtacagcaattaaaataattttttctctttttaatggtcaattattttaagcacccaataaagtaattttaagccaaaaatttaaacgatcgccggaggggaaattaatagcatcgccgccattttttacccatgggacggacgaccattttttgtgcctttttttcgcgtgtcgaaggaaaatacaatattggcattgtgtttaatggcaccaattttncaagtaacctgngcaactgctgcgctaatgataccttttcttaagcgtaacaaacaatgaaaaggataaccgacgcataatttgagagggggggggg

SEQ ID NO: 4156 - DNA, 2444 bp, Heterodera glycines
tttggggaaaggtaaatcaaggcaattaaaaattgagcgaataatgagacagcgagataatatggtaggtacatcaatacggtaatgaaattggacggacatttaattgtcggaaaattatcaaaaataaaaaaatgggaggaaaaaagtatttttgattttttttttttgtattcgtttgctcggcttttgcagcgctcacttcgatccgatccgtcggtcggcctttgaaatggcaattaccgacgccgccgtgcctttgccatgtcccccactgctgctccccccccccctcacttttttctcattgccaccaattcccgtgccaattccctcgcccattttcccccattaatttgtcccccaataattaccatcggcccaagggaaaaactcaattaccattttataataattatccatatttttgtattattagctgttgcccatagcgatgcaaaggcaaattgggggcaaaagaaaggaaaagaagggctgaaggacagaagaaaaattgaaaaatgaaaggatgaattggaaatcgaaatttgaaaaacacaaaatatttaaataatttttaaaagaataattattaattttattttaaattaattgtttaattatcttaaaaagtacttttcgctcgagcattttgttaatgatccgagcaaagggggggggggcgaaatcagaaaaaaaagcgaaggaaaaggccaatcgaaaacttaaattttattttatttaaaaataatattgttatttttaattaataattaaaaaaaataaatgattttttttactcttttttgttatttgccattcccgtgatacggcacataaaacgctggcattgtgccatccttcccgtccccagtcccaaatgacaaatttaatccattcgtttttcaaatatttatacaataaataaatatgaatcttcgcacaataaatacgattatacaaaaatattttaaacgattgctggctggggaaaagcaataaatgtaaatagaaaagtaataattagcataattaacactaattaacatcaaaaagtaatttaattaaatttttggaatgagagaaaaagaacgaatcgacctgctgaaaagagaatggacctgtattataataaagtaagaagaagagtcaaaccggtgggataagaaaattgaaatggattaggcaaagaaattagaaactaatggaataattaactattaatcattgctaatttgtgaaattattagaaataaacgatggacggacacgaaaagtgaaaaaacaaattgggagttggagttgagaggggggggggggggctgtagaagaatgggccgagaactcgtcttaatttccgtaatgtccgctttatctctctgcttcaccattttccgctttatcttttcgaggcttcatcgtttccttttccgcttctccctttccgcctcattcctcctcttcgtcctcctcattttcaaagtccgactccgtgccgaattcggaaaggggccgtgggcagacgaagtccccgtccacgaggcgcacttgctctcggctttccgaagcattaacggcacaacttttgttgaaatagtaaatgaacggcgcttcaattggcgaacccattcggcccaaaatttcttgcgaatggcgagcctcggaaggcggaacctgcgcaaaagaaggcaattaaataatgggagacgacggtcaattagcagagagatcggaaaatgcgatgagacattttttaggaggaggggggagactacaaaaaacaagttcaaaaagcatgtgctaatgggccaaagctttttaatagggtaccgccacttacgtagacaattcggatgccgaagcgccactgctcgcgcaatgggccgcccccgcggccctttggccgttttccgccgctttttctgtcgctgtcgccgattcgctcctccgccaccgccacaattgtgagctggcggcgtgccaatcgctgctgagcagtgtcgacgccattgtcgccatcgccgctgccgctttgcgatgcgtcggccgtgccggtgctaagcggcgacgggtgccggaggcactgccgcggcggatgcggcacacattcgctgcttttacggcatggcatgggacggaatgcgcccaaagtgcacctggaaaagaagaagcattgatcgtaaaagataaaatcttatatgaaatgaagagggaggggggcttcggcgctatgataggcgccgtcaaaaaaatccaaatttgtttcaaaatttaaatttcggtaattagcgacaatattctttcgaaaatggggacccggcatgatcaatttgaccactcaaacactgaccatgtgctcgagacggacattgcgttggttttttctgtgccgcgttttgccggctagtgcgcgcaccgtgccgtcgccacccaaagagaacgat

SEQ ID NO: 4157 - DNA, 3221 bp, Heterodera glycines
aaatgccaaccgctgactgtccggagagccgccggcggtgccatggctaaacaatgtgaacaccgagcggacggactgtgccggacgcggacttggcacatgggcggagaaaaaagaagaggaggagggcgcagagaaggcagggaaaggcggatggccgagctgggcaaagttgggcatccgatggacgctgtggtggacgcgcaacgcggtgatctgatccggcagatgaagctcaatgaagcggaacagaatggacgatttgaaatgtctgaagcggaaaaggagacgctcaaaactcggtgatggatatcgggacatttcgacatttacagctaatgaccccccaatcagtcagtggcacagatataggcaaatgcgggccattttaaacgggcccattgtctaatcaatttttataattgatcaaaccaaactgatcattcgaaagcaagtttctcgagtcgttggtccatccaacgcttttttttggtcagcggataattaggataattacaatgctaatagggggaaaattgctgattttttgggccaatttctcgcctgaatccgatggccttcagccgcgtgagttgatcaaacagctgctgcatttgcgggtcgggctggtggtggtcgaccaggcagaagaggaagggcggcaagtccaagtcggccagcgcatggaattggctcaactcgcgcaagtacagctcgcgcttgccctcgctgccccacacgcagccgatggctaagcggcgcagcgaaagggcgcaacggaggcgcaactgacggagcgcactgagcggcaaacggcacgcggtcagctgcaactcctcgaggggctgaatggaaaatggcacaaaatttgaaaaatgatggcagaattccaaaaaaggtaccgctttaatttttttcgccaatgactcggaaaagtcgggaaaatggtgaccaatgccctcgggcgtttcggtgtcgagaatgagcagctgacggagttgaggcagtgcgagcagagcggacagaagcggacgtcgggggcgaagtgaggccaacggacgacggcgcttgccggaggaggtgaagtcggacagatagcgcgaacagttccacaagcgcaaggtgcgcaacgcgggcgcacagcagcgactgagcaccccacggaatctgtacaaagggggagaggtactgtaaaggacaatgaaatgcatgcgggacgaataaaaaaagggaatacgaaaaataaggggtgaaaggggtactgtataaggaggggtactgtaaagagaattgaaaatgggggtagagggagtactgtatggggaggggtactgtaaatggaaacgaaaaacatgctgaaaacgacccgccgtttccccaccatatcagttcccccccagctcggttccccccgagaaattttttttttcttttgctaacttagaaattttaaatcttagcaaaaatttaaaaaaaaaatttctcggggggggaactgatatggggggaaaaaggggtacagtggaggtactgtaatgaaaattgaaaaacgagggcagagaaagcactggttgggaggggtactgtaaacggaaatgggaattaagtgggtgtattagtgtaaaggaaataaaccatttaaatggggtaattaactaaatgggagactgtagaaagaggagactgtttgtgttggaaagagtatggtcggtgaagaaggattgaaaaaaggaaaagataaattagcagtccttccatcgactaaattgtgtaaggttaattaagggttaattagtaacaagtgccctcagctaattaactggcaattagtccccgacaacagcaaccacctgtcggagaggcagccgttccaaatggtcagctcgagcaatgcctcgccgtcaatgcgtcccaacagcgtcttcagctgcttttccgcgtccttcgcgccttcctccgtgcgcagtcgaaaggcgcgtccgtccgccagtgccatttggacgcggaataactttcttgtagttgaagcgatgccgccgcgaagggaaacggacgcggcggaagacaacgaagaaacggagggacgcggacggagtgaggcggaggggggcacagctgaagcggtgggaagggtgagggaagagtgaccaagagcaagaaagggctcccgattccggcccggatggatagtgccgatatattccggcgggagtctcggtacccggccgatctcaaaaacttttgatcagtcccagtaagacggatttctggggtaagcactaggtgtgtctgtccactttgatcacacgcatctctactgccaccgtttatgttcgccgttggcgccgtttcgtccgtgccaatcggtcggattgtcaacgccaccacatccgtccattttgtgctgcccatcgcctcccgtgtccttttgctgcactgtccgatgcgaattcgatccaacggcgatgcctaaggcaagcacacacattaggccaaatccagccaaaaatgttaatggcccaccattaagccaatccgttgccaaactttcaacggaaaatcgtccccggtcagcttattcatttggttcagctgttttttgggctgttgggtcgagtttggcagctcaacgactgcttttccttgctgctgctgcccttcatctgaaatgcattaattagtctaatcagtgattgcgtttgatccacgggaatcgcttttttggcaaaacgccaagcaaaagaaaaaagtgccaattcaaaaaaaaccctacccgacgcattgccatgatctttggccaatgccgacgatgaaggcacaatactctgttgcggctgatggtgccgcagctgttgctgttgttgttggtgctgttggggttgatgatttggcatttcaagaaccaaagttgcggagggtcgccgctgtgccacgccgccagcggcaccaccgcccaccagcaaagcggcagtcatttggcaacaattaaaaaaagcaataaaattaaaagctaaaatgtaaaaaaagaaaatggcatttaaatgaaacaaaattgaacattaatttgaggagaaaatgtgagaattgtgaatgattattaatgattgaattatgctctttttctgcaaattttgcaaaagcaaagcaaaaagaaagaaataaattaaagcattttttatttgaagaagcgaagggaaagccgagtcaaatgacgtcataaa

SEQ ID NO: 4158 - DNA, 929 bp, Heterodera glycines
aaatttgggcatttgttgagatttgcttattcatttgttctgttggtgctaaaaaaaagtcacaaatttccttcatcatgatttgccgtgctcatacttttgcctgtttcacctcattatttgatgccacctgcttccaaattggaacaaaatgtggcgcagtgccgtgacaaaaatggcactttcattcattttcggcaccaaagagcagaaaattaaaaatgggaaagggacgatggtaatttggcaggttaaaagttcaaaaataattaatgaaaaacacgaaagtgtcaaacaaacaaaaaaaaaaggaaaattatttttaaaaacggaaaaaattgtcaaaaaaatgcaaaaaaaaaagaagaaaaagaaaagaagaagcaatcaacttccttattagatgacggagaggaattaacattaatgtgcatctttttttgtgtctgtaatcctccgctaatgataataagcgtatcgccaaaaaacaaacccccggggaattcaatttttaatcaaataggaaattggaatttttggttcttatttggccaatatttactgctgcactttgccatggcacgcgaatgccaccattccagcagcagaacacattgaccatttgaaaatgacgccattttcaaatgcttttgcaccgttaatgggggggggggtgggtaatttggtgtcgaatgctttggcattctgtgtcaaaaggcttactgtacaatagcattttgtaggggagggaaggcatttgcaagcagcacaaattactaccatcacacattgttaataataatgaaccaaaaggaaaagcccttccgtgtgtgcaccggaacgaatgaatgaatgtaattacagcggcgcctcgggggaaatgaaacgaaagggaaaaaaaggggggggggggggaatttgcgcagaat

SEQ ID NO: 4159 - DNA, 1788 bp, Heterodera glycines
tctctattaaaatattaataacattcattaatttaattggattaggcaaaggccaactgatcattcatttgttaatcgcgtgaccacgtgcatttaaaatgataataataaaaaaataattacttttccatttgaaccacccaaaaacattccttatcactggtataattcaccaaattcgtccttcaaaatcaaaattttacattgtatcgtcatatcatgtcatcttcgttgaattggtatatccccccatatatcaaccagaacttttttttattttcatatacatatatttccagggtccggatttatacattttttatttttcacaaaatttgaaaatggatttttctattcatttcgtagttgtaagaatgacttgaatattgcaggaaaataccttgatatgaggactttctatatgtaaaatttaaaaaatttgttaatatacaaatttaaaaatttataaaacttgataaatcaaattcagacactgccttgaagagttttatctaacgaaacgaacagaaaaatcgcatttcaaatttggtaaaaaaaaaaaaacgaatccgggccctgttaatttccatttttattttcctggcgcaatttaattaaaaattagtttattttttcttttaataaaatccattaactcctgctgaaagcaaatgcaaataaatatccgagttttgatccatcaattactttaatagtaataatctcttttgactggttctatttttcagttgcgtctccccccccccccccttattttatttttccattgtttcgctttatttcgtcactcttttgtccattttattgcatttatctttaaaaatatgaatattttatttcattttcaattcaatttaattttttaattaattaattaatttccttttaaaattgttaagcaaatgttattgaggctgttgtgactgactgttttttgttaacaaaagtgcaatttactacacactttagccacatttatttcttgttatgatggccatggaagctcagcaacaattagcaattaatggtgccattttgggaatgccgaaaaatgaagcgagttttaaaaataatattgtaaattaaattcaaattgaaatattgtcaaaccaaccaaactttttagcataaaaagtaatttttttaggcaataaatttaggtattaaatagtttttgctttaaaaattcaattcaaaatttcccgacagcgcctaatgcaattttttggtccttacttaaaaaagggtgacctttttctccctttcctgtcgttttaatcgattgtgcctaattaccttaattaactataatcaccaaaaataagtgttgcaattgcaatataattgaacaaagcattgttcactttcagattgggcatcatcatttgtcacttgaaaatgggttcggccatcacacgacaaatggcgaccaaaacggtgctgatctgtgcattttgttgtacaatttggaccactccccaaatttcccaaaaatgatttttgttcaaaagaaatatatacaaacatcagcaacaaagctatcagttgaaacctaagtggtcaattataaaaaaatgtccaatttcaggtgtttttccgttttgcgcctacaccacaaaatttttagcgcgcgccgtcattttggcggtataaatataaaatctgaagcgaaaatttcttcagaagttgcgtcttttgcggtcctcgcgacgaaagaactcgcggggagtggggttgcattttttaaaaattttatggtgtaggcgc

SEQ ID NO: 4160 - DNA, 5353 bp, Heterodera glycines
  unsure (1)..(5353): unsure at all n locations
ttgtgtttgaactcccatcgaaaaaacattaattttgaaaaatgagaagaaaaaataatactcggaggggaactgatccaaagcaaaaatgaagacatgaccaagaacacaacccactgagccacgcacactattagggtaatgaagcaaaaatataccaaaagtatatttatttctaacttacaaaaagccgatcattaggggtgtaaaaaagtctcggtctcgagtctcaaagaccgagaccgagactgaaaacccgagactcgagaccgagaccaaaagaaaccgagacttttctcgagtcgagactcgagaccgagactctcgagtcgagactcgagaccgagtctctcgagcatcactatagagagctatcgaacaacagaacaacacaacaccaagaatgcttatggttatgaacgaaaaaaaattatggtccaaaaaaccttccgccggcggcgtttttagatgcatcggaccctcccccattttttaaaaattttccataatttttcgctggtttatccacttctctcttctttgttcagcctcaaacggtgcttcgatgagtaagcctgacttggattatttatcccaactgctcaaggacaagaagcagctcagtgcttttcccaacatttttgcgcacgtcgaacgccttgtggacgaaggtggaaaattttttaaataaaaaatttccgaataatttaatgtgcgtcatttacaccagggaggatggacggaattcctaattcagacatttttaggatcggaattccgttttccgaaaatttgttgggcctcggattgtccgccaactctaattcatccccccccctttatgaaaactttaaaaaattttaaacttttttcattacgtcatctcatggaattccctttttctgaaaatgtcctctttttttcattaacttctcatttcttcaatcattggtttctgtggcccggtagggaaaaatgccgggttccaagtctcgggcttctggccgcatccctgacacatatattttgataatttttatccatttttctgccaaaagcaaattttaaatcctttttctcttcgtaagaattttaatacaattttttttaacccggggttttgggtacaccccaaaatctcgtcgaccgaaatttcgccgggacaaaatttcgccgcagaaatttcaaattttttttttcaaacttcgaaattttttcttgaaaaattttttagaaaattttttataagaaatttcaaaaaaaaaattatttgctgttcttttgaaaatttttcgaaaaacagtaaattatcataaaatttcaaaaaaaaattgctgaaaatttttctttaaattttcttgtaaaaaaaattttctacttgttttcttttccaaaataaaaattggaatttattgaaaaagcataaaaatttgaatttaaataaatctgaaaataaattttgtccccaatattttccacagaaatcaacagagtccgcgtgtccattttccagtgcgagttcagccatgagccgttgcaattgcccgagcccattggcgaagtgaccgttcgccaggagaaagtgttcgtgcccgtcaagcagtacccggaggtgggggagagataattacaaaaaaattgaggacaaagaatttttctaaaattttaatttatttttcaaaaactaaaaattattttaaagaaaatttcaaaaatacaatttccaaaattctgcaaaacttttaatttttcttaataaaatgtcgtcaaagcaaataatttggtttttaatactaaaaatttttaaaagaactttttaatgattggccgagaaaattaatttcaagattttgagaaaattttgtaaaatttgaaaaatctaccaaataaattttcaatattccccttttaaaaaactctcttctttacaggccttttttcataaattttcttaaaaatctaaaattacctaattacacttttttcactacatatttttcccaattatttttcgcttgtttccatgcacaatgccttcttatttacaatgcaatttatttttcacaaattcaattttctttaattaaataaatatttatttgtttgtttgtttgtttatttaattaattaatttgatttgtcagtataatttcgtcggtcgcattttgggcccgcggggaatgaccgccaaacaattggagacggagacgggctgcagaataatggtgcgcgggaagggctcaatgcgggacaaaaagaaggaggaaatgaaccggggaaagcccaattgggagcatctgagcgaggaattgcacgtgatcatccaggtggaggataaagaaaatgctaatcaaatgtattaatttaaataaaaatagaaaaaaaatgtgggggggggagtcaatcttttttcttttttgctttacaaaccgcttttttacatagaatttgggtgtttttgtttaggacaggagatgccaatatgcgccgccggcaaaattttaatgttcatacttaaatgggtcttggctgacccattaccagaaataaaagaaaattgagtaaaattttaaaaaataccaatttttcttggaaatttttttaaatttttcgtttcggggagtaggggcggcacgtgccccacttcctcccatacggacgggcatgggtcttggtgtcagaccatagttggacaaggagggaggcgtcagaatagttagggtcctacgaagtacgaaattgttagccaacaaaatttattaattcaattttttaatgtttttattgtgtttaaagtgtgaggacgcgccaaaccgtgccgaagtgaaaatggcacgtgccgtggaggaagtcaataaattgttggtgccagctgtacgttttcatcaatttttaaacacaatataaaacgcttattgttttttgttggtccgtttaagcccgagggcgaagacgacttgaagaagaagcagctgatggagttggccatcataaacggcacttttcgcagcacaaatggcaccgcgggcggtggcgcgtcgaaccgcgcgagtccgtcgtcatatggcaaaggcggcgccgtcgcgtgcaatgcttccgccgccgcagcggccgcttcattgctgcgtgagtttggcggtggcattggcattttgaattgcgaaattgtgccgatcgacgacgtttattttgttgaggattttagattaaaaaattttttggaattatttgacatcgcaaacttaaaaaaaaaagtaaaaatttgcttttttcctaaaatcgatcactaattaatttaaaattaaaatgccctgcggcatttttcattttgaaaattttttgaatttcctaattatatttgaaaattttcaaattttcttaatttgcgcgatacgtcttttggccgattgatctatgcgtgatttgtccacacaaacaattcttttggcattcagaattagatccccgtctgctcggctgtccaactacggcattttccaacacttccgctgggctcgccggcactccgctgattatgccttcggctgccgctgtaagccttggcggccttaaggccagtaattagggcattaacgcgcgactgtttttgggcaatgccaattggctgactcatagagcaattataggcccttccttttattgatctcgagacccaataatcgatattaagattgatgagacgggcgcaaatgtcccccccccccaccctcccaccgccgttttctcttaccgtcccccctagtattttttctttaaaaaatttttttgtttttttttctgaagaattactaacaatggttttgaaattaaaaaaaaaatttcggcggtgggaaacttcgggggagaggaacgagacaagacccctattttttccgaccagagaccgagacacttggcatcactataattaattattctgctacttgatgatttactcttctgactggaactgacagacttaaaaaatgggtgtgttatgtttccctccgagtcccttcccnncnctatcagttccccggaaattttttttaattttcaaacttaaatttttagaaaaaattcttgaaagttttttaagcaatttttttgaaaaattttgaaaatttattcaaaaaaaatttatgctcgaaattttttttaattttcggggaggaaacgacggggggatgaactgctctcaaaaaaatacagttaccgtatcccccggaaatcctattaaagaaatatttctgctgtaactgcttgtaaaattttaatataattgattttattttcaaataaatcaaatgattttaagaccagccccgtgctgtcgtttcagtccgctgctgcgcaaccgtcgctcgttgccgtcaacaattcattggcggcacaggcattggcacttcaggcaaatgccattaaaaagcgaaaacttgcgaaacaatttttaaataaatgtggcgttgtgtttacgtgttacagtatttgcagttggcgtcccctcacacctcggcagcccaactgttcgccgcatcgccctacagcgccgggttggcatccgttgcgcaagcggcgacggcaccgaatgccattgactaccagcaacagttgctggcactggggtaaacggaaattgctttgtcggcaaagcctagtaaaattcaaaaagaaaaaaggcttcttacaccaaaaaagaattaaatttttatggcatcttaaagcgttgtgatgaaaatacgaaaaaatctttaagagaaaatctggcaaattaataaatcgatattaaaaataaccgaaaatttgaaattctttcgatcgattttttcgctaaaataccgaaaaatatatatcgacgataagtcaatcgttcttgtctaattaataccttttttttcttaaaaacggacaatttttgggccaaaattggctgagaacttggcaaaaacacatattttttgttgtttcggcgaggtttgatttataaaattctatttctccattacagctgttttgcaaaatcctctaccatctcttggtcattaaaatacagtatgccaagcattttcagccaacttcaacagcaacatcagccccagcagtcacaacttgacgttgccgctcagtcccaacaactgtccgcactgttccagcagcagcaactcgcactgtccgcgcttcaacagttcgactacggtagcggtgccgtcgtcggttacggtggcggtggtggaaaaacggactcctccccgtcttcttcagccgctggtcagagcctcggccaaaccataccgtacctttaggctctctcatagtgtttttaagtcatcatattatactgtgtgttttacaa

SEQ ID NO: 4161 - DNA, 2537 bp, Heterodera glycines
gtttttaagtcatcatattatactgtgtgtttttacaaaaccgttaatttaatttattatttttattatttcatcgttttcaagttttttatttatttcactattaatctttcttcaaaaaaattctcggtctccgcccgatttctatatcataaaatgatgccaaataatcatatcattttcacttttcaatcattgtcattcaattcttgctcagggaagacttttctttaatttgcttcggtttaaaaattaaaatttttcaatttgtccttttacataatttaacctttttttgggtgtaagcatttgtactgtcaataatgccatttttgtcctaaccatcgtttttctaatgaacaacaaacaacatttttctttgaaatattttctgtacatatattgacgcactaaattttcaaaaaattctttaactttacacttttcgcacttactacgggttaattttttaattttaattttttaaataaaaataacttcaaaaaacgcttcaatttcatatttatttatttatttttaacccaaaaacattggcaatatttggtcaccacaaatatctatttttcttattaacatttaacaattaacaatctgtctgttttcacaggcggtggttacattttgtcgacccatcgccgcttcgtgggccacagtcgggacagcgctcatccgtacggcggcggtgggagcggaaaataaaacaaaacaaaaataaataattcaatttattaaatttatgtagcatttcaaattttaatgttggtttgagatttaaatctaaaataatattttttgtttatttttatttcacctttttacatttatattataaattgatgtttttgtttgttctccatctcacattttgtctcgttttgtcgtcctattacttaattactaatttttattcatacatttttacttttttcaatcattttttgatttttataaagcaaaatcataaattttaactacttaattatgctgcgctaattatacactttcgccactagcaaataatatttcaataaaaaagaattagcacgtaattatgacttccgaatcactaattattttataacagtctaagtgtgtaaaaccgaattccaacttttttaggcttgaaactccgactttccaaatttttttcgagcctaattctatgaatatatatatgtattatgacatatccgggcatatccgatttttatggacattttaatacgaaaattcctgggcaaggcaccttttaaatataaaaattcaattttttttttttttgctttaatacttttgacgcttataattatctttttttcttacttattattacattcattaacgcttctaaagtgatttatttcttgcaaaatttagcataattttaaaaataatatataatccatcaatatattagatattaaatattttccagttttatttttttctgttcctcactttaatttcgtcgctgaaagatcaatcccaacttttcatgtctcaagccttaactttttgccgtgattgtatttgctgtctccgaatggcataatttttgtaatcttttgacattaaaaaggtggaaatttatttaaatgaaatttattaaaaaaagatttattcaaaaaaaaacaatttccatttttctctgccaatgtgccttcttttcccccttcattgtgctcattgtttttggtttttattgttatgtaatgtaatttacccttcttttgaatgatgcgcagataaaatataacaaatgatgttgttaatataaaatgaaatttaattcgtttaattaaatgggtttttgttaacctaaaataagttgtacgacatttgcggcagaactgtcaaaaaaataaatgcattttcaataaattttcaatattccaaaaactgaaattaatgactatttctcgccatgagatatcggcaccttgtaacaagctctttccacatgaaatatttgtcggaaaatattctgacaagagtttaagtctgggactgaggtatattataaatttaaattaaattgacaccatcagtagggaaaatggaaaattttcttaataaaattaaatcatttgccaatatgttaacagtttatcaacagtgttttcaaatcgctaacaactacatcaagcaaaagtgctcaatcttagataaacaaaaacaatttaaaacgttcgtcgtgggtggttgggaatcggtagtgactgtaggcctcaatcatactgtaaccggaataattggtgaattggctgaaggacagtcccacgggcaccacgcaagcttttgccgtcattgtactcacgtgggcaattacataggagtggaacaaatctggcgaagtcacagggccaatttccatttcaatcgctcgcatcaaagtgccaagatcgggtgttttgtcatttttactaaacgttattttgtggattaaattaatagctgcgacattttcaattttcttattaattttacaacttatttggcctattataatattagta

SEQ ID NO: 4162 - DNA, 2018 bp, Heterodera glycines
  unsure (1)..(2018): unsure at all n locations
tttttttacaaatctcacgtcacgaaaatattatttattacntcaattcaaattctaaatttcaatacagcgcaatgtttcatctcatacntcacaggatgatgtcgtacattttgtcacgttttctttcaaaccatcgctctgccttgtgggcccttgtcaaatgccccactttgtgccgaaacaatgaaaaattgatccctttgtaaccttttacgaccgcgcaataactcgcagggcacctctgccagaaattttcgattctgtcgaagtcattcgtgaccaaaatttgggagacgtaactgaatattaaaaaactgttccgaaaatttgttttttcggttttaagccattttggtggcggtccgatcacctaaggattggtttgatcaagtttatataaaagtgattcagagcgattattcatagaaatcaatgattattggtcattgtttcacttacccgaaaggcccacgtggcgaaacaatgtcatcgatcagatttgcggtataattgtacgaatatgggtcgatgattggattctttatcccgatcttgacatgccgaattatttccagtggccaggagttttcctgtaattgacgcatcacattttagacaaggatgagtatttgcaatattcttttttttaattgaaaagtttatagagagtccgattatgatttaaattgagaaatataaatctcgtaaaaaattaaaaaatgagaattcaatatatgaaatcgtaaaaaaattaaaccattttgtcattttttaatcccagctataatcgcataataattttaattgctacttacgagttccgctcttatccattgagttgcattgcccgtgatatctttcacaaattcagaaattttttcaatttccctcttaatcaagtgttcatcgcccgaaaatgtgaagtttgcgcacattcctccaatcatagccttaagaagcatgcaaaagtaaggaatagcttataaaggaggatcctcaggtgcccgttgggtttcggtatgaaattttatgggtgggtagagcaccaaggattcttaagaaaaggacttaaaatatttgccaaataagcatgtgtaccgagataaaaaatgtcaaagattttaatgggaagataataaaagacacaattttaaatagaaaataaaattgcataaaaacggactcgaaccgagcagaaaaaagtaacccaagtcaatttgtttttctttttttttaccgattaaaaccttacaaattaggaattttttgccaatgcaaacatgctcatttggcaaaaattgaaactatttttcttaagattttttcggcttttttggcgccggcgccaaaaatgatcagaaaaaattcattaaatgaaaattacagcaaaaaatggatttttttttctcttcatgttattgcccacagtcgtgggttcggatccgctcgacagatgctgaattattttaaattttttaaaaagtgttattccaactagcatatttttatgcagttatttaaatttattttatgatgctatttcatagagaattgtttgcttatcattttaaattaatttaattgctctatcattattttagaagtttttatgaatttttaaaaatttgttatttttatcgatttttctaagtgatctaggtggttacagtttgaaatgttcccttgttggatattcaaccactcataaatttcataccgaagccccctgaacccatgtggataattcaaagtagcatttttcaattgataatgtaaaaaaatctttacgattttcatggtgtcaatggaaataatttcggcaagccgattgattggatgcctcatcgacgagtacttctcgtagacgctccgaagcaagcacctaaattgaaaattaaaagttaataattattagggatggatttttatacataaacataaacccagaattggactttcaaaattattaaatttattaagaaaatttggtagaattaaaatgagcatataaacaa

SEQ ID NO: 4163 - DNA, 1882 bp, Heterodera glycines
ttcgcccctcccttccccccgttttctcccttattttccctctccaacttttagatcggtctccactccgaccatcgtccccctgggcaacttcccatgccccccgcctctccccccacctccgtgtctccccattcgctgccaatggccaaacgcgccaaatcgtcgtcccccgccctctctctgtcccattgtcagttgtactgctcgctgcttctgttcctcctctccatcctcctctccgtcctcatcacctttcttctcacccggaatgccattcgatctcaaatagaaagggtcaaccaaaatgaagcggtgacggcaaaactcgtcgccccccacggggccattgcttcgctgaacgcgggtcatgacatgtgagtttttggaaggagttcaacccgtaatttgatcgatcagaacacggctacgcatgccgggaaagtcactgttggccaacgcacggccgcgcggaaacgaaacggcggacgaagcgaaggaagagcggccggaaaagcggaaggagccgggcgcggaggagctgagattgtccggagaggcgcgttcggccgatgcttcttcgttcccttattttgccatttcagcttttccccatttggtacaatttgtctctgaaagttttcgtccccggctttggtgccgaaatttcgccccaactcaatttgacctttaacggagatttgcttctgaattttgccgttaatcggacaacccgaacaattgaattgaacgcgttaaaactgcgttttgatccgaataatttgatggcgtacgaattgaaaaggacggacaatttggcaactggggacgaggtggacagaacgccgaaagtgatcggaattcgggtggatgaagcgcgagaaaaggcgagcaaaagggcgggcaaactgtcgatcggagtgccaacatctgttaaaaacggtccttttgaaggtgttcttcgacttggacggcgatttaaccctgggaaatcattacgccctgcgggtgatcggagccaacgaatgccccgctaatgctcacctttctctccttctcgtcagattccttattcgggcccaatcgcctccaaattgtccggcctttacctgaccacgtacacaacgctttccggagagcacaaatgtgcggcagtcactcaaatggagccgacggatgcgcgcagaatggtaaaaaaagggggagggtggaagaggtgggcctaattggacaatttggaagtgattagaggcgaatccatttgtggttatggttggtgagcctaattagtttgctaatgaaggtgccctccttcgatgagcccgaattcaaagcgatctttcggctgagtgtcactcatccgaaagggtcgcgggcggtgagcaacgcgaaggaattgcgggagcagcagcaaacgtgggggaggggtggacgaatttgcaaatggatgaagcgttttccagggaagagacggaatggattcggacggacttcgaggagactttgccgatgtcctcttatcttttggcgttggtcgtttccgacttcgaattcgtcgagggaaacacttcccgtggcacccgcgtttgtttttcctttccattggcactttgttctcattttgtttttcatttagtttcgcatttggtctcgtaaagatgcacttaatttggtcagtcccaccatttttctttggcatttcgttttgctttgctcagacttcgtatgcccttcgggcgggcataaaagtgttggagttttacgagcagtactacggcattcccttccctctccccaaacaggacatggtctgtctgtcccatctcaactcttttctattcgctttgtccttccctttcagatggctttttcccgattttgc

SEQ ID NO: 4164 - DNA, 1328 bp, Heterodera glycines
aatgtttgtacaaattgaggggtctgaagaaaatgtttgagcgcaatgcgacggcactttgaaattggaccattggcagtgccttttggcattttgtcggctctttcagatttacctcacccgcttcaaataccgaaacgcggaacactccgacctttgggacgcactgaccgaagcggtgccggagggaatgaaggattggaagggcaacaaattcagcgtcaagcaattcgcacgccaatggacagaacggacgggctttccgattgtgcaggtcccttcggccaaaagccaccaaattccgtccccctctttttgtccaggttaaacaaatcgacgggcagcgagtccaactgagtcagcagcgattccgaatgaatgcggacgcggcagaaacgggcgcagggggaaacagcagcggcacttgggaagtgccggtgtggtggagcaaagacggacagaacggccccatggaatggctgaaggacggtgggtcccccgcctccgtttgcattgatcacccaattcattgtcagagtcgtccatcaacgcgtccgactccgccgttttggtgctgaacagccaatcccatggcttttatcgcgttcattacgcggccgaggcgctgcaacgcattcagagacagctgttccatgaccacaaggcaatttagaggaacccccgccacttctcatggccttccgtccccgtagaatttgtcgttggcctcgcgcactcggatcattgacgacgcgttcactttggcagaagcgggttacatagcctacgaagcgccgctgaatctgagcagatatttggtggcggaggaggagtacccgccctgggagatggcattggccggtttttcgaccattcaaaactttttcgaggatgagcccgaagcggggccaatgcgagtgagcaaagggaagggccaaacgaaggccaactgaccgaccatttgcaggcgtacatcaagcagataatcaacgcactgttcgagcgggcattgccccgaattagcgaccaaagggacgacgagcagcactttttcgacaagtgagcgaacggactgaacgattttgcattttggcgagtcatcggactgtccgagttgttcagcttgttacggcaacgggtggtgcaaaggatgtgcactctgcgcgacgaccgttgcatttcggccattttgaacctttacgccgatggatttgtccgcccgtgccaatctcagcccgacccgccgatggcttccgcgtgctcacgcgtccctgcgcctttccggacatggcctattgcgaaggcattcactacggggcggagcgcga

SEQ ID NO: 4165 - DNA, 1216 bp, Heterodera glycines
aaaagccccccgcttttgctaattgctcatttgtcagattgtcctcgactttttcattgaccattgggacgaaatttacaatgacttcaaagagcagcaaacgcttctccgttcgatcatttcgagttccgtcgttggcaagtcgaaacgggtcattgaccaagtgagcaaaaaaatgacagcaaattaagtgacacttgtgatttgaggtggaacactttctccgggagaatgaaccgacgacaaagaatttggacgtgttcaaacaacgaatggaagtgctgcagacgaacaggtcgacggaatcccaactttttacgagtccaaatccttttactgattgattggaatgtgcaaattaatccgaaactgctggaataagatttagtctctaaactgaacccaatgactgtttttgtgttaaggcgttggatggaacgaaacttttcgcccctcgctgaatggttcaggtaaaacgctttgaatacttatggccaattttcatggtaactcattcatcacccataggcaacagagtcttcccatggaaaacgaagaaatgttcaagccaatcgaaggtcccacaccatcgcctatcgcttaggcaaagttccaaaacattccatctcagctcaatgtgatacttacagatgattttcatgtacattaatcagaattgtttgttgtatattgcctatatctctaacaaatcattttctttactaaaatttaaataaaagtactggtgatttcccgttaattcctaatcttgtcaggttatttatgtcccccccccccccttatgctcttagttgtattcgtattcacaaccacacgcccctggatagcaaaacagttgatcaaagtcagaaatgaaattgacaaacaaaataaaactagaacaataattaaccaaaaacaaaggtcgggcggacttgtaaaaataagtcaaaaatcttatcactgctgtccctcgccctttttcttctcctcctccgtcggctgttcagtgcttccgctctcagtgctgctgctctgatgttgctggttcttttctgccatctaaattaattaaatgtcgtttgactgattcttccacttagttgttagcccactccatcacaccttgcgataggcaaaagcgaacagcttaagcgatttctgctgcagctcatttaggagagccttcacttcggcagatttcaaaccttcacgg

SEQ ID NO: 4166 - DNA, 1929 bp, Heterodera glycines
taagcgattctgctgcagctcattaaccgactcctttcacttcggcagaattcaaaccttcacgggttgccaacttcttcttcaactcttcaagtttctctttgaccacattaacctaaataaaagagagttaagcattgacaattctcagtgattaaacttcgtctgcgttgagatgttccgcgtattccgtgatctttgactccgtgtcgtgcagcaccgactccgcatggttaattgcctcgatcgtctctttcttttctgcgtcggctgctgcgtgtctttccgcttctcgtaccatgttttcgatttggtctttattgagtcccccggacgattggataataactggaacaaaccaaaaatttacaattcttcatatcgaagagtcaaactttgctgttctttgccagttccacggtctcgtgccgacacattcacaattccgttggcatcaatgtcaaaagcgacctcaatttgtggaacacctcgaggggcaggcggaataccaacgagagaaaactggcccagcattttgttgtccaatgccatgtcgcgttcgccttggaaaactttgatctccacttgagtctgcccgtcagcagccgttgagaagacctttatttaagaaagtagaaatcaagtgttgacagcaaccaacttggctcttcttcgtaggaatggtcgtattacgcgtaatcagtttggtgaacacaccaccaagcgtttcaattccaagtgacagtggcgttacgtccagcagcaacaggtccgtcacatgtccagcaagaacacctccttgaattgcggccccgatagcaacagcctcgtcagggttgacagctttacttggctgtttgccaaaaacttcctgtacagtttgttgcacctgaaaaacacaaatgcctaaacttggtaataatataaagaacaaactttgggcatgcgagtcattcctccaaccaacaaaatctccttaatgtctgagggcttaacttccgcatcgtgcatagctttcttgcacggttcaatcgtccgtttgataaggtcggcggtgagttgctcaaatttggctctcgacagcttcacgttcatgtgttttggtcctgatgagtccacagtgacatatggcaaattgatatccgtttgcgtagtgctggacagttcgcattttgccttttcggctgcttctcgaacgcgttgcatggccattgggtctttggtgaggtcaattccttgttcgcgtttgaattcggcgacaaggtgatgcacaagcacattgtcaaagtcctccccgccaaggaaagtgtcgccgttggtggatttaacttcaaagacgcctttttggatctccaaaatcgaaatatcgaacgtcccgcctccgaggtcataaacggcaatgctaaaatatagaatagtcaactttttctttgatattaatttgtgtcagtaaaagcctcttgagacatctcctttcagtacttgaaatttggtaaatgcttacactttgtcttccgccttatcaagaccataagccaaggcagctgcagtcggttcatttatcacgcgaagaacatgcagtccagcaatttttccagcatctttcgttgcctagaaacaaaaaagaaagtaaacgatcaattaatttgaaaacctgtctttgtgagtcattgaaatacgccgggactgtgacgacagaattcgcaacggaagtgcccaaaaaactttcagccgtctccttcatcttcatcaaaacaaaagcgccgatctgagaaggcgaatacaactttccttgagcttcaagccaagcatcgccattagacgccttcacaattttgtacggcacaacttttctgaagaacattgtgtggttattgcttagtgcttttcattacatgtccttctgcacttcagggtcatcaaagcggc

SEQ ID NO: 4167 - DNA, 4627 bp, Heterodera glycines
  unsure (1)..(4627): unsure at all n locations
agtggtggtaccaattcactgtctctctgttccttctnttcactcgcttttccgcttcttcctgttcgcgtttcatctttttctgtttatgattcaccttctcattgagaaagtattcgcccgtctccaattgttcgtccactttccgtgctttttgcggtggtggaaatggtgtgtaatcggcctttgtcttccatttggtttttgatttttgcttcgtttttcggatatctttagcattttgcacctaaacacagcggatatttgtatttaaatgcactcagtaaattgacccagcctccttttttgtatgttcattaccttctttttgaactttggcagaaaacgttcccaattttcgttcctcagtttgtcatccttcatcagctcctttttgatcattagcgtttttatgttgtaaattggatgaatgtttttcatgcaatcttccacaatttttctgtgaagttaaacaaatgagttgcgaatgaattattctgtttgctttcgtttcacctgacttgcttcagtccaaagtgtgttccaatggacgagacggtgccgcccttaacaaagtcaattccaaaactcaatacccaaaatcagaaaacgttttgataatttataacaattccatccaacccggtttaagcaaatgcatacaaatccaattcccatcccatgaaaattgatgtggccacctgaatgtgcacaaaacattccgtgaggagttcgattgcctttagcgttgctccgttctgtccaactaatcgggctcgcctcttcacaaaacgctcgcgatttgggaccatcgatgaaattttgataatatcgcagaaattttggtcttcgatcactcgacaagcctgaaaaagaatgcaccaatcaaatttattgtcagttgtcttttcttagtttgaaagaaactattaaaagtgacgacctgatcaaatggtacactgcgggccaacagttttatgaggtcacgcgctttgtacagaatgaaagggtcccatgtctttcgcgtcgttctgacggtcattgtgcctaaattggtgacatttttcattcgtcttttctcgccccctttggtgccaccttcaaaaacgtccaagtccgccttcacgtggtgctccaccaaagccttttgcaccaatggccacgcttcccttatgtatttctcgcgataacgcggaaaaagagtggcaaacgacgactcacagaccattccctgggggttgtcgtcggggccgaaggtgctaatgtctaaaccgaaaaaatttacgagaaattagggtgaattgcttaccccaccacttctcatccttccccttaggcaatttgggcgcacttcgtgatgatgaattattctcctgttgactctctttgccttttcgatttgccattgcaaacttaacaattaatttgtagtgtggtcatattgtttgaattttaataaataaataatgaatccgtttgaattactgcaaaaaacatcaaagcattctttgcccataaatttattgatcaaacaaagatgaacaatttagaaaatttacagttttgaattaaatgaatgaaggttactttatacgtaataacaaaaactgcataaatggcgattttgccaaaataaatagtaaattcattcaacaatcttgacaatttttccaattgcgattgttttcccctcgtccctgagcataaaccgtcccatttgcggaaaacccttgaataaatccatgcaaaactgttccgccgattcgagcctcagaatgcatttgtcgtcctgcttcacaaactttgtcctcttcttgttgctcgggtcttttttgtctaccgtacaaattacagcctaacgaacattaaaaagcattacaaaggccaaacgaattggtcggtcaccttcactgtgacttcctccacagcttcgtgaatgtgcagcacacagccaaaacccgaagttattattgacttatagtccaaaataagcacctaaaatatagtaaaacatgaaatacaaaagcagcgtaagctatcagtttatttattttttacctccgcgtcgaatatgcgaccaattggacacggagaatcggaagtacaaagcacaaagccggacattatttccgtgtcctcgactccttttattttcagttggaaactatcaccagcataaacaagttcggtctcaacatcgtttacaaaggaatttagaacttgcacagacactcgatttggcattaatgtcagcgtttgtccttttgaaattgaaccggactcgagttttccagaaacgactgtgcccatgtcctgtaaaatcggctctaataaataagaaagtaaaattatacagagaatttgttcgctattatgccgcgcactgggccattgaaatccctcgcgatcaaagggagggagtcgatgtattccaagaagcacatcccggtgtaccaagggcataagtcggaagaaggccgttccttaaggaaggcgcctgtgagtccggagcatggcataaacatgatgtcattcttcgggttgaagccgcacttcctcaagaaaggcgtcagctcctcctggatttggctgtaacggccaacatcccaattgaccgttgggtcgtccattttgttaacaagtattatcatgtgcttcactccggttgtttttgccaacatgacgtgttctcttgtctgtccgccacggtcaaaacccgtctcaaattctccctttcgagcactaataacctaaaatggtaaactcgggtcagggagaataacaggcgaaatattcattaatanatttngaaaccctaaaagtatgtaacaatttcttaaatattaggatatttaattcgctataattttcaactcaaaaattaatgctaaatgctctccattttgaaataatcaaaatactaccgaccaatactgccaaatcggcttgtgcagcaccagcgatcatattcggcacaaaagacctatgaccaggggcatccaaaatggtaaaatgtttctgatccgtctcgaagaatgctctgccgacttcaactgttttacccttttcccgttcctcttcatctaaaaaacattacatcataaaactgacaaaatgaataattaattctctatcgaaaaaactaccaataatatcttacttgtgtccagtgcccaggataagtaccaactctcacggcccttctctttcgcttctttttcatacttttccaatgtccgtttatcaaccattccagtcaaatacattaattggcctccaattgttgatttgccggcatcaacatgtccaatgaaaacctgagaatgcataaagttagagtgttgatttaaaaaccggtcgggatttaggaaattttataaaggacgaggaaatgttgtagcatatttggtaaacataaatacttactatgttgacacgctctttccgaccttctgctgacattctgtgaagacgacactgctctatatataatatagaaatgaaaatagacaatattaacctaaaaaatattaaaatttattttttcttagcatctttagtagagggtgaaaaagattcagccttggatggggtaaataatgtaaatgtgagaaagaaagtttgtcattttttgaaactcctattcatggattttccaagaacttgattttattccataaaatccaatcaatgtgtataaaaaaaaactcaggtccttgtaggcactaaaaacctggattttttgagatatttttaattacctattattgtcagttagatatttagataaaattaggtaattaaatacataatttttttaaactatttaaaatccaagtcgaggccaggtcccacatgggattcttgtccaggctttctcaaaccaccgaattctagttacatacataaaagtttttaagctctttgttcatttattttgtttgaatgcgattctatgtcaaaaacatcgaagaaaaattttgtgacaaagcaactcgttaaagaaattgttattccagccgacaatgaatttgttgggaaaattttagcttcacgaggcaacaacctccatgaagtagaaaccgatgaaggggaaaacttccttgtgtaatttaaaatttgttttaaaatacttttcaattttttaggagtatgcccacaagatttcgaaagaaattatgggttcgtcgcggcacttatgtgattttacagtcaattgaagaaggagacaaagtgcgagctgaaattgttcatgttttggacccggaaaacattgcgtttttgatggaaaaagaagtttggccggagagatttattgtagaagctgcgcaattgaccaagcgagggcagcgaactgaagaaaatgacgattcggacctattccccgcaacttcggaatctgaaaattcggctgaagagagttcttccctcgtttctgaagatgtagctttgaatggacagacaaatgccaaagatgaaacaacgatttaaaagaaatttaattttgttgcaaagaatttttaaataaattttttaacaaaaatgtttattagaatgactttgttgacctcaaatgtatttatttgtagcgttattattgcttaattaagaaattgtcattattgga

SEQ ID NO: 4168 - DNA, 1250 bp, Heterodera glycines
  unsure (1)..(1250): unsure at all n locations
aatttntggtggattcgaaatgagataattcgccctcaccaggtaaggngaaaagntgtaaaaaaaattttgtaaaccttcaattatttaagcaaatgtcattctgcggnagttttcaacgacttggtagatcttcaaaagatgctcctgaaatggttattgattgggcgaaaaacggtatattatttataaccatttagttattgaacatattttgaaaattcagaaatatgtgcccatttttccattcccatcgaaattttcgacaacgtagaattcacagaaaaaataaaaactgtgtatccaatgttcaaggatgtcaatactgacaaactatcgacccatcgccaatgtaatttttgtagttttttatcttttcactttgaatttttagttgtgtctgacatttgcgatgaaatagaaagacgcaaacgaatgggttgaagacgcgaaaaaaagatcagccgaacgagttcggtgtgaagtgaacggactgaaggtgctgttctggagcgagggcatcgaagatatttacttttatttagctgttgtcactttgaattttgtaatttatatcgttaactttgctgacataaaaattaacacaccgtttaaaaaattagttagtgcaaagaaaaatctcatttagcgagtcacccccaactcatccaaacccaactcatccatacccaactcatccaaacccaactcatccatacccaactcatccatacccaactcatccatacccaactcatccatacccaactcatccatacccaactcatccatacccaactcatccatacccaactcatccatacccaactcatccatacccaactcatccatacccaactcatccatacccaactcatccataacgctgcgagtcatcgtcgtggcatggcattttctgcttatgtggtcttgaccgtggacatttttgattatgccggtcttgaccctggcattttttggttgtacggtcttagtcgtagtattttttggttgtacggtcttagtcgtggcattaaatgccacggcgacgactcgtatcgtgctatggatgagttgggtatggataagttgggcatggatgagttgggtttaccccgtatttcacaaatatttttagtatattcgcttgaaaaaattattcaattattttatcaaaatcttttttgtcatttttcattattttagaacatttttgggaaaaggagtgactatttacacgttttttacag

SEQ ID NO: 4169 - DNA, 5287 bp, Heterodera glycines
  unsure (1)..(5287): unsure at all n locations
aaaaaaaaactcacttgatgcgctcgaacgatgtagtcgatgcggagcaggttgcgcacgctctcgaccacgttcgcgccgaacatgacgccggctcctctgctgttcggggcgacgcctgtgatgctcgtcgacgggtcggcccagaggaggtcaatttccagcgaacgaagcagtggctcggtctgcgggcgaagcaagttgctgagctggtccaggctgcggatctgatcggagatgccaccgtgcatacctgaaaatcagttggaaaacagttatttaaccccaaaaattgccctcccccaaaacttacagaggatcttctcgccgaccagtccgacgaatggcatccaggcgaagacttgattgaagaggtcgaagagtcgacgagcgcccggtcgcgggtaacggcggtcgatctcctcgtagaagccataactgaaaatgggggggggggaatgattaatcacaaaaaaacacacaaaaaactttttcacttacactctgttgatgttggcgcactcgtggttcccgcgcagcagcatgaagttggaggggtacttcacctgaaaaatgggaggaaatgagtttcattttttggggccccctccgcccaaaaaccacaccttgtagcagaagaggaggatgatcgtctccaacgactggggtcctctgtcgacgtagtcgcccaggaagacgtactgctgctccggcgggaggccatgcgttgagaagatcttcttcaggtccgcgaattgtccatggatgtcgcccacgatgacggccggcgggtggattctgacgagcgtcggctgcattcggaagacgtccgttgccgctttgcgagagctggcggatttcatcgtcactgatctgttggggaaaaaaaagggggaaaattaatttttgaaaaactcaaaaatttttctacctcatccgtgaagcgatgagggggcgaacggttgaccttcgtgatgatcgcgtccacgcctcggctggacagccgcgtttttttcagtttaagtgtcgattccttctggatgttgtagtcggccagggtgcgttgcatatgtttaccaaacgcacaaataaatggtgcacatgtcttttatttctatgcttgtttaggaacagaaacatttaattgttttatttagtgtctgtattttattggaatatctcttccagaaagttaaaaaatttgaaatgtgaccggaaatgccaaaaatttcaatctttttaataattaagagaaaaaaattttcatttaaaagatttttttatttttcccatgatagtctgctaatatgaagactgatttacataaatgtgatttatcggcacaaagtataaattaattaggagaaaaaactgttgcgaaaagaaatctaaacccaaattacattctgttgtcccaattgttgactgtgacaaaagggtgggagattaatgaaaattgcatatatttaccaaacgcacaaataaatggcgcacatgtcttttatttctatgcttgtttaggaacagaaacatttaattgttttatttagtgtctgtattttattggaatatctcttccagaaagttaaaaaatttgaaatgtgaccggaaatgccaaaaatttcaatctttttaataattaagagaaaaaaattttcatttaaaagatttttttatttttcccatgatagtctgctaatatgaagactgatttacataaatgtgatttatcggcacaaagtataaattaattaggagaaaaaactgttgcgaaaagaaatctaaacccaaattacattctgttgtcccaattgttgactgtgacaaaagggtgggagattaatgaaaattgcatatatttaccaaacgcacaaataaatggcgcacatgtcttttatttctatgcttgtttaggaacagaaacatttaattgttttatttagtgtctgtattttattggaatatctcttccagaaagttaaaaaatttgaaatgtgaccggaaatgccaaaaatttcaatctttttaataattaagagaaaaaaattttcatttaaaagataaaaaattaattttaaataaaaaattatatttctttttaactaattttttttcatcaaaagctaattcgaccgttgctgtacgcttttgtcgccatctcagcagtcacccaattaactttgggcacagatgaaggtgtgaatttcactctatttatttataacgtttgcccatagtcaatagcgtgcttaattaagtggctgtcatttgcagaaatattgtcaatcatccgagatgagaattgagcaatacattcggaaaagatttatttggatatttaattttgccaaatatccatataaaaatgagcgtagtaaagtgaataaattgcaaaagcccttataattaggatgttgcgaccaattaaattaatcctcttccactaattagcaggaaaaggatttccaggatttttatcttttttttcgcggattgcattttacgacgtgagattcacaaaaatattttctccaatttcgagaataaaattcaaaaaccccaagtcggcgcttatcacaccgccgaacccaactgacaatactgattgacatcatattaaattatgaatccaccaaaatgtctcctttaattgattcaatttgttaaatataaatttatttataattgtctctattccatacaaaaatataaaatatatttaattaatttttttttacgtataggaattatttggttgtgcccaactgctgagagcgcgtcacctgttgcaagcagttcacctgcagcagaacaacccaaactgggaatcatggtggtaagtgtaggaaaatttttaaaaaattaattttaaataaaaaattatatttctttttaactaaattttttttcatcaaaagctaattcgaccgttgctgtacgcttttgtcgccatctcagcagtcacccaattaactttgggcacagatgaaggtgtgaatgtgggggactgatttaatccagaaaaaaattgttgtggtactgtcatactgtaccattacagtaccgcagcatttaaatttatttgcaaattatcttcagatatcgacacatttcgaaaattgatgaacgagtacaacactttgagcgggccagcatttgatgttttgggcaacctgctcagtgttagtgaaaacagcaaattgttgatgaagctaactggcccagccggaagtttgcttgcggcatgtattgagatcgcctttaaggtcaacaaaatattcttctatgccgggatggtcccaggattttgatttgggcgagtggtgatttagccaccctctgggcgaagaactttttttaaatttgagtgcaatttgtctaagaaattttgtccaaaaaataattgtgaattttttgaaaatttcgccaaatttttttatttgttgagaacaaaaaagccgggacatgcgggaaccgtaacataaaaaagtggaataccgtctcggaaccggggtcattttctaccctaattaattaatttggttaatccattcttttcaagcccgaaagtcccactctgaaagcacttgcaacatttcacgactgggcggaccgaaaattcacggaacagaacaatatggttgagattgccatgaacagcatcagagtcgcgcatgacttaaatgattttgacaatgttagcaaactcgagttgttaataacaaataaatgtttttatttaattagaatgttgatgtcccattggcatggttgtccgacatttttgaaacagtgaccaacccaaagaccgtgagaagcgccaaacaagaattcatctcagcgtgtacccaaatgttctcgtcgccgaaaaaaattttaaatgtgcaatttaaataaaaataataaatatatttttcatttttagtatattaatgaaaaggtgaacgacaattgcaacacaatgccacggagaattatgccaattctaagcgagctgagggctctttttgctggtgttttttggcgttacgatgaacagaaactgacgattgagtacaatgaattaaagaaaacgtatctcagtaagtcaaaaaatttagattaattaaaattgttcctttcatctagagctggtcgggaccgggactggtactgaaaacaacgggtacaactgagtacccagtcccggttttgaccagttttgaccgggaccgggactagtcccgggtttttcccggttttccagccaaaaagtcccggtttttcaacccgaaaattcccggtcccggtttttgtcaaaaatcccggtcccgaccagctctactttcatcgaataaataaatttatttattttttaatattcaggagtgctcgaaaaatttgcaattgcttctgaagaagatgcacgagaaatcttcatccaaattcgtgattgtatgttttatatattatcattattacattaattaatgcaaaataagcctaattttaatgacattttggaaatcctcaaaaatccaatggcaaattttgagaatgttgaaaatttatacaaatttttatgaaaaaattattttttatttttttgaaaatataccattaaaaagccaaaaattttttaatattaaaatgtaattctaatatataactaaattactgtctgaccaattacttaaatatgtacatttagtcgttggtgattcaactctcaatgaaactgttcgtttgtcggatttgacactttcattaaacaaaatgtttaaaggggcattgcccgaaatgtaaaattatttaagaaaattctttaaattttatgtaaaaatttttaaaaatttattttagatgcttactaaggagcgtatatgaaggatatgagacaaagcgcgcaccgattctaaaaatggcagaaattgtaaaagtcagcacattaaaaacggtaggcaaatcaacattaatttataggggttgaaaatttcaaacaataggaaactctttttttgtattgcaaacaaaagttgggatttcatttgcctttttggttatattaatatctaaaaatttatacctatttttgatattatttttgcattattttccctacatattttaattttttttaatatttggagattcttgaaaatttatagggatttcttataaaatcaaagactttttanaaaatgtcgccctanaaccgatttttcattcttaattcttttttctgcaaattttttgtccaaaaatcatttaaaaaatttatttacatattttttatataaattatttt

SEQ ID NO: 4170 - DNA, 2442 bp, Heterodera glycines
  unsure (1)..(2442): unsure at all n locations
accgaccgaccctcttgtccggtctctattgtttagaatcaaaaatttagtatcatctaccacgtgttggtgagccaaggatttgagcgcatggaaaacatttggtttgattgtgagccgatctgttgccaccgtgttaggcaattccatggcattaattttataatttttcgacatgagatggggagcattggacgcgcgagaaacgctaaaagatggtttgacaattggcggttgaatatcagcgaaattataaggtgttttattattaaaaataaaataattatggttaataccgtatatgctctaattatagcccagtctctattaatcccgcagtctccaattatccccctccccttctgaggagtttaaaaataatccccctagtctccatttatcccccatgtgggataaatagaatttttaatttttcaaaatttttttaaaattttaataaaaattaattaatttaaaatcaaaatcatttaaatgtttaatgaacatgaaaaaataatacagccgaaaaatcacttactttaccgggatccgaacctgacccacctccccctcataataatgcctcagaatccacatttatgcagggattctgatgccttaacgaagtcttaaccaaaatctaatttcaaattctctatcagcgcctaaaataatcctaaagatatatttttggagattttgggacaaaaaatttttccactcaaaaatcatatgcaaccccactttggtcccgaatcccaaaatgagtttattgttaaaacttccttcaaaaaagaaaaatattaactaaaatacctaccccttataatacaaaaaattgcggatttttctagttttttaatttataaaaacatcttttttcagaattgagtgctgaattttttctcaaaaatgaaaaattttcaaaatttaaaaacaaaatcccattttctgaaaggttcatatgtgtatctgaatatttttgagggttttgtcaatgttttgtaaatatctttggaatttttcaatttttcacgcaaaattcagaaattttttaacaaaaatgcaacaaaaaataatttttttgacgcgattacatttttggcgacatgttcaaaacaaaatgttttttattcataaatcagtcgaaaaataatccctcagtctccctttatcccgcagtctctaattatccccccttttctgaggaggttgaaaaataatcccccatgggctataatcagagcatatacggtattttattccaatctcagtaccaacgacaaagcccctgaattgggcacattgacgaaagcgattgttgagaaagtgggcccaatcacttccgatccattctaccacagttttgtttttcttcacgtcagcgctttttcttcatcaaactgcaaaataccgaccggaatttcaagcggttcctatatgggacaagaaggatttagttttttggaggtcaatgaccatcactgggcaccgcgtaatgaagaatgttttaagttattcttttttctatgaaggattaaatttttgcttaaattagatgttattttaatgattctgaattttagaccgatttatcagaaatttcgacaattttgaatgcatttttccattttattttaaataaatgttaaaaaactgaaaggtgtatttatcgaggtcagattttcataaaatattatctgtataggatttacaaggaatatttgtctatcaacatgaaaatcagggatatgactgggcgtcaataacaaaagtctttaaagaacctgtgatcattaataatagattcaaaaacatagtgatcaagtgttattaaaaagaatgtttttgaattttttttataatcaaaaacccaaattgtgattatgtggacatggcgcccccacaaaatgaccaggccacgaaatgtccaaaagagtaaaaacccacgaaatgtgcaaaaaattaaagttaataaaaattcggaaaaaagtctatgtctattttagagttttcggagtcggtgaacttattttccggatttttataaaatttaattttttttctggatatttcgggtttttactcctgtggaaacatttttattcaaaaaacttttccatgttattttcattttcgtccaattcattctcaatttctgtgtatcatctcattatccattcttttccaagtaaagtttgtccaatttctgaacgagttcaaacagcggtaggccaattatgttcgggaaactgccggaaacgcttttcacaagtgcggcacctttgccttggattgcgtaagcaccggcacgacccctaggaaatattgtaatttanatttgtgagaatttgttcattttattttatgggttagcttaatttcatctcagcaagggactaacaaataagttcgaaaaaaaataaaatcagtttgaaacta

SEQ ID NO: 4171 - DNA, 5434 bp, Heterodera glycines
agttgtgggggaatggaagatataatatgataaaaaatgcatttccgcgcggctagggggggggggggaggttgccatcgtcttttcggagatggtccctttaattgatccacatggaaattgattggaaaattaaaagatgagaaataaatgacaaaaaataattgaaatttaaggaccaaaataacgacacaatatatgtaaatttgaggagaaaaaattaatcataataaaaatttggagaaactttatttattttgaccctttcggctcattgtcagcagtggctcagcagaggcaggaagtttcaccagaatatatatttagaaaatgataatcataaataataaccaatttttatttgattagctcagtaaaaaaaagatgtgagaatggaagatataatttattacaaaaaatagatattttatttgaaataaaaatccgctcgggtatgggggcgcgcgctaacattctcatttcggagatggtccctttattagatgacaaaggaaaagagaaaaataacccgaaaatttttgaaatttgaagaaaaagaaaataaaaaatttaattataaataattgtttaaatattttttatgagaatgtgaaaaaaaagaatattcaaaattgtttgagttttgagaaaattattcattttgcctcccgttataatttagttcttgtcgacttttttcgacccccctcccaaaataaaatcgaaaagttttctgaaatgaatctcaccaataaaatacttatccacctaaattgaattagagtgcccacgtgcatcgtgaggtggtaaagagtagcaaattagcacacgcattgtcggctcacaatcagttacattttgtaaaccccccctcgagcacacaactcatattcaaatgaacaaaataaaaatagtaaaagcatgtaacaaatgaccagatagattattagtcgaacgcgtatttcctatcagggtaaaaaaaacatttagaaaaatctaaatatatttttatgattcaattcctcctatagggactataaaaaatttctgataattgtccatgtataattcggttcctacgatatggcgtataaaatatttcattttgatgattttcattttgctctttgataggttcttctggtggatttaaataatttatagctaatgatacaatattttggaacaaatcatctatttctatacgaaattttctcagctgcttccggtatttataacaggttgccatgctatgttttgaagagttctcattttcatgacatctttgaatgtttttatattttaaacaattctcaaattcaccaagaattttcgaaatatttttatattcatttgaaatttgtagatatagttgtctaatcttttgtgctaattctaaaaatttttcataaatttcatgtattcctggagcactaaatgcgatgatcatatatgtttttgcatagaaagaaattttattacaatatgtcactaaatggtttgcgtcttgaacaatttttctttcccttttccatcttttaacaatttcatttttgatgaactgtatttcttggtcgattgttgtcattttttatgttaatttttttattctcttttattcgtgaagcccaataaaatcccacactacagattgaattctgttttccaactccaaaattttggtgtgaatccgccgagattctaagtgtagaatctttgcttcgcttaaacccttaagtactctctcctccagcttctttacctggtcgtaatctttagaacgttcggcctcacgccaaatagactctaccgtttcaaactctgcattcatttggtccaaaatggtgaaaatttcccagatacaatctgacattttaacgaaccactcacgaaccccgggggcatagggggccttttctcgggatttaattgcccgattaagggctccacgggcggatttcgcatactcatccgcttcatctgccaatactgaaacttctttccttgccctttcagcctcttttttgagcgcttccaacaaaattgctgttcctttttctgttctttgaatcatttttaaaaatttattattatctttccattctcttttatacattaatcagatataaattggtctttaaatgttggtcttggggaaggtccggggcggtataaatattccttcattgtttccttaactttatcggccaattccccaatcccgaggtcagattgagtataggcgttacggtacgcagtaccgacgtcctgtctatactgcttaacaatttcaaatgctcccttcgcttcgtctgccaattcacgacacattaaaacatcttttcggtccaaacacttatccatttcttttctaatgtggcctattttctgcctttcttcgttaattttttcggaaattccttgtacttttctcaccccttctaataacctaccgaaccacgttttcatacccggtgcctcaggatgacgaactttaattttttctgcctccgtaattgccctatgagaagcagcagcaaaatcccgtgcttcgttatttaatctggtggtatcccgaaatgctttttcaatggtttttctcgcagcattcaattgctgtttttcttcattcgaaagacagcaacaattgccatttgtttggtcaaataccaaaccaaaaactacgaagaaaattattttattcatttttatttattttttagtcaaagttcttttatattttatttatttgatttttcgaaacttttaccaactcggcatcataaaatattcctttaatgttatctccatttaaatcttcaattcgataagcgattgggtctgatttaattattttataaattttaaaaatttcttccgtaaaattcggaagatatcccttggcgaattttcctttttcttttgtaattcggactaaatcaccatttttaaatttattctttttttctgtttccaaatttccaaataacttatcccaaatatttccggcattttcaaaagtaattgaagacggcttgacccccagtgtcctatttacactgttgttaatgtttgttattattttgtctattacatcgacccatcgtagagtgtctttctttgtaaaatatctgtacaaacgctcttttattgtccgatttgccctttcaacgactccggcgtgcagatcaggactatacattacatttttgatgatgaatttttcctcaaaatattttttcatttttcctgcttggaattcaagcccactgtcactatatatcttcatcgggataattttcgacttttcgaaaacccgatcaaaagcctcgatcatgtcctcactcttctttgacttggctggtgcactaaagatcattcgactcagcacgtcgatgcagaccaataaatacttgtaaccgtcgttatgttttttcaattgatcaaatatgcataaatcacactgccaatcggtgtggaagccactcggtattgtctttagtctagggaatcttttcctgatgggcttgtgaatcgtgtaagttctctgtttttctaggaatttatttacgtcatcggtcgttatgtctgggtcaatctttttcgcttcgtttaaaattttttgaatccccgcaaaacttgccggagattttaaattataataaatttttgttaaaattttatttttattcattttattttttcatttttgatcatttttgttttatatattcatttctactttttacaatattttcatttttttcgcaaaaaaaaatatatgaaactccttatttttatgcgtattttgctttttggtacctatcttatggacatgaatacctacaattacataccaaaacagcaattgtacctgcacctgcaaacaaacgcacttgcacctgtatctgacatacacacatttgcacctgacatgcacctacacttatacttccaggcacaacatcgtatttgtctttgcattaacttttacacaacaccacatgagaacgcacgcatgtacgtacacggaacgcatgcacatgcaaacaaacacacttgcacctgtatttgaccacaaacacatgcctgcaccaaaaatacactcacacatatgcattttcaccttacgtatctgcacctacacatgcagacactcacacattgcacaaatacactcacacgcacagcatttgcacatacgctgaacgcatgaacctgcaaacaaacacacttgcacctgcacctgagacccacacacacatacctgcgccatagcacgcacacaaccacatgcattcgcatcaaacttgtatttgcacctgcagttgcaaagaaacacacttgcaccagtacctgacacacccacacatacctgcctagacccaaaacgcgtgcacataacacacattttcacctaatcttgtgtctgccctgcaccgaaaacacgcacacatttgcacttaacaaccacctgcacctacactttcaggcacatcacatgcattttgcaccaaaattttaacaacaccacacactcacgcatgcacacacacacgcacgcacacacatacccacgcacgcacgcacgcatgcacctacgcacatacacacacacacatgcacatctaaatgcaaatgcgcatacacacatgcacgtgcacgcataagcacattaacacgattactcatacacaaacacatgctcactcacaagccccatcacatcacctacaaatcattaagatataggggccgcttgttattttgatcattcattcgcactctgatcatcttctgatcatttgatcactcattctcactctgatcattttctgagtatattttctctttccgatgattcacacgcatttgcacatggttatctgatcattttgataattttttgatcccgatcacttttggtctctttgtcctagtctgatcatattatgatcactcaatcctacttatcatcttctgatcactcactcccactctggcagcttctgatcactcaatatcacacacttcttactctgatcaccccgattactctctctctctctctctgcaatcatttatttgtaatccctcactacttcaatcacactctcactcgcacactgataactcttctatctctctttgatcatactctcacttgtaatcactatttcactttataatgactcattctcactcctaatcatactctaatctacattcactcactctgatcattttctaatcattcagtctttatgatcacactcatcccgatcactctctctcacatgtgaacactcacacagtgattatttttctgatcacgcaatcacttactcacataccctttcacactaacttgtgatcacttattttttctctttgatcatttattagttcccaatccactattctgacctctaac

SEQ ID NO: 4172 - DNA, 2399 bp, Heterodera glycines
  unsure (1)..(2399): unsure at all n locations
tcaatatttcgtcactctcagtctctttgatcatacatttgcttctaatcactcttgatcactagactgtttcctaatcagtcactcgtctcttgtcagtcaatcacncacactcgctcgcacttgataatttcacaaactacgctcccatgtatccataggtacctagcaatctgatcaatgattttcacctaaccttttcactgtttgagcatatgatttctcatttttaatcagtaatcaccgcttattacatatttttcactaaagaatatctatcattatttgaaaaaaagtttttttaattattatggtttaaaatataatatttttatagtcttacataaattggaggaagttttattttagttggaactgaatttgtactgttttcagtgtccaattctatttttcttcctttaagttttatcttgggccttagaattttaattttttctttatgaggaatttcttttttctccaagttttctttttgaggaatttctcttttctccgtgtttttaggtggtcttccccttgacttcttttgtttatccatgttttattttattttttattcttttaatttcttttatacatttcataaatgaaaaaatattaagagcaaaaaataccaacaataaataaaagacaacatttaaaatatttattcaaaataaaaaatcaccaataaccaaaaggcaaaacagttaaattctcatcatccaaaataatcctaaattgaaatattattttggtaataaaaacctgtcaaacaaaccccttcttttgaattggtcgataatccttagtaatattacggctgatcacgtaactttctcttgtcggcctaaagaaattattatttttgttaaagtttgaaaacttacccgaatttgtttgggtgtgtaaaccgaattttcttttcttcctcataattcaaaaccatgtccttgaactcttcgtaatcgattttattatttttattttgggtcattcctctaatttttgtcttataccaaatttcacctttttgattttgtaatttcaaagcatattgtttaggccctaaaattctcaattaattttattaatttattaattcttacccgcacaaactacttctaatatttttgaatccgcatattcttttgacatttcactaaaattaaatttaaaaaaaggatttttggttatttacaaaccctaaaaagcttccttccttaatagggcatgttcctttcggatgaagaaaaaacacactgtctaaaacttaaatctaaaaacattttattttttggttcacctgtgtcggtataaattagtttacaattttccgaattatttattttttccatgtatgagtaaagtttaagcctcgcttgtgcggtagtcctaaattattatttagttgtgataaaacttcacataattaccatatcgaaatcataatgtttgagcatttatgctccttaacatactcgtcctttttgcaaaatatgacccgtaaagtgttgtcgttaaatctgatcggtttacccatttcaatagtgtaatcattaattaattcaaaaaattctgatggtttgctaatcatttttgttgaacataacttattccgcatactaaacttccccctaaaataattttttattattatttttattttttcttaccataatgagtttaatgctaatttggcaatatgtcttaatccaggattaaaattcatattgtttgggtccaattcaatttcatatgtttctctatatgttttcacaaattctattttttcttcttcagttttaacatcctgaggccacccggtagcctcaaccttcaattttaaaaattttctcacataattcttaaacaaatttccatcaaaattttcgtaatggtaaccgcgataaaaccgatcgatgactgcccccaattctaatgctgaaaaaaacgagcatgattcattttaattatttatttcaccttttcttaattctaaagaacaaaattccacggttagtgcccgctgttcggcactatgtctacattttttggaatttttggcaaaaacaaaatcacattttgattttttggcacacgaagtacaatttgtaaataataataaatcatcctaaaaaaggtcaccatttaatcaaaaagtttcttaacctacagtatggaacggtaacacaggcaacaattgatttttggggggaatgactcgtacttttaaaagtccatcgtaagggatatcgtcgggggttgtcctaaaattccatttaaattgtatttttttaccgaaaaattaccattttactatatattgcttcggaatgattatttttgggataccaaccggatagggggtggaataattcaccccaagggtacagact

SEQ ID NO: 4173 - DNA, 5691 bp, Heterodera glycines
  unsure (1)..(5691): unsure at all n locations
gggataaanttggatgaacaataaacaagcactatattatttttaaatgttaattagagtataataaattaaatgggaggggaacataaattatgtaatgtcatggaaatgaagagaaattaaaatttgagaaataaaaaataatttttaatatttaaaaaaatgatttttttaatgatataaaattacataaaattaattttttttttttcattatgaaatttttatattcataatttaatggagagggaacataaattatgtaatgttagggaagtgaagagaaatttttgaaatacatatacaaagaaaattttgagagcgatcaacaattaatgcgaaaaaattctctcgggattttttgatttattaaaataaaatgctattaatgctaagcaatcggttaaattatatcctcaaaaattaaagaattttaaggtcttcatgatatacaaattagtgaaattaaatttttgagattataaaattttatagaaataatttaatgcagggcaaggaactgcgaagcctcgatgcttttagtgaattttctaacccggatttcggctccaaatattaaaaatattgccttataatttaattagtgtgtgccataattcaaataaaatttaaataaatgaaatattttatttagtacgaggctgaggatggtcacctgccggatgggaagaatgttcgctatgccattgatgacaacgaattccccaacttttcatggcgaggctttgtcgtgttctccacaattcaggagggtcagtcatcattcagtttttgggatggatgaggatttaatgccaatgccaaacttggcattttgtaaaagatttcttcaaataaaaaacagggacaatgtctgtcaaggtaatgcaaatggcactaaatgatgccctaagcaatctgatcgcaattctttcattgattaattcgatttgtggtaattaaattgtccaatagattatgaatgatcaatgaaaattctgatgatttcgcaaaaaattttaaaaaaaaaagtccaaaaatttattcgtattgtcggcgcgtggtagggggagggcgctaatttagtattattttttcaaaacaaaaaaataattatttaaatttttattttttgaaaatcattttttgcagagattgtgctggacctgaacatccacaaatcgtcggtgtacaaactgttggcacactatcgcaacccgaccgaagtcaacgtggaattggaggtcaagctggtcccggtgcagacccaaacgccaggtcagttaataatgttgaatattatttaaaaattttttataattttcaaaaattttattggttcagatcttatataggaaaattctatattttaaatttaaatgttttcaaaaaaatatgactcgaaaaatatttgccaggagagaaaaatttgtcaatttgtcaatttttgtattcttttcatttaaatattaatatcaatattgaaaaaaaaaactcagaacagttcatcgccaagggaaaagtatttcaattttcaaaatttcaactcacagatttaaaaaaaaatttcttttttttatgactcggaacaattcgccaagggaatatcaataacaataaaatttaaaattgaatttaattaattaaaattagcaaacactttgccaatggaataatgaaaaaacaactttcaaattttcagactccgaacagtttgccaaggccgtgttcgcgcccagcggtgggcacccgcaaaatgcgtttgtcgagaccaatcccgagcacacatttgtgctgagcccgggccgttggaatttgcatgtgcgctcaccgaagcggctgtacttggattatttggtgctgatcccggctgactattaccagggcgaggcgctgaccgaacgtatcattgaggtggggggtggcgtcaaatttatggaaaatttgaaaaaaaaaattttttttttttttgaaatttacactaaaattttgttaatacaatttttaaggtctgcattttttaacaatatttactgaaacataagccccggggggctcatattttcaatacacctgaaagggatcgcttatattaacagggcatgaggggtggggggggggttctaattaaatgggttttttcaataattacgataattatgttgtatgattatttttttcttctgattaccatgttatgaatttttttcaaaatttttttttactaaattccaatgctcaaatatgtaaaaaatacaaaattttattattaaaatgagtccttgactagtcaaattaattattattattattttttattctaattatttttgtttttgctttcattttaaattgtctattttcaaatttgtaagaaaaaaatactgaaatttgaaattctttaatgaatttttggtcaattaattcattttaatttccttgtaatcttttttaattgtcttttagccctgtcgtgccaatgaaacagaaaattgtgttgaactgttgtatccaccaatcccaattgcatccaaagtggatgcgatcacggatttggccaaatttgaggaggtggagccgggcacggagaatgtccagaacatcctgagccatgtatgaattaattaaactcaaataataaagaaataaattattcgccttttcaaatccaattattaaatattttaaatgattttagggattaaagttactatttttaaagaattttttttcaaaaaattagatgtattttgtctaaattaaataatttttattttttaaaataatttattattttttgttacattttttctcatttgtttaacagagcccatctgaactgttgccaacaaaaattggacaagctgcacttgttcgcactgacgaccgttccaaggtggacaaacggacgccaattttcaaaaaaaaaacgattttttaaaggagtttcgtgtcacaattttggtgcccgaaaatggcatttattatttgttggtggactaccatggatgggagcgcagtgcaatgccggtccgtgtacgtgtccaacaaagtgatcacactgctgaaggcgttttgctggtgcgaaaataatgatttcctcaccactaacttgtattatttcctgtcattgtcgtatagtctgtggatgccagccttgtacctattggattggcatattttatttgggtacaaagacacatcttccggcggggggggggggggaggaggagggagggggtggcacaataaaacagcgaaaagacacagaaaatttaattgcgcctcgagggacaaatccgagagtgaaaatggcaatggtattattggggggggggggggagaaactccctccggggatgaatttggaactgaaacggacaaaaggtgaaaaagggacggattgagcagcagaaaggcaatcgaagcctgaccaagtcaaatcggaaaataaaagtagaaacaaagtccaaataaaaagaaggaggaaagacattgatgaaaggatttgataaagacaaattctaatttaattaagagatttaattattattataatttaattaattgatttgaccaatgaatagcaaagacaaagggaaaattatgaagtgttaattgctccggatgaggccatgcccactccttccaactgtgaatctcgttgtcttccgccttgtccgtgccatgccactcactttgtcctctttggcctatcctcgagagtcgagagcggttgcctttgcgcgggtgcttttgttcttggggcggttgtctgctcccgccccattccctccttttctctttctctctttctttctttatctctctctctctctttctttctttgtctctctctctctctctttcttctctctttctttctctccccctctctctcgccttcttattccttccttgtttttctcttctgccacttccttccgctgttcatcataatctttctttcttttccatacactttttctttttttcttttcttcctcactctttctcttaccgtatctttgatgggcggagtaatttccatgccgtggcaatggcaaccattggctttgcgttaagaaaaaaacaagctttatcggacgaaaaagaccatgctttttgcatattatttagttaaaaataattaattaaatgccaaaataaataatatgaatttaaaatttattattttattgatttaaaaatatgttcattgtttttaaaaaaatgcgatttttataataaaaaaatttggccgacggcctttttaacatttatttaattaggaaattatttaatttcaatgattatttaattcaatgttttaaaatttaaataataaaattttatataaaaaaatacattgaatttttcaccaaaccgaacaaaacaaagcgataatattaaaaattttaatgaaagaaaaaattaaataaaatgaatatatttttcgcatcgcaataatatttaaatttataattctgctgctggtctctctctgcccggctaatccgatttgatcccttcctttccccccccccccccttatttctttctccgccctttctcggctttttgggtgtcatttatttccgctgatgcgcggctcaatttccatgagcagaagcaaaaagaagcaggcagcagagcacggcatcggcaacagcaggtgtaacaccggtgggggggggggtcaaaaggcaaaggcaaaaaaaggggggaaagagggagagggggggggggaatcggaaacgaaagggcaaacggaaaaaggaccttgggttgaaaacactcttgaaatttaaattatttcaatgaaaagtattttacttgactcttcaacgagcaattcatttcgtttttttccattttgtgtcataatttttatttgatttttcattttccttcgtttattttattttcgcctttcctcgcgacgtttcggtcaatcacttttttgcccaattttacattttccttctcaatttcacttcgaatggccttcaaatcggcgcgtgcgcgaaaattgaatttgttgcccgaagctggcgaattttgagtgtaaaccgcggaagaggcgccgctttttgccgcgtcagaacggggcgggcacgggcaataattgccatcgggcgacggctttccaggagagccgctctaaagaaagacaggtcagttacgcatgaatccagctctatgacaaaattaactgtcacatttcaaattatttattttcttttcacttacattccccggtttgcctggcgtcccatcgtcgcctcggagtcttcaaaattgaaaatcacatttaattcgccgtttttgcagtttgattttcaccaacccaacttgtccgggtggaccggactctccgtcttggcccggttcgccgttcgttcccggctgtccggcatctccgggcgaccccggaggaccagacggtccttttacgcctttagtaccaatactaaatgtaaaaatgggttatcaatccatcttatgtttagttcaactcccctggcccagctgtgcaaatctgtgcccggggggcctggcggtccgattggccccgcggggccggctgggccataatcgccgggaggccccttcggccccggctttccatccgcccccggtcgcccatttttccctcgtcttccgatcggtccgggaacgccttaagca

SEQ ID NO: 4174 - DNA, 2448 bp, Heterodera glycines
ggcccggctttccaggtgggcctggcactgaacagatttatgaattgcaatatttctgggcaagcattttcttggccacctccgggctcgccctcttcgcccggaacccccgggggtccggacggacaattctgaacactcggggcacattctgtcaaagtttaacaaatctcgtaagaactatttatccctttaacaattattccttacgacatttttgcgcgggaaatgaaagcgaagggaaataggcgcttcttttggcgactctttcgccgccttcgctttgcgcgtcgctgaagaacaaaaaatgccaagagcgatcagtcaaatcctttatttagcaattattccttttgtttttgtaccattctcttttactttgaattcttccgcccccaatttcaattcttcgtccatttgacaaatttcggagtataaaaatagcgaaacggtcaatgcaacaaagagagtgacagaacagaagaaaccaacaaaaataattggaacatttttgcgtcgtattgttgcgataagttgatgaattttgacttcctcgtccgaaaggccgaattttggggccacggaagcggacatttgaaaagagagaagaaaaataaggacagtgtgaaaaatgaacgacggactgatcggaaaaagataaacagggcagtggaaggggattaatggaatttgggagtaattattcctttttgcggtccgccgcctcttaatggacgggaaattagcattggccaaggcgcaaaaccggtcgatgaacctattgcgcgatgcttataaatggattgctgctcattgtgtggttttggcgatatgctctcctccaccgatcggtgatcgccttccttaccggttcccagaaagcggcttctttcctttacaattagctgactaacttttaatgggaaactcatcttttaatttcatcaatttcagatgaaattagcatatttatcatttttctcatttaatgttctttaatcacaatttaattcagattttgcacaattgaaacataatatttaaaaaagcaaaagaatgaattattaaagaaaaataacgaaatacacatattgactatgggaatgatcaaagattgttgagtttataaataagaaataaaataaaatattaatgaacagtaaattgccaaaatttgccacgggactgagctgtcccgtccccttccacccgtccattttttggccatttcaacgccattcgtcgccgcatttggcgttgtccctttgagggtccgggtgggcaattcgtggcctatgatttgatcgtgggggagaagaacggaggcggtgaccggacgatgtccgataacggaacccggagaatgtggggaagagaggcgcgaaaagtcaccgagcgcagtccgagtgccgttccttgcggcgggagagaagagtccgcggggggcattggaaatggcatttttgccaggcccatcttaaaagcaaatgaagcattagaggtggaagatggtttttgttttatgttggcatttcgtttgaatactttcaccggcgtttggtcgtccttctccgacgaattcctccgaatttggcatttttggagtgacccgcttcagctcttcaatccattctgctttcccactcgaaagttgccgtgtcaaattggcattttgcaaaagcaataatttgccattgctctccaaaatttctccactcaaaggaacgccttatcaaattaagcaatcattattgaaatatttatttttgcaaattcaccacctcctccgaccatgcaagttttgccagcccatccgggcggacacgcgcagaaaaacaacgattgcgcccgcgtggtgcggcaagtgccaccatttttgcacggattgtcctcacatggcccttcattcaacaattgtttatttccagaggaatattgcaaaaaattttctgtaaaaaatcgctgactgaattcgcagtgccgccccgcgaatccgcgagcgcaaaagcaatcgaattcggtgcgctgagtgcccgcaatggctgagcaagtggcgccattttggcacggatttggggagcacgggtcgaaatatgaaaggaaaaggcatttaaaattaaattttttgatttattttgataattggcacatttattcattaattttatattccatttgcatttttctcttctaattttggcatttttccgattatttctgaccaattctctctgtgcaaaagtcgttggtaaatggtgctgcgcatttgcaaattgacttctcggttaattcgtcgtacacacaaacgccgccgtttcggcacggattccttcgggcacaaacatttttaggcgcgactgaaggagacggcggtgagaagggaacggaagcggacggccgagttggggatgaagcggcggcggtggaaagtgcgttctttctgagcgg

SEQ ID NO: 4175 - DNA, 841 bp, Heterodera glycines
  unsure (1)..(841): unsure at all n locations
tgaaattgaactatcgatttaatttactaatattttttgttttttaaaaagtttggaggtattcggccggtctccgtccctctaattgccgtgttaattaattattaattaattaattaatcacttcaattgtttctcttcctttgcaatgtgtttgattttatttgctcatttctttcttccttttgctccgtcattcttctttcattcatttcgaattattatttattttttgttgtgctaatgaaacaattccttctcctttcccttcttttgtgctgtctgttttttgctgttttctctctttcttttagtaatttatttatttaattgattaattaattagttaattattaattataattaatttttagattttttactaatttttattttttcagatgatcaagtcgaacttccgaccttttgcagtgggccaaacaaagaaaacgcgcgggtgctcagctgttgcgaggcggtgaaggcattcgaaggttcggaaatgtccgagtcgggcggagcggcgccgcccgaattgaaagagtgcgttcagtgcggcacggaattgtgtccgcgcgagtgaaaagagcacgaaaattgggcaaaagcggaaaaagcggacggataagaaagcaatttgttaataaatacactttcatttgtggaaaatttgctcatttntgaaacaactgaaatgaattgtgaatgaatttattaggcaaataaaataattttcgtaaattttgtccacaaaaaatatttaatttaattacctttcaatacaaaaagaaattaaattaattatttttttctcgttgttcttcactccaaatatttgctc

SEQ ID NO: 4176 - DNA, 2185 bp, Heterodera glycines
agccatgtggagacggacaaatggcatattagtgaaaactgtggttaaatggcataagttaaggctctattacagtttacacggccataaaataatttggcaattttaatgaaccatattaatattcgagacattatttgatagcccaaagagtcttctctattagtcatacaatggaacattcccaactgatgagtgtccaaatcactttaaaaccacttatcgtgtagagcatagtcgatttgctactgtaaattttcggcttttttttttttgctcttacccccaattcatcagaaaaattgatcaaatgttttttagttatttattttgttatatgatagaaaatttgaacgatttttgctgatcagttttggcgatcagggccaaaaaagccgataatttacaataaccaatcacctctatacttatggttaacatttttaaaattcaattttttgaggttttctgaccataacttttttgaacataacggaattctttgcaattttgcaggctaatggaggaatataagagctaccaaatcatattcatccaacaaattttatagtcgtgtctctttttttatgctcgcaatagagccataactttatgttttttcaatcatcattgtgatcaatcaccttctgcatcaagaaatatttgaaatgaaatactttttggatttaaaaggcggaaatgggaaaagaatttgctttatccaaatccaatcgcttaatttaaattttggatttcaagcaaactaattggaccaatattcccgacaaaattattgcgcagtaaaaacatacttctacacatttacaatcaaaaagtaccgtaaagtgtgacggatgggtccagcagtaagtacggtaaatgtcgcgcagcagagacagtgacgcggtgcgacggcggcgaccgctgcggcgatggcggcggtagtggcgccgtttgctgccaccgtcgtcacttcggcacatttgtcgccgttctgtctctattttttcgctaaaattaattattttaaaaattaaaaatgtataggccgccaaggttgaaaaggctccggataatccgtctgtagacaatccgtcagtgatgaacaatccgtcaacccttcagcaaattttgtatttaaaataattgaaaaataaatttaaattgaaaaaatcaaaaaataatttattttaattttacagaagtaaggaataagcattttaaaaaaattaaagataatttctataaaaagatgaattaaattaaattgttaattaaatagaaatgtgtaaaaagccattcaattttttttattaaatcacaatcgcaaaatttttgatcatttctcataaatgaaatttgctgacaaattatccactgaccaaattgtccacttacgaattgtccggaccccgttgaaaatagagacaaaagggcaacattttgaacgtaggaacagaaacttacaccaccactccgtgcttccgtacgcttcccgccatcggcggtcgcgtcactccgtcgccgtttcctctacgaattgcgcacgcgcgtcgcatcaaagagcgcgcacaaaggcgctgaaacggcggcgcggcgggcggcaaacgcgcggacggaccaccggcaaaatgagaaaggaataattgttggttccgatcactttgatcagcgattttcatccacattaaatgcttttcataaccatggtaattaggcacatattataaatttgctaattataggccgtgaagaaattcatcggtcggctaatttctaattagtccgacctccgccggtgacaatgcgaaatgagctggtgattcgtgcggaaagcatccgctttagtcgcgtccgtgccgtgacctaaggcaaagatttacaagaaattgctttgccaaacaatcgattgatttgttaattgcttattgattgtttcgtctaattgtttttatagattgccatgtccgcgttgtacgccatgcactcgagcaccagcagattgatgcaggcggagaagatggccaacccgaacagaatgaagaacagcgtgaacagcttgaaattggcggaataaattgattctcgtaattattttcttattcatttgttttcaggggcgtagccagcgagggtggctgagggggctaaagcccccctcctccttgccgaagtccgaattcgt

SEQ ID NO: 4177 - DNA, 3406 bp, Heterodera glycines
  unsure (1)..(3406): unsure at all n locations
atttgtttgacgagttgccagagacttgggattggcgcaatgtcaacggaatcaactacgcgtccactgatcgcaaccagcacatcccacaatgtgagaaaagagttggaaaccgaagaaaataggggaaaaaagactaaattaagaaaaaaatattcagataaatttaatctttttgcctttttgttcaaaaatgtcaggaatttttgggttcaagttttcattcaaaaggattggcgtgccgatgccgacgctgtcaaaaggcgctaccgggataaatttttgaaatttttggctcttttattaatagagatttcacatcaaaaattgccaattaaaccaggggcgtaggtctaaacaaatgcgtccgtttcttgccaagattgtggctcatgctgggcaatgggtgccacttcttcgctggctgatcggatcaacatcaagcgcaaaaacgcgtggcctcccgcctatttgtcggtgcaggaagtgatcgactgcagcgaggccggctcatgcgaaggcggcacgccggacaaagtgttcgagtacgcgcacaaaaatggcattccgcacgaaacgtgcaacaattaccaggcgcgagacggaagtgaggggncggggggggggggggggggaaattggcattttgtaaaaaggaaataaggaaatttaattaaaattttattttacttaaaacatttagcattttgagaaaaatgtgggcataaacgaaatcatttgaatatttgttagtgatttataacttaattagatttaaaattaatgtgtaaaatagttatttatcttggttaaatatttttggaatttatcaaatgatttttggaattattttatttccgaaataggtctatttcatttttggtcttcggcatcatccaattttgacttgccgagagacccaatccgttcaaattcaagctgatcattggctttataatttgcattatgcaacagaatgtgacccgtacaaccgttgtggttcgtgttggcccgacaaatgtttcaccgtccaaaattacactttgtacaaagtcggcgacttcggctcggccaatggaatccaaaagatgaagtaaagcaagcatacataaattaaaataatttttaaacatatttttagggccgaaatttaccaccacgggcccatcgcttgtggggtggcggcaacgccgcggtttgacaattattcgggcggaatttacaaagagcgaacgaatgaggtgatcagaggagagactgatcactggccagaataactaattttaaattttaggatattaaccacgtcatcagtgtgagtttattaaaaatttattagagtctttcaatggcggtatttttggccaacggctcaatttttgttttttataattatttatttaattctaaataaataatgaaaggttgtcggatggggcaaagatgcggcttcgggtgtgccgtactggatcggccgcaacagttggggcaccgcgtggggagaacagggtaattaattcgttaatatgactaatttgcataattgaaccctggacaataatttaaagctaagatcattttttcattttccagggtggtttcgtgtcgtgacgtcggagtaccgcgacgcgggaaacaaatacaatctgaaaattgaggaggattgcacctggggcgagccaattatcatctgaatgaggagcgaacaatccgagcactgttcaaacccgatgccaaaattttttccatttttgtccaagcatttttaagccaaaataattacggaatttgacaaattaggcaaatatcaatcgcctttctgctgttgccttatttaatccaatttttaaataattacaacgacaatttattttagtttatttcgctaaaatatttttttataatgtttatattattatcgttagaaaaatcagatcagtaaaaatttttagaaggatgggagacacaaaaagaaacggaaaatgaaagttgaaaaggaaagaacaaaacagaaaaaatcaaaaataatttaaaaataatattaaaaaaaagaattaagcaaatagtaaaacatcatctaaagaaagggtgccagcgtgtttcttaatccaccacccaacaaatataaataaccattttttcattgaattttaattaatatacttttgaaaagataaattaaaagcaaaacttttgttcgaaagaattcagatttttcataaagacaaaaacaaaaaaaaaagaaataaaaaatttattttactgggaaatagttgaaaataaagaaaagaaagaattctacataaattgaacaattatttataaatgacataaagaataattattcaccatataaaaaagcacaaattattatatttattaaaaaattaaagatgtacgaaaaagagtagggttaagccccgacccccgacccgagacgttatttggacctattccccgacccgacaacgaaattagccaaaattgtacgaaattgaagtttgtccccttccgtttagttgagaaataatttgttttatggggcagaataacggtgaaagaaaaaaggaaaatctttgcttggttattcttaaaaataaaattttttaaaattcacagcatcctaataaaagcttaatcgttacattaataagataattgaatttcctgggttttttacattgtcacattactttttttccaaaatcctaaattttataatttattttactaattaattgtcattttgctttttacaatatttaaagccaatatttgctgttaatcatcccaaccgttctgtttcctaaaccctttaattcacaaatgtcacattaacaatccctccatttaaaatggattacgcatttatcggttggcaatctttgaaataaacaaaatgttaaaacattcatgaaatttgctataaaaatgagcaatgtgtcacaatgaaagagcaaaatttaacattcaataaaagataaattaaataaattttattataaaataattttcaaattaatttttcccctttttacccaatgaaaattaatacaataaagtaattgggttgtccgtttggttttcggggcgactgtaataatttcgggagggtttcgggattcgcatattcgaaagtaaggaaattttaaatttgaatttagatgctatttttgacgattcttctatttctttttttcttctccaatgctgaacaattaacgtttgttggcggacattcattcaatggtttgtttctcaaatgaatcgtttaatttatttttagaaatgggtgaatttcgtgtgaaatttcgtcaattggaggcggacattgaggaactgaaaggcaaaaatgttagcgcattaaatcaaaaataaataaattagatataattatattaccata

SEQ ID NO: 4178 - DNA, 4070 bp, Heterodera glycines
tgaaattgtttactacgaagtgaaaatcttttcagcggagcaaaaggattttgatgggttttatttctttttaattgcaattccttttgagaattttccaattttattacttcaaaacaaaatttaagaacccaaaatgactcaattggcattggctttgcacccaagtcgatgccattaggcaccaaggttggcacgcaccccggcacttttgcctacttcaacgatggcaatgtacgtggccacagaattgtaggcagcaccaagcaaaacttggccaaattcgatgccggtgacgtcatcggatgtggactgaatttgaccagcaaagagatcattctgacgaagaatggcgaacgattggggaaaaaggagcagacgtaccaccgcttcatttcctctcattacggcagcgaattgtttggtgggaaaataaataaattaattaaaaatcgaaaaataaaatactaattatcccccccctcatcccttctcacaatcagataccaatttcttcttcgcatcaaaagacgccgacgatttatatccggcaatttccttgaacaaccccggagacgaagtggaggccaattttggaccgaacttcaaatacacacttaattaaatgacatatccctttttccgatttatttatttgtacttgaaaaattatttgttaaacagtggcgaagatttaatggtatttaaaatgttctcattttgaagaaactgaattttaagtattttaattaaaccaaaaggcacgataatggcaaaaaacgtgcaaaaaatgagtaccaattttataaatatggtcatcgtttttagtgcaaattctgctgtaatgactttcaaaagtgtcaattcctagaaacacatacgagatgacagctcccaaaagacacagtaattcttatgaaaggtccaacctacagtagtaggtaattactatcgaataattgatccatatttttgggggtgtatcgcagattgggttcagtcactgtgaaggaatgagtgatctctgctcaattatttactttgctgatcaacaccaaagttccccttgatctttgcagttatgtggtcgcttcccactatttatttggtcatgtctatgcaaaaaacatagccgccggcgctgcgattgattatgtgagttattaacgtctcaaagaaaaaggagatcaacaacggcggatgaccaattcattcattctctagcgaaaacaattctgcgaaaaggccctccctcataagtctaagaattcagtaacaattttataaacaaattagaattttttgttaaaatggtttttttataaaaatgcagtaatttatttattagcatattagtattttcgaattcaaagttaaaatttttgaaatgcccttttgttaattttggtgattatttcgtccgatctgcttattaatcccgaagtatcatactcgtaattttccgcattttataattttgaagcaaatttaccaacttttcttttctctgaattcaataatgggcagcagcagcagcagtagtagcagtagtagttcaaactataccagcagtagcagcagcagcagccgcaccaccatcaaaatcaactttatggacttttcatcgaatgacaacggcagcagttctggctttatcgaggagggttactgttcatgtccttggtcgcatcttcgttccatcagcattactctggtaagtagcagtttacttaatacggtttttcgaggttctgaccatcacttcctttcctaattgcctgtatttcatatgttaatctgtttttataataagtcgtgatattccatgtttcagttagagtatcattttgctggcagtgacaacagcagaagcccaattgaaacagcaattggcattggctcttctttgcttagttccattgttccccttatcgatgatgaggacaaagaattgaaaacaattggaaaacttttgggaattccttcagtaatttgtggtaaagtttcgaaaggtaaaaagcccgtgtaaaaactgtatgaaaaaataaatttctctttttgaacagtgtctgaaggttcgacttgttgggccgtggtggtggagtacaaatgcgacgggtgtggccgagttgtgcacgtcacttatggcatcacccctcaaggaaagtttaagcgttttggacggatgaccaacacagaaaattcgaccgtctggatggtgagcagcgcttatccggacatagagcgtgtttatgacgacatgcattcgaactacaatttcggcaccaccagggcttgggcggaggaaatgattcgccgtgttcttaatcagtgacgggggaataattgtcgaatttcgaagcatcccagctcattatgatcatgttaaagtggtcattgtcattctgatatattatcgaatttatgcttttgttcttttttataaagaatgttcgttttctgagaatgcattcaaattataaaatatttttgctgaaacattaaactaacattaaaatttatggtatttttcttttaaatcattgctgatagttgttcattatgttgaattaaatctttctataatgcaaaattattaaacttttaaatgaaaattgggcaattttatatgacagctatttaaattaatccattaatcacagtacttaagtataaactaattagaattgaatcaaattatttataaatatattttgaaatatcattaatatattttttacgaaataagaagataataccaataatttaattaatttataaataataagtttatttattatagtaatgactaaaaaacgaataaatttttacaacaaaaaacatttaaaatgggaaactgatttatttcaataaactcattaacggatttttagaaataaacattatctaatagtgtcagtttgttataattagggaacggattttaatcatgaatttgacaattttatacaaaattttaagcaaaaactgaacagctgcaaaaaatttcaaaaattttctcgaaaacatttgcaattaataaaattatattattttaaatttatttcatttatttgaagaaacccatgccttttgcattgattgccttgggaaatatacaaatgcggcacatgaaacgatgccattcgcacacagtgcgcttggtctgaaatgtatggcgaagaaatgtgaaaatccaattccatggcgtaaggatataatttaattaaatttaatttattgatttaatttcataaattaaagaagaaataaaaaattggctcccgaaagaactcaagtcaataggagctttggaaaattattgtgcagaattaagtgtggaaatggctggtcttagctatttggaacggtaattttgaattagatttattcaaatcattagtttattcacaaaaggaaaaaaatagttttacctaaattataaattttcgggattttgccttttctttaaacttaatattttaagcatttttatgagaccataagcaaaaaagttgtcagcaaaaaaagtgccaaaataggtgtaaatagtgctagaacttataaaatagttgaaaattgccggctaaaaagtgttcaaaagcaaaatcgaagaaaatgtgtattttttacttctctcgtcataaaaatacttcaatgcgctttctgttgttgttgttttttttgtgggtgcgatgcgatggtgcccaaatttgtctacggcttttttttttatttaaaacacttttttcacctttagatctgtggctcccaaaaatttttaacagtttttataatgcctttcatcttcccctttatatttcttattaataatagagtaggacttccaattttaatttttcccgggggaggctaaaaacgcaaaaaaaatgtttttagcagacaaagggaatcaatctaaaattacaaatatcattaagctgcccacattgcaattttattgttgaaatgggcctttctgcggatgaaaagcgcctctttcattgtcctcattgtgacaaggaaaggtgaagaaaatgcaatgtgccatggacagacgaccattacaa

SEQ ID NO: 4179 - DNA, 1683 bp, Heterodera glycines
tttttaggagaatggcacttttgttgggaaggcaaaattcattcaaaaaaaatatgagaaaattttttatagaaatttcaagaaagaaaaaaattgaaaaattttctagcgattttttaaaatttgtgatgaattaatactctatttatttcaaaaaaaatttccaaaaaattactgaaaaaattgacaaaaaattttttcttaaaattttctcatcagacggctgaagcgactcgagagtcaagatcgattcaccaaaaaaatgaagaaatttctcaacttaagactcccgtaactttaattgatttgatttaaaaaatgaatttttaaaataataaaaaactaaatacaaaatgggaattttaaaataaaattttacttttgatatattcgattataaaattggatattttggccccggaaattcgggaattcgaattcaagactctctcggcacattgtgcacgtgccaccaaaaaacttgcctgatacacataacagaacaacacggccgcaaatgcgtacagacaaaacagttcgatgcccggcaattcggtgacgcagccgatcagaaatgccaaaatgtcggtgatgttggtgatcgacaccgccacaccgccgttttgcatcatttgtgccatgcgctgatcaggcgaaagtgccggatcggactggtcccagcacgagttcatcacgaacatgtcgtcaatgccgacagcgatgatctgatcagcaggaaaaggagattttgtccgattacatcatagcagatataaattttagaacatttatttatttttaatctagaaaattttttctaaaaaaattttgtgaaaaaataagaaattataattaaaagaattaaaaaaagaataaatttattattattttttaagtttatgtaaaaaatattttaaattaaaatttacgaaaattatttatttttttaaattttagttttttttatgaaaaatggcttaaaaattccattttaagttggcaagattaaaatgtttttcataattattattattattatgttggtttgatctggcctaattgcatgttttctcgaaattttttggccaaaaaaaggctttttatttcggttttattgccgagtccattctcatgaaatgattggtctatgtaccaagaaagggatgattgtgttgatcacattgtacggaatgccgagcaacaacaagaagccaaaagaagagatcagtgccaaaatggtgttgaacaaacctaaataataattgatcaatttattttttgagtgatcagcgagcgatcatttattgattagttggtttatttaaagcggtaaagcatcgatcagggatgcgatggtcaaaaactcggtgcatgagttcaaaaacagctgggaaaaaatcggtaaaaattttcaaaaacacggcaaaaaaccggcacaaaattttttggccatttttccactaaaaaaaattaacggatatggcatatttatttctgtacaaacactgtgaaacacaccggcacatgcgacgtatggctttgagcgaatccaatcgatggcaaatgcgtgccgtgacgatgtgccatcagtggcgggcaaaaaagtgaatgagcaacagatgcagaacagtgccaaaaaggtgaagctgatcacaaagttaggcacaaacggcgcgcattttc

SEQ ID NO: 4180 - DNA, 4538 bp, Heterodera glycines
gattcatgactcttagattgtacgccaaaaagccactgacctgcaatgattggtagtgagcaaatgagatggagatcagtggagactcgaaggcatgcaaaagaaagcgttccacggcatattcaaagtcttggtgaaaaaacggcaaattttcggatttttaaaaattaaggtttttgggcccagcagagggctgtgcaaattgaaccaggaaatttttaaatttcataaaaaatcacgctaattaagcaagacgcattaaaattccaaaattacgagaaattttgtcgagcaaaatcaagttttttgacgagtaaaacaatttttacaaaaacaaaaattttttggcatttttttttgtccagtttttacatattttagcatttttaatgcataataatcctcaccctgaataatgaggctccttaataatctctggcacccttctgtcctttatacggtgtttgaaaaaaacatatttagagggaatttttggaataaacattttaattaaaaattaaaaatattggaatttacaaaaaaaaaaaaaaagaggaatgaatcacccgtggagtactgtcgtacgacgggtgggtcctgtttcaggaagtagaacagctgtgtgacttttgcttccatcaccgtgccgtccgtgccgttcaatgcgatgtcgccaagggcagtgcccaaatatgccggcgtgtcctttaaacatcatttaatatttattttatttttttaaaattaataatggcaagagtggcatttttcttcaaaatttggctctttggacataatctgctaacaaatcacattaaaattttaaaaaattttcccatggcgccttcggcaccgctggaccccctccctgttcccccaaaattttttttttttttgaaaaagctttgaaaaacaaaaaaaaaagtcgccgatttacatggcgccgaacacatcccccttttttcatatattgtccttccccaatatttatttgtccttgaaaaccccgatcggtccttgttgtgttcatttgaccgccttgttttcgccctttggatagcgccggtaaaatttcgaaaattttttaatccatttacaatctatttatgtttagaggtttgggtaagtcctgaaaaaaacttaattgaaaaaattcaaaaggaagttttttttacaattttgaccttttataaaacatattcaatgctacagtactttattttagaaatactgtattattgatgcattgtccctgtgtccttttgtccaccttcatctatatactagtaattacggattgtgttcagaaaattacgcgtcctttcccaatgtttgtccttgaaaaccccctgatcggtccttgagtcgttgtgttcatttgtccaccttgtttccgcccttggggtagcgcaagtcgatcactcgtcccacttgggtcatttgtcggaacatttcaatgtgttcattgttgccacacacccaatcatagctcaggcacaaatcttggtagctcaaattgaagcgccggtccacggttggcaccgtcacattctccgcaatgaatttgttgagcagcgaaatttcgtccaaaatttggggcctcaaaatgttgccgcctcaaaatgggagaaggaaggagccaatggcatttttttgaatttcgcaaaagcaaagagtgagtgattttgatcagtctaatggaaagaaatggcctgatcatttcggaaattttttagaatttcaaaaattaaatttaaaaaaaaaataattaatttcttcgtttgatgtgttgttttttatcaaaaaaaaaattttttttggaatttttttaaaggaaaagcttggaaaattttaaggaatttattttcgattttttaatttgcaaataacatgacaataaaatttggtgtgtttcagacaattttctgcaaaaaaatatttaggaattaatttttgcaaaaaaaaaatggaaaagcaaataaaatttggtgcgattttattaattatagaaagagctaagttcgataaaacttttaaaaattttaggattttttaaattttattagttttttaaaggaaaaactgaaaaatttctaacgaatttttttcgaatttttaatttgaaaatttaaaaatttaaattttatacgaaaaattctaaaattttggtcagtttttaattaattcctggttgaacttttaaacaaaaacttttaaatatctttaatttgatcattccgatcaaatttttgaaatgcttagcttgatcaataaatttaatcaaatttgaatccttaaaaaattaagaacagatctgatcattacggatgaaagtttggcattttgaaaaagtccttattatgtgtcacttgaaatttggttgaaccgtccttggattttctataaaaattaattcgtatggcgtccttgggaatagagcccccaaaaccatgaaattctgtccttatcgttaagtgtccttggaaattgccttcttcttaaaacaatgactcaccgtccttggctttgcacaaaacattcacaaaacgcttcatctcaaatgactttccggggatgaatttgttctcctccagcggccaaagctttgagaaagtgcccaattcctttttccatctgaacaaagtgccaaggttttaaatttgaatgccaaaattcaaaatgatatgaaaatcacctggcatcccgaggagtgaaaacataggctgaaaaaatggtaagaaaattatattgcggatcaaagagttaattgggacaaattattaattaagtaattaaaaaaaaatgttagaataaaaaattatgaatctattggctgcaccttgccactaattttaaattaggtgtgattttatttcaaattctgtaaatgatcaaatctgatgcaatcagatttgatcaacaattgcctgatctgatcactgacttggtgagcataaaaatcgttgcttcgaactagagaccggacatgttcgggatcccgcgggaatttctcggaatcccgacactcgggatccatcccgaaacttttttaaattcatcgggattgatcagtatcggggtatttattaaatttgggttttgatgtacaagctaaacggttacatcagacgaaaatttataattttttggtcagcctgatcaatcacgctaatcagcagccaaaattatcagcagaacataaagggcaattacatagacttacccgggtcgtccatttccaattcactgaaccaaagaaagccgatagataaacagagcgaaatcagtggaggggccttgcaaaaatgtgggaaaattcgggcacaatttaggacgattaattaattaatagggcttccttttttaggcaaatgcctaaaatttttgcatacttgatacgcatagataagcacaaaagacgcgttttccgcttggtttggggtgtctacgatgacttttataatgcctatttttgcctatttcgggggtttttgtgcctattgtgcctattttaggattttcgaaaaaatccttaacaaaaatgcaataaaaacgaaaaatacacccctaagaaatgacccaaaaaatttttccagaaaatacaccccataagaattgaaaaaattttcaaaaaattgatcccaaaatttaatattttttcttaataaaaattttttggtttaaaaatttgttcatattcgaaaaaaacataaaaatatttaataatttcaattgaaatatttaagatttaaagtgttttgttacctaaaaagcgttaataaaaaattttatatgcctatttgaggatttttgtgcctattttgcgatttttttatgcctttttaggtgcctatttcgcgattttttgtgcctaaaaaaggaagccctattaattaagtgtaattaattattaccaaaagcattggccatcgaaatttgtgcacaaattggccatagcgatggaagaagcggcggagaaaaggctccagagaaaagtggagcatctgctaaacgaaaaaaaaaagtttaaaagatgaaagaaaggaggaaaacaagagagagagaaagcaaaaagaaagaaaaacggaagaaaaaagaaatttgaaaacggaaaatgaagggaagagaaagaggatgagaagttaaacgggtgaaatatggtgggagaaaaagaggaaaagaaaaaaaggaacaaaacccggggtccgggctgggaccaaaaaagtcggggattagggcaagaattattgaaatcagaaatcagtagattagggatttgagatttactagatatataaatcgggtaggcagggatttggggttgggacgaaaaaagtcgagctagagattactctgacgttagagatcagtagatcgggatttgagatttactggatggataaattggttcgggattcggagttcgaggttggcactaaaagtcgggtattcggccaagaaattactgaggtcaaagatcaatagatttgggattcgagagggagtcgagatttattggataacacaaatcgggtcgg

SEQ ID NO: 4181 - DNA, 1230 bp, Heterodera glycines
  unsure (1)..(1230): unsure at all n locations
ggggagaggagttaattgcttggattatagcagagatcggctttggattgtgacgaaggacacnnagagaaaggaggaagaaaaagtgatgccggagggcataaaaaattcaatgttttttcaggggcagcgaaagcgccgaagaaaaattgttgtgatcaaatcaatttgaacaggtcaatcaatcaatggatcaaaagggaagtgatcagaagcagcggagtttgttttcgaattgaaaaatggaacgaacgaccaatttttaatgatggagaaattaaaaaaattaaataaaaaacagggaattttttttggagggtgaaaaacgaaaaattattaaaaataaaaaatgccgttcctggtccttaattgtgataaatgaatggatcactctgatcagcgcaatttgtgagaaaaggaagtgaaggaacacattaagccggaggtgatttcgaatgttcgcacttgagttgccgatcatttgacactaaacatgccttagggcattgatcggaagaaagcaaacggacgcaattgacgcagcacatttgattaacggatcagcaatttttacaatgaaacaggaagtaacttttttttgtagcgagtttgttttgattatttggtgaaggaaaggcttcccgatcaaataatttaatcgatatgtaatttagataatcaattaaaaattaaaattagattttctttggatgttttttgatgaattgatcagtttttgtaacagtgcaataagaatgaaagatcaagtttcacgagaaggaaatggctttggtaaatctcacgaatcagatcactggagaaggaggggcttcgaacaaatagcataagtaaattatgaattttggcgccggagagcatgttttgatcaatgatcactgatcaatttcagtcaggaataatttttgaatcattgtaaagatcaaaaatctttcttcagagggaaatggctttgataaatctccgaagaaagaaacttcgatcaaatagcacaacacaaaatcagagagaattttggcgctgaagggcatgtcttgatcaatgatcactgatcaatttcagtcaggaagtaatttttgtgcaggtcagcttgatctgttgtgatcaaatatcggatctcgggagaatgaacacagaaagagagaagcacacaatgtgagtgatgctttcgattagcctacggggaggtgccctgcgggggagggggggggg

SEQ ID NO: 4182 - DNA, 1118 bp, Heterodera glycines
cccccccccccccccccagtaggccgtcagtcagtttggcattttgcctttttggggatttttttttttgattggaaaacaggtgtttaattttttagtttccctctcggcgtgtgggggattttgatttcaataggccgattaatccgcggatccgcccataattttgacaaaaatcatgggctttcattaaaaatctctactgtatacgattgggtgttactgtaacaatactacatatacagtgtaaaattaattgatagttcctataaaataatttaatttgaatatttccacccgctgtcgagaattattaatacttaaaattactaattagctgggctatcaatattttggtatttttttgaattatttatttttcgaattttaaaataaatggcaaaatattaatagcctagaaaattttggcgcattttgagcgtatcctgagaattatgtataattaatagccttaggcgggtgggagaaattaatcccaaaagtaagcccggtggataaatgaaaaagcaattagcggcatttaagccgactttcaaagcaaaagcggaaattgagcgcgcattccaagaatttggtaacaatttgttttgccgcacatcgattttcaattggtggtaatttgtgggagattatgcgggaaagagaagtgaaaagcgatttgatggggggggggatattcgggtggaagaggaggatgaagaagacggatttggcggattagaaatgttttccgacgaaggaatttgggaggcggaatcaaatgacatcaattagggtgtaattagaggtgctaagcacacattatggcattttttgttgttgttgctttttaccgcctctttttacactttattaacccggtcctatttcggtacctattttcggttttaaacatctacatgaaaatacctttgatcactgtttttcgctgacccacaaaatgtccagcccacgaaatgtccaagtctcgaatttgagttttttattattcagatgggcctaaggttaggcaaggggtaatataaagggtatattcgtattcagcgaccccgaaaaccctaaaaatcctaaattagactcattttgtttttataaat

SEQ ID NO: 4183 - DNA, 973 bp, Heterodera glycines
cgaaaacccctagaaacatgtttttatgattttttgaaagttgaaaaaaaattttaaaaaagggggggtaccatctaaactattaccgaaagcacaaagtctgaataatgtaataatacgagaaaacaagataattctaacatttcaagaaagttacaaacgaaaataatcagcaattacttaattaatcgaatcttttttggtaattgactgaacgctggaattttatatattttagcttcgttagactgtgtgctttcgaatgataccaaaaagatagggtttgttcgaacatggaaaaagttattgtataaaaacccgggattgtcaattgattggactcataaaggtcgattggactcataaagtgcattagagcccaattttcagctccaaaataacaaaattaaattagagacatcattctataaccaacattgctcaaaaatattctataaaaagtgaccatcaattcacaccttaaaaccttcactaacaaaaaatgacactttggccatctcagccgaagtaatcaaataaatcttcgtccaaaatgaacctgtagttcagctctttgatcccatgtgcgtaatggcattgttttccgcgcgtgcaaatgccctccatcaaccaaatgttgcacagtgtgctcttatacttggccggcacttgtccgtcagcacctgccaccccttggggttggaattggctgtagtaagcctggagaagttgctgttgttgctgctgttggtaggcattcattgaagattaaaaaaattgacaattatgaaaagaaaactgaaagaaaagacacaaattaatcaggaaggaatgacaggaaattaaaaaaaggagaaatgatcatctttcatctcttttaggggttatatgagatgaggggggggggggggggggtctgggggttcgatccccgcttgacctgcagtcttatctttttatgaataattgatga

SEQ ID NO: 4184 - DNA, 1807 bp, Heterodera glycines
  unsure (1)..(1807): unsure at all n locations
caggaaaaattaatntaagataagaaaatatttggtaaatcaacaaatttcttgtttaggtgctgaaacgcaacaaactgaaagactttgtcgtgcattcgcaatttttgggcgtctctcatctgatcatcctctcgagaacagaactttccacgcatttgcgcattattcgaaacccgcaaggcccaactttgcacttcagaggtaacagtgaagaagagcccatcagagggggagggggagagaaagaagtgcacactgaaatggggaattataaatttcagggaccgttggtcataaatccgtatctgtttcaagatttggttttaagcgcaggtgaaaaattacacctatcgaattcccatttcgagcacgtgaattcatttttacaacaaatgtaattttaaaattgatgcctaattcgtgagttgaattcctggaaacctaccaattgatattttatacatactgagaatttgtttttatgacaagagataatttctgaattttaaatagttgaaaaatattcgttggcacgcgacgtgctctccgtgcagaagagaccggtcatctacgaagaactgttccaacacgcgcctttggtggtgatgaatgggttttccagtgaagacggcagcaaaaaacatttacaattggtgcagacggtggtgcagaatatgttcccttccatcgacgtggacagagttaaagaaaagtgtgaaaattggcttactttttgagtttaggtgaaactcgcgtccattcgtcgcactttgctattaaactacgacacagaggacggactgatggagttcagacaatagtaagtcttctctaagttgtgaccttttgcaatgtttctctttagctccataaagtcagtgcccgcgggcgtttctcgttcggccaaaaaactgatgcagagcaaagtgccagacctgtccaagtacaaagacatcagtgacttcatgctcaagtgcgtcatcctcgagattatttgaatcaaatgcaaaaagaaattactaatccaatacatcactttctatctattcagaccggagcagttgagtgacagcgaatttgaaggcgaacagacggaattggagctcacgcaggatattggcggacggggcaaaaaacgaggacagcaaaccaaattgagtaagtgatttctcgcaattacaaaaataaggaattcatcccatagggttgatggaaattggaccacggatgacattacgtttgatgaaaattgaggaaggcgtcaacgcgggcactgctctttggacacactcttcaacataacatcagattcatattccaaacacgtttattttgtttttatgcatgtgcgagaaccgtttgatcaaacattcgagaaaaactttttattattctaaaacagcgatgaaaagtatgcagtatttcaatcacaaatcgcccttccgtccacgaaaacgggctcgaggatcaatgttgtttcgtttgcactcggccagtgaatacatcaaatgaatgcaatgctgaggcaggtccaattcttcgtgacactccctggccttcttccgcttgatctgttcgaaaaactcagttagtgtatatctcaattaaaaagtagaaatagacctagtaacaagcaaacctataagcgcacaagggtacattccggactgtcactgctcagatcgctttaaaaccgcccttatcgtgtagagcatagtcgatttgctactgtcaattttcggcttttttggcacacagcgtcanggggatcagaaaaaagtgatcaaagtttcgaaaaatcgat

SEQ ID NO: 4185 - DNA, 2652 bp, Heterodera glycines
tgtattggtcttcttcgttgggcaactttccggtggtcacaaaatcgcttcttttgccgatgtatgtgcagagttccaattttggtccgcattccaaaatggtttccacaaaatttcgagcagctgccattgacgaaatggtgcccgagcgaaggacaaagattgaaaggaggccttgcattggagttttgacggtaagcgacccgatcgcattgcttccaaggactgggtccaactctgccaaaagcaatttttagcaaaattcatggctttccgatccagggcaataggttgaggtccagccgagttctgtaaaatgaatttctccaattttttaattaatttcggatcgtttcgaatcaggtacttgtttgtctctacttttgtatcgtaaatgaagccatgtctaattattatggaagaattggacatttggttggcttcaatccgccgtcaaaccgtaatgaagctgaagaaatgataattgaagaagatgcaaggcttttgcttgaacaaagtttggatgaaaatgggctgcttgttgatcaatactttgaagaaatgggtttgaatgaagtgcaagatgaaaactcgcatgatgttaattcagaggatggagaagtggatatcatgaattaattcatatgaatttttatatttttatttaacttttatatttgaagatgcttaaattttacattgttgttaaaatacatgaaaattgggtcagaatcatttagactgcaattcattagcgctgagtcttgttttattaagcggtagcgtgtaatacataaaaattttcattgaaaatggtttttaaacaaaaaaaacgaatcgggataataaaaacgaatcgggataataaaaacgaattgggtcaaaaacgaatcgttacaaaaacgaatccgcaaaaaacgaattgggtttttaccgatttgctactgtcaattttcggcttttttggctccggcgtcaggggatcagaaaaaagtgatcaaagtttcgaaaaatcgatgaaaatgacaagttttaaaaattctaaaatacctaaactttttttaaaaagaatcaggaaacaattctctatcaaatagcttcataaaacaaattttaataactgaagaataacacaattctgctgggtttttcatttgatcatttttgacaccggagccaaaaaagccggaaattgacaataggaaatcgactatgctctacacgataaaggcggttttaaagcgatctgagcagtgacagttccgaatgttcccttttcaggcttacaattagacagccttgtacgagttgtaatgacacctatcggttcacccgaagcttttaagcatttttaagtcaaaattttatagtttgttttatatgaagggaacgtgatctagtcgcaaaactaaattatccacctgtatgcaatcagattctttaatgcacttcttcaattgtagtcgtatccgatcacacgcaatcccagtccgcgtaatagtctcatcaaattgcgtctcctgttcgcctaattttctctcttgagtcggtgaattaccaaatgtcatactcaattctttaaattaaaaatgcatttgaattttcaacttgaaaaaaacaagtcatttgaccaaagaagagcaaaatattgaatttcgatgagttagagaattcgtttacccgcaacaaacatccaaagacacgttggaaaacatattaaaaacaatgttccatattaaatttggaagattttatttaataaaaattttcccattttaatcaaaacattgggttgtttcataattattattgtcgttttgtcttaattccaaaaaacaatgaattcaactcattgtaagacattatatggaaacgaaaatcaacaaaggcaccataagattttggtagatcggattctatccacataggtataatgtttaggaaaaacgacaacaattacacgaggcaacaaacaacctaaattgggcgatgttcaaatcgtttaatgaggtcagtcgatcggagaggaggtagaattgttttgattgtcatcatcatcagcagtggtatttttggtccacgagataacacgggaagaatccttaagcgaaatgaatagagcagaagtaaacaataatttacatacctgaagaacattctcatcattgcgatagttccgagaacaatcgccggccgagtcaagcccatggaagacgttttcagtttctcggttgaattcctatttttcaaaaataaagctattaatgtgtgtgtttacggttcaaaaataaaaggaaggatatatacaatctttgatattaaaaactacattgttacaagtagatatttttgaataacattatcccgaaacgaagattttaatttagcaggtggaaaggaatcaaaatgagaccagcgtattttttgtactaaatagatattatttaaaaaaaaattaatttaaaactgcacaagtatcatattaattactaacagccttgtcaaaaagcgccaagtttccagcaaaatcgaagtctgtctccatatttgggtccaatgggtcccccataaaaaactccccacagcgatcagtgtaactgcgatacccattcaaacagtcaacagctggcattccagttggacctttaacaa

SEQ ID NO: 4186 - DNA, 1398 bp, Heterodera glycines
  unsure (1)..(1398): unsure at all n locations
ctctatcaaatagcttcataaaacaaattctaataactgaataagaataacaaaattctgctgggtttttcatttgataatttttgacaccggagccaaaaaagccgaaaattgacagtagcaaatcgactatgctctacacgataaaggcggttttaaagcgatctgagcagtgacagttccgaatgttcccttttcaggcttacaattagacagccttgtacgagttgtaatgacacctatcggtttacccgaagcttttaagcatttttaagtcataaaattttatagtttgttttatatgaagggaacttgatctaatcgcaaaactaaatatccacctgtatgcaatcagattctttaatgcacttcttcaattgttgtcgtatccgatcacacgcaatcccagtccgcgtaatagtctcatcaaattgcgtctcctgttcgcctaattttctctcttgagtcggtgaattaccaaatgtcatactcaattctttaaattaaaaatgcatttgaattttcaacttgaaaaaaacaagtcatttgaccaaatgaagagcaaaatattgaatttcgatgagatagagaattcgtttacccgcaacaaacatccaaagaaccgctggaaaacgtattaaaaacaatgttccatattaaatttggaagattttatttaataaaaattttcccatttaagcaaaacataatgggttgtttcactattattattgtcgttttgtcttaattccaaaaaacaatgaattcaactcattgtaagacattatatggaaacgaaaatcaacaaaggcaccataagattttggtagatcggattctatccacataggtataatgtttaggaaaaacgacaacaattacacgaggcaacaacctaaattgggcgatgttcaaatcgtttaatgaggtcagtcgatcggagaggaggtagaattgttttgattgtcatcatcatcagcagtggtatttttggtccacgagataacacgggaagaatccttaagcgaaatgaatagagcagaagtaaacaataatttacatacctgaagaacattctcatcattgcgatagttccgagaacaatcgccggccgagtcaagcccatggaagacgttttcagtttctcggttgaattcctatttttcaaaaataaagctattaatgtgtgtgtttacggttcaaaaataaaaggaaggatatatacaatctttgatattaaaaactacattgttacaagtagatatttttgaataacattatcccgaaacgaagattttaatttagcaggtggaaaggaatgaaaatgagaccagcgntattttttgtactaaatagataaagataaaaaaaaattaattaaaactgcacaagtatcat

SEQ ID NO: 4187 - DNA, 1152 bp, Heterodera glycines
  unsure (1)..(1152): unsure at all n locations
gaaaatgaagtaaattcattaaaatccaaccatattcaccatgaatattccgacgatggttgacttgaagtcgcatgggaattgcctgctgttgctctctgaatagcttgaactcgccaaatgtttggtgattcagtggtgctcgggtaggtgtagcagaaattgaagacgtattaagcggagaaaggcttttggtgggctcggaccggacagaatcagctggtgaaggacgacgacgggatggaatagagccagtcgaatggcgaccactaatcggacggtcttcttgacaatgaaaacgtgcaggtgaagcgccgctaacaacagaaatagtaagacgcgaatgaacaaattgaaacttttaaccttacaaaagcggcttgtccaggacagcttatcttaaaaacttcacaaaattgctgttgcacggcctggttttgatgggtcaacccgtaacgctttttgcggaattctcaaaataattttttatgtgttagtaacattaagcaaaaaataaaacctttgttgtaattgacaccgccagccgagttgttgacccaattcccattacgttgatttcctacgcacgattctccaaagcaatccgtgtaaccacgatacccattcaaacagtcaacagctggcattccagttggacctttaacaaaattacattataaatatagaaaatgaggccaattcattcaaatccaaccatattcaccatgaatactccgacgatggttgacttgaaatcgcatgggaattgcctgctactgtgctttgattaaattactatggttaggagatatgtcactcacagacggtattggagagacttgaaaatttggtaatacatagtacggatggttgcccccttttttgaagaattttaaccgatctgatccaatttatgattaaggatgggattcttaggtttttacttattttttctgcggctttaaatcgacgagaaatgcacaaaaaacacaatttttgttcgaaaaactttcgttttaacgcccctatccgaccctaggaatccctattttggatgttcgccctaaaaatccctgttttcctaaaataagtttttatcccttttttggcgtttcgcccctatttcgcgatttttgngaaaattattaacaa

SEQ ID NO: 4188 - DNA, 5451 bp, Heterodera glycines
  unsure (1)..(5451): unsure at all n locations
aagagtaagcataattaaattatgaaaattatttttaaattggagcaattaattaaagttttaataatacccaaatgatttttctcttaagcnccgtaattgacattgaactttggtccgagtcgtccaacacgtcttacacttattcctcaaccgacaaaatccttgccacaacaaccacggctcatccggctttccaacctttggtcaaggcgacacagttggaatggcgcaaacctgaacacgatggaggcaatttataccaaaaatggacagccattaagtgagtcatcaagagcaaaatcggaatttgaaaattgtacccgaaagggttttgttttatgatagagaaccgacacttaaaattcccgaaaaaataataaaaaaaattattgctgagagtggataataaatttaaaatgctaataaaaaagggttattaattctcttttaaacatattttagtgacaaatggcttgttgtacatcagtgaatctgatttatttccacgggttacgctttataattctggcgatgtgatcctagcaaattttggccataattttatgcacaatttcaacgtcgcttcacgaagccaacgtttggtaatgttattaagaaggagcttctgatttatgcagcccccccaaaaaaaaaataataaaaatgaatttaaaacgtgttccgacatttgcgcctttatcctgaatcgggttcaaagttaagtttttaattttcaactgcgcaaatgtcggaccgcaaatgtcgtagaaaaatgaattcagtaattttcagtcgtctcaaaatatgcattaaaaagaaaagttctcaacatttatgtatgtatatataaatatcctttttttgcagaaattgagtacagaaaacaaattgttgctgaaactgagttgttttataagcatgttgcgcgacttcaacaaatttttgtaattttccatagaaaattctgttccaattttgatcatctttaaaggttaacatggcaaaagtcgttatcaaatttttaaaagcaaaaaatgaagacgacatgataagcaagcggagaataaaattgtaagtgatttgtctcaaaaattgggtagtcgtgaaaataaatttaaaataacatttttctgttcattattttagagtttttaaaaattttcagtatgatttttcaatcctttgaatttacatacatattttagtttatactttttcttttttattttttgcaacgggtaaaaattgagccaaaaatctcattgtaaaaattcagaaggaactgcagacaaaagtcgtgaaaatagaggaatttgtgaacacattaaatttggaagaataagcacattacaattgctgctattattgatcaaaattaaatttgatttttttttctttttatttattgatagatcgaaaaaactcattttaaactttccaattaattctaatatttttttgataatgtgaaattgataaaatattaaaaaagaaaaaacaaattaatttattttttacaaaaagatcaaattttcccatcccacaacccaaaaggtacgacttcatttaaatgaagacaagcaatgcttatagcacagtttttgaaagtataggccttaaaaaagttagtcaaaagtgaaaatttttatttaaaataataaattatttcgctaatgctggtatatatatatatatatatatatatatatatatataactatatcattcagaattttcctaccttttcccggtatcataaacagatagactgccgctaatttgtagtatttaatttaacaaattccttagcaaaaaatgaactgtatcaatctattaaaaaagttaatttaataattttaattataacattgtaataccactacatcggcagcttcgcttattccggtttttgtccttcatttttgtaattgtttgatcaatttcagccaattctaataatttactttttaaattattttttgtttaaaattataaaggccaattgtttacgaactttggcttcgtgaagcgacgttgaaattgtgcataaaattatggccaaaatttgctaggatcacatcgccagaattataaagcgtaacccgtggaaataaatcagattcactgatgtacaacaagccatttgtcactaaaatatgtttaaaagagaattaatagccctttttaaccactcacaagacaaaagtaatgaaaaaagaggaatttatggacaaattcactttggatgaataagcatttatttacgtctgcgtattgatcaaaattaaattgaatttttttatttcttttttctttattgttagatcaaaaaattctttaaaatttcaaataaatatttttagataaatgcgagataaaatgaagcattaaaattagttttttttttttgaaaataagcctaaaatcacttgaactcattaattttaattttatatttgagttaattgctgtaagaattcaactgtataaatagtaaatcggagataaaagcaaaaaccgaagaatttattttttcgcttttccatattgaaaattagcaattcaatatttacaaaaatagcattaattggtcactcattgctttcttaggctcttcaaaatccatccatcaatcgtaggcttttaaaattgagctgttttttgacaaattgcgcctgtcatttgaattgcgcagcgcgcgtcgttccattggccatttgcatttatcatatgcacacattcctcatttgcgccagctaaaagcatttggaaatgtaattattagggctgggatttttatgtgctaaaaatcctgaaatatgtaataaaatatgtgctaaaaaccaaaaaaaggcctaaatatgtgttaaaaaatgcaaaaatatgtgctaaaaattggaaaaaccaatggtatttttgcataaaaattccaaaaaactcattctttatcatttttgcccgcacaattgcaaataaaaaacatttggaggtgtttgggggtaaaattagtccttttttgataaattgtttttaaagataatttttccatcagttgagtaagtgccagcaataaacttcgatatccagtaaagaattaatgaagaattcgattttcggtacacgaaataaataaagaaaattttgaaagagcctataaaaatggcaagaaagttgatttttaggggtgcatttttgaattttttgtgtttttcatagatatttttttcaaaaatgccaaaatatgtgcaaaatatgtgccaaaccccgaaatatgtgcgatatgtttttatgtgcgaaaacgccaaaatatgtgtttttatgtttttataagtcgctctaaatcaaaaattgttcggagaaaatgctatttttgggcttctctcgccataactaagccgcaaaaaaaatatgttaaaacataaaaatcccagccctagtaattaagaataattaaaatgatataaaaataaaaaaacgcaattttttaaatttcttaatataactgtaacaacttgggtcagtgtatttgttggtgcctgatggttgtccttctgcccatgggtattggtttttggtgccggttgtcgttgcagcagttgtaatttcgggctataattataattttggtttttgattattattaattaaacaattatataataattattattaattaggcaattctgttgacttaccacattgccaaacgttgctggcgatccgtttgcccatgtgctttgatagagattgccgacacggacacggcgaagaccgatcctggaaaagatatcattgtaattaggcaatcaattatcatggattaataatatattattagcaacaaaatttaaacaaatatccaaccaaaatgtgttgaaaattgttgatgacaattggtaagtcagaagtgaacgagcaagcggctgggcaatgattcggccaagaagccgattctcggcttcatccgcaatgcttacaagttgcgcttttgagtcctcggcattacaagcggccactgcttggcttaaacggcaatttcaataataaattctttaaatttgtttaagggcttcgcctccaatgaattcatttcgtgttcacacctctgattcatcaatccttcgatcactttgtagcatttgccattgaaaatggtccacccaaagcctccgcacaccgatacactcggattacacaaatcgaaggacgatgacgaggcttggggtggtgccgcggaacttccggcactttgcacacggatttggcccgttccaacgggtgttacggcggcctgtgacccaattccaactgcttgagctgcttttttgcaaattgcgcctgtcatttgaattgcgcagcgcgcgtcgttccattggccatttgcatttatcatatgcacacattcctcatttgcgccagctaaaagcatttggaattgtaattaagaataattaaaatgataaaaaaaaataaaaatatattaaagtattcaataaaaatgcgattttttaaatttcttaatataactgtaacaacttgggtcagtgtatttgttggtgcctgatggttgtccttctgcccatgggtattggtttttggtgccggttgtcgttgcagcagttgtaatttcgggctataattataattttggttttttgattattattaattaaacaattatataataattattattaattaggcaattctgttgacttaccacattgccaaacgttgctggcgatccgtttgcccatgtgctttgatagagattgccgacacggacacggcgaagaccgatcctggaaaagatatcattgtaattaggcaatcaattatcatggattaataatatattattagcaacaaaatttaaacaaatatccaaccaaaatgtgttgaaaattgttgatgacaattggtaagtcagaagtgaacgagcaagcggctgggcaatgattcggccaagaagccgattctcggcttcatccgcaatgcttacaagttgcgcttttgagtcctcggcattacaagcggccactgcttggcttaaacggcaatttcaataataaattctttaaatttgtttaagggcttcgcctccaatgaattcatttcgtgttcacacctctgattcatcaatccttcgatcactttgtagcaattgccattgtaaatggtccatccaaaaccactgcagacaaatgcacaagatggagaagtcgatgtctcttcattgcacggctcttcagtgaccgaggacgaagcttgggaggttgcttcagtggccgatgatgaagccttggtagttgggggctttttagtggatgaagccttggtagttgggtgctcattagtggcatcttcatcgcacggctcgtcattggccgatgatgaagccttggtagttgggggctttttagtggatgaagccttggtagttggggg

SEQ ID NO: 4189 - DNA, 3014 bp, Heterodera glycines
tcagtggccgatgatgaagccttggtagttgggggctttttagtggatgaagccttggtagttgggtgctcattagtggcatcttcatcgcacggctcgtcagtggccgatgatgaagccttggtagttgggggctttttagtggcatcttcatcgcacggctcgtcagtggccgatgatgaagccttggtagttgggggctttttagtggatgaagccttggtagttgggtgctcattagtggcatcttcatcgcacggctcgtcagtggccgatgatgaagccttggtagttgggggctttttagtggatgaagccttggtagttgggggttttttagtggcatcttcatcgcacggctcgtcagtggccgatgataaagccttggtagttgggtgctcattagtggcatcttcatcgcacggctcgtcattggccgatgatgaagccttggtagttgggggctttttagtggatgaagccttggtagttgggggctttttagtggatgaagccttggtagttgggtgctcattagtggcatcttcatcgcacggctcgtcagtggccgatgatgaagccttggtagttgggggctctttggtgactggtgatgaatcttcatcagatgaacaatgttctgctgatgattcttcggatgaagccgattccttggatgatgaggaccccttcccttcatcttctattggtgagcactccaacgttatttttgcctttatctttatcccgcgcatagctgtcatatttttgcttattatttttattgtttttgattgtccatcattgaagacaagctcatttatggcctcccttttcttttgcctgtgctcttcttgtccaaatatttggtcattgtttttgacagaaatctcttcgctttcattcgcagatggggaaaatgatgagaagagcttaacaaaaatgtttttaaattaattttaattaaaatattaaaaatttaccggcaatgagttaacttcgaatatttgcagaagaatgactaaaatagagagaagagtttggggctgcatattcttcaaaggctcttcttttgttaaacgatttaatgaattgatgattattaattttatttcggcttaaatagccaattcttttagttgaaataattatcactaagttcagaattctttgtttgattagtgcaattcaaaataattaactaatgttcatttactcatgtgtttctttatgacgtcctaatcacttttcaattttgttgcattcgttcggttaaagctgttcaaacaggaaatgaacgtaattgagcattaaatatgcatgaccctgatgaatggaacttttttattaatggtcacattagtacttttctattattaaagatttttgaaaagtttccgcttctatgtcaatgtttaaagcctaaaattttaagtagctcgtaatcccgtgatgtttaaatgattttatcctcaaccaattagttcagtaaacttttagttcatcacgagaactttccatcaattcgaattgccacgaattgccattgcgagttgcgagcactctaattaacgtatccattaaagaattatagaagatttctgaaatttttcaattttttttttgcgtaaaatccacaaaaatggcattttggacaaaatcttttaataatctaatcaaattgtcaaaataatttcccggcgttgtatgttggcaccgccttacacccatcttcctttaatttttcatttccgggttactctcgcttggtcgatgtgaaaattgctggttccattcgacgctcatttaatataattttttaaaatttcctttcatttataaatgccttaattaaaacatttatgaagatacaataaatagaggaaaaagattcgttgtttgagaccaattaagaagatgataataataataataatgaaattaatttcaagaatcccttcgcctttgtcggcacagtccgccgcacagaccgtagaggtagggattgatcacggagttgaacacgatcatcccgtgcagaaagtacacctaacacaaagttaaaaagattatttaaaaataattctcctgttaagaatgcttttatcagcttataaatttgcatgataagattttttatggtagaaaatcaaaaattaaatttccaatttggaatatattatcgttttgcagaattttcaatacaaatttatttcccgacttgatttgcgtgccgactgaacaggtcagtgtcgacgaattgaatcagtgcaagaaaattgtagggcaaccagcaggcgaaatagccgacaaccagcaaaaaactgacacggatagcgcgatttctgaagaataattaattagtggtgtaaattgggagtaattagtgacaaaatttgaggaaaatattaatggataaatgcaaaatttagtcataaatgaaggaccgaccgatcacctgtttgatttggcgctataggaggaggactgacgatggcgaatggcagacaccaataattgtgtctgaaaagtggggaaaagttattcggtaattcatttaattttggtaattaaattggactaaaaaaacctttaataatatatttaataattaattagcctattaattcatataaataatggtttatgcctcgtttgaagtacttgaactgttcctctgctgttctttttgctgctgctgtttggaggtgtcggcgtcgtcttccctcattaaagtgttaatagtcggcgtgatcgctcgctgcccattaatcacaatcattggcttattgtcagtggacgggtcatttaaggctaaaatatagttatttaaaaattttgaacttcgtgaaggtcgcccaagtgatttttgtcttaccggtcattgtggtgacctgttggtagcttactcttgggcaacggttcatctcgcgcatttctaaatataaaaaaaaattaaattttatacgattcaacgagttccccccccctcgcccatagctaaatatttcttt

SEQ ID NO: 4190 - DNA, 3549 bp, Heterodera glycines
  unsure (1)..(3549): unsure at all n locations
aatcagtgcaagaaaattgtagggcaaccagcaggcgaaatagccgacacccagcaaaaaaactgacacgggatagcgcgatttctgaagaataattaattagtggtgtaaattgggagtaattagtgacaaaattgagggaaaatattaatggataaatgcaaaatttagtcataaatgaaggaccgaccgatcacctgtttgatttggcgctataggaggaggactgacgatggcgaatggcagacaccaataattgtgtctgaaaagtggggaaaagttattcggtaattcatttaattttggtaattaaattggactaaaaaaacctttaataataataattaattagcctattaattcatataaataatggtttatgcctcgtttgaagtacttgaactgttcctctgctgttctttttgctgctgctgtttggaggtgtcggcgtcgtcttccctcattaaagtgttaatagtcggcgtgatcgctcgctgcccattaatcacaatcattggcttattgtcagtggacgggtcatttaatgctaaaatatagttatttaaaaattttgaacttcgagaaggtcccccaagtgaattcttgtcttaccggtcattgtggtgacctgttggtagctgactcttgggcaacggttcatctcgcgcatttctaaatataaaaaaaaattaaattttatacgattcccaagttcccccccccccctcgcccatagctaaatatttcttttgaaaaatgcaaaatcccagccaagcaaaaaaatttcctctgcggtaacccaaagtcaaaattctattagaagtagacccgcgcccgctttgttgggcccctcaccggcgcccgcgcccccggcactttcaatgcctttgccggccgttgtcaattcgaacagtgacggcttactattaatgtatacccagcaggagagcagcacgtaacagagcttaaataaactactttagtaaaatagagaaatgaattaaaaattgaatataatataaacaattaaaaatatttgtttttctcaaaaaaaaaattaccaaaatgataaaagcgggcacccaaaagatcagcatcatgtgcgcaatcacgtacagtgattcttcgttttttagctaaaaaatgaacggatgaaaatttaaaatagaattaaatgcttttggctaattgagtttaattacaatagaaaaagtgaacaattaaaattgtgaatgccacaagctgactgaccatttttggagaagctttggtcgttgggtcactttgttgtgccattgcgcgttgaatttcccaaatttgcatactgtaaaatgcaattaggtaatatttttaaatggttatcattttgttgtataccattgattccatggcggattgtcaaaggcttggaaagaacgccaaatggcaaattggggcaaagaaatgagtgccgcggttagccacgcgaccaaaagcatcagtcgcatgcgacgggcagcctaaaaatgggacacaacaaaattaaacagaaattaattataaatttcaaacgaaaattcgctgacatttctcagttaggggagtacctggtcagggtttcgatgagaagcgcttaacacggagagaaggcgatcaagcgcaatacacacaatcacatttgaagaaatcttgaaaggtcaatgaaattaatcaaaaatcattaaaattaaaaattttgcttatttaaatgaaacattcttgacacagtacgatagtgctaccattctctagtagccttcaaaatttcaaaaaatttcgaattaaatttaaaaataacgcaaaggtaccgaccagggttgttccgggacgagaaaaatatcgggtcgggattcgggtcgggtcggccgaaaaatcatcgggtcgggattcgggtttcgggacgagaaaaatgtcgggtttcgggattcgggtcaattaaaatttttttaaatatatgttcaaaaatcaataagaaaatttatagccaatagaccacaaaaacataagaataaaatgctttaaaagaaataaattattaatttttttttcaaaaattctcctttctcaaccaatttctttatctactcaattttcacccagacccctttcttaccagtgcttattttgtcccgaatcccgatcaaaatcatcgggtcgggattcgggtttcgggacgagaaaaatgtcgggattcgggtttctggattcgggtgacccggaacaaccctgttactgtatgctaaaaaatttaatacagaataaattaattttctgcattttggaccctattccataattaaatatataattaattagattcacaattaaataatagaaaatgggtagatcagcagatgattctaatatcaatcactcatttaaaaaaaggcaatggacggttttgtgatcgttcttgactgtgaaggcaaagtgatttacacaagcgaaactgttgctgtacatcttggcttagctcaggcaagcagcacccccccccccccccccagacctagccacacccaaattttccaagaaatgtcgctaaatttttcaaaaaatgcacaaatttttaatgaaaatctgctaaaaatggctcaaaatcacaaaatttggtcattttttggacaactattttttttgctcaattgatttgaagaaaggagctcaaaaacgcatttccgcataaaaatttttcgattctgatgtcattatcggtcactagaaatcactattttggcgacttcgtcactaaaatagttaaaaatcactattttggcgttttgtcactattttttcactattttgacatttttgggcaaaattccttaacaaaaatgcaataaaaccaaaaaatacacccctaagaatcgagctaaaatttttaaaaaaatacacccctaagaatcgagctaaaatttttcaaaatatactcctatgaaatcaaaaaaaaattttctcaaaaatttactttcttggcaaaaatttttaatttaaaaaatttttttaggtaactattttgggttttttggtcttaaaaatcccagtccaactcatttgcaactgcaaatagtgaataaaaattagttttgctcaatttttggctgaaaattatgtcactattcgtcactatttcggcatttttactcactattttagttaactatttcgggatttttcttcactaaaattcacgtccctaatgattatcaatcctttttatcatttattgtccatcagttttcacttcgcatttaaaaatccaatccgtgtccaagacaaatgtgccgccggcagccaccaaatgccaaaatgctcacggcacacgtccaatagaccctccacctccnacacggttgtgngaagacatttgacgaaggaatcgcttcnntccgcgcatatttgacatcacacaggaaacaaatgatnngcaatcgaacacagcagatgacacaaacacaacccanaaatgatggcatagtgacacccacagtaagcttcctgaaattgatgaatggagaaaattactgtata

SEQ ID NO: 4191 - DNA, 5560 bp, Heterodera glycines
cgtcaatttaggtgggctcttacgcggcgatgacctcaaacggtgcgttggtggcggcaaagacaccgccggaggtgcagcgcgagttcgcctcgctcgcccaagtgccggtggtcgccgggacggtcaaccgcggctcggaactgatcggtgccggctgttgcgtcaacgattggatcgcattcacaggcgagtggtggtggtgccgtgccgtgacataccaattcggctttttcattccaaattaaatacttccccagcatttttcaaactggttgggtatttttaaataatttcttcgatgaaacaaaaatctcggagttggggactttatttttcaacgctctcatacggaactttattaatcggattgaagcaaactatattcagaaaagacataaatcccaaaaactgaaactcatcaagcgaattcggccgaattgtttagttttccaggaattggcgacggatgtgggcggggctgtcactttaatcaacaatttttatataattgtaaattccgttttcccatttgcaggcctcgacacgacctccgccgaactgtccgtgttggagtccatcttcaaattgggagacgcggcaccgagcgcaatttccaccgatttgcgcgacactttgatagaatcgatgctttgaatgacaaatttcaaaacgaaggcggtggaggacagacacaaaaacgctgacattttttccgaaatttggtaatagtaccgatggtagtcccccttttttgaaaaaaaagttaatttatttgttttgtttttttctcaaacaaaaaatttaaggagtcagagaacgtagatgatcttagagcgtcatgcgagcgaatgtcggctgagttggaacaggaaaagaaggagaaggaggaagaaaagaagcaaaaggaggaggcaaaagcccgtgttgccgagttggagaatgaaaacgaacaattgaaaaatgaaatcgaacaattgaaaaatgcgctcaatgcagagcggagcaaatcaaaggtataacagaactgattcccttttcattggtgaaacgcactttgtcaggcggaaggccagcgcacaacacacacggacgaaccaatgtctcgcatggagcgagacttcctggccgctcaaaatgtggtcgatacgctcgaggaggacgtcgattttttggtaatcaaaagttttaattgaaaaaatttaatctttgaagaaggaaaaggaaggaaaaacggacgaaaaggaggagaaagagaagcaaaaggaagaggaggaaaagaaaggcggagaagtggaggaagaggaggaaaatgagaaggaacaagacgatgaacaaaacggaggaaacaaacctaagcgagctcgtttcatgtaaatggttatgtaagatcttgttggcatggaaataaatttaaggctgcaaaggtattaatttgttaattgtgatttatgtaaattgaaaagtccaataactctaaaaattgatgtttaaagccgcattttgggaacctaaaaatgattccggcattgggagacgttcattcagaggcgcacaaaaacgagtaatggcgagaagagttggagttggaaattgacgagaacgaggtacgtaggtggacgggaacggacatttgggcccaattttatccgtttcatgcaatttaaaacggtagctacaacgaaaaaaggcatataaaggcgttaaggtggccgacttacaattagtatcatttttcgacgggggagagcggtaatttcgaacaaatgacgcgggttttaagattaaaatatgatttttcattcgtagtcctttaaatctccaactttaattttattataatataacactctattcgagtcgaaaaatataataaaaatagtcaaaaaaaaccaaaatttcaacgccatttcagggacttcgatcggaccacatttgaacacagcgagcaattttcttctactgacaataccacggtgtttcttggtgcatttttgtgacattcatgtgacgagacgattcatttcccctttttacaaattgaggcaatccttacacagcaaggcatttttatatatttttcatggaggagagattttcccaattttagtgacactttcaagaaatacttggttttctacgtatttaatgactttttgaagccatttttggatctcatttataataactaactaactgatttttttataatataaaataactttcttccaaattcgaatcgaaaaattattttaaaaaataggcaaaaatttaaatttcaacgcaattatttcacccctcgccgttcagggacttcgatcggaccacatttgaacacagcgagcacatccaatcgttgcgcgacaaccccaatttgtccgcccaactcggcgttccgttgggctgtgcccgttcctccggcctcccttcactcagtgccaaattcgccgctgccgtacgccatgacgccggcggcatgtcaccctcatcatcggccatgccaaccgcgcaacagctgcgtgccgaacagtcggccaaattggcgatggcacacgtgcgacggggtgccgaactgacgcgggacaacaaatgcttcgaggctatccaggttgtccatggcacgggcatcggataatttttctgggcggcgtggctctaaaattttcaggttcccatttttataacattggcattttgttcccccctcaattttgcttggcccagtgcttcaacaaggcgctcaatgtgtagtgtacgagcactgtgccgacgcgtatgttggccgtggcgcggcatgtgccggctgtcgcaatttccccgccgcactgactgacttggagcgtgccgtccaactgcagccgaaccaccggaatgccaacaagtacaggctggaagtgttgcacacctatgccaaggagtatgttttctccttcattgtattgcatattttgtcctattctgcttttctcaatgaaaaatgtaatcatgttgggccaaatttattgcaaaaatagtatttttttgcgcctaattttgcatttcaggcttgaacgtgatgggaaattggcggatgcccgtgccaagtttggccaactgttggcactgtgccccgacaaggtttaattttttgtgaataaataccgtcaatttacataatttcaataaatatacttggtaaaatgttcatccacttttgggaacctcgaattcaagcagttcaccgctgttatagcctgatttccccccgtcaatttggtgtccagacatttgcgtcccggacatttgcggcccggacatttgcggctcggacatttgcggccccagccaaatcggacatttgcggcccatttcttaagggccattttcggacatttgcggcccaattttttgctgaattttgcggcccaagccaaaatcggacatttgcggctttgccctacatttcatttaaatttattttatgtaattttgaataaatattactattagattttatcaatttaagaataagatattttattctcttcatcataatatttaactttttcaatacatcaattaaatacacaaaaataaattttttatttccaatggcttgctcaaggcccaacgagcgtcattttaaaaaatgcttaaactacggtcatatggacacctaaggcaacaaacacatagcgtcacagttaaaataagtttgtctgttaattgtggtggctctgcttctgacaacttccatgtttgaagttctgatcaacatgcgcagaacatcatcttcatctgtggaaatactctttttaacaatttaaaaattaattttgaccaaggtaacagcaggctggagttattacccctgcagctttttccatcatcaaaaaaattgtgcaagtcttcgtcgttggtaaaatactcttcattcaagaaaaattccgtcttttttggtccccgaacagtgactgggaagaaatatggtgatcgtgcttaagttacgagttggttttgataaatagggggtttacattttgtcctaattaaattggctgcggtctcagccgccgctcccccaacaacgccaccggcaaaatttgttgttaatttcgaagtgcccttcttgagggtatgagctattccgcttttccctgagtttagtgcagcccttaatgcagttctttctgcatgaaccacagaataatggcggccaccgtttcgtaggagatgacgaaaaagcgtgaggattgaccgtaaaatatgcgtctctccatgggtagaaataagagcggaaaagagaatcaaaaggataagggaacaatgcattttgactagttggtaggagacaaattgctacttataagcaaccagaaaagctcagacagctgacgtaggaagtgttttcgacagcctatgtcaaggtcccgcctaggggagaagcaaagtccaattctcactgctgacagctgttcattccttttatttctgacgttgaagatgcttgtgacagctgatggcaactctctgggcgagggctaggccaattctcattgccgacagccgttaaaaaatcttattttttgtcaacaagccatgataaaatgatgcgaattggaattcatgcaactgtctttttttctgcctaatttcaaaaagctttgttgaagccccagccgaccgaacaacaaagggcaaggatttaatcctgtttaatgggtatgagtggcggaaaaaaatgtgatagcggcatgagaagttcaggtcgtttgatgtagtaagacttgtccaatcttggtataggtctgggtttgtccaagaaaaacttgtccaggccgcgctcattctgccgttggatcgatcgagcttcgcgttgttacagcacataaccatttaatcgattcaacgcaacataccgtaattaaaatgataacggtgaattatttggaatcattaggtgcgtgatcgcaaggaacaaatcaagcagagccgcaaatcatgcagatgctcccagaaatattattggggcggcacgggctaatttggatgatgaatcgcttttaaatatgccgtcaacttcaactgctaaccgtttaatttccaggcaaagacatattccaggacgagaaaacattgatcaaaatgacgtcaacgccattgtccttgaagtaattaaaatatatagatattttaatttcttgttaaagggcgaatttattgttggaaatgatgggcagagatttctgctttatgattcaagacagcaagaaccagaattgcctgtttttttatatttgtgacggataacggcctcaggcgattaagacgccacaggcactggtctgcagacggaacatttaagggtaataatttaaagaaaaaaaactatttgctaagttttttttgaaaattttcggaaaaacagtaaattttcataaaatttcaaaaaaaaatactgaaaaattttcaacaattttttctttaaattttcttataaaaaaaatttttctaagaatttttcccttgaaaaatttctgtttgattttttttgaaatttcggcggcgagattttggggtg

SEQ ID NO: 4192 - DNA, 2265 bp, Heterodera glycines
  unsure (1)..(2265): unsure at all n locations
cccccccccccccccaagacccccgcggtaccctcccccaacaagaccaaccagcgccccagagagaaaaaggaatggcaaatttaaattaacgccaaattatcataacgaaagcaacatattaattttaaattccaacgccaaattacaaagttcaatttcttcatttcctttcatttcaattccaaaatcaattttccatgggagtatgttttgaagaattttcaaaacttccaaagccgggtcagaaaacatctcctcaaaagcatttctgtaaattggaaaatttttaggggttttttgtttttgaggacctaagcgaaaccaaaaaattttcatgagcaaaaaaaaaggtcgttcggacgaaagcttttcaaaaatacacccctaagaatcgggcgaagaattttcaaaaatacacccctaagaattgacttttcggatcggtaccccccccccaagcccaaatcctagatacgtccctgtgtgagagagagagagaggggataaatgaaaccgatttagatatttatttcttgaggtgaatagaataaagggtacttgtacagtttggaccgggaacagttcaactcgccgacgccgactcgccgatggtcgactcgccgacgccaactcgccgatggttgactcgccgacaacacgactcgccgacgtcgactcgccgataaattgtgcaaaaaatcgtggaaaattttaattttttaaaagaaaaaaattaattttttaaaacgaaattttaattttgccgtacttagataaaaagacaaaaattgaaaaaaattgaattctcgccaataatacgcctcgccaacgccgaatgatgtgcaaaaaaaaattgaggaaacattaaaattgtagccaaatgaaaggccaaaaacccaagccagtataaaaattttgtttgcattcgcgtttttatctctgatcatacagcaatttatttttttacaatgcaaaacctgcaacaaattcaaagtcaacgtgccgaacagaaatatactcttaatgggtatatgtacgtcaaagacaaagtcagtgcaagtggaatggtgcaattctggagatgtgaaattcgtggctgtcgtggtcgtatatggacgaatttggaagatggctttttagtttcagagcacggaaaacatatttgttcagaagccggcgatgctgtaaacgttgaattggcaaaaattcatacagcatttcatggacggcacattttcggcttctcctccgctttttcaacagatttatgtcattctttctcgacgtggtgacttcgtttttccggtgttctcttttgtcttcttcgaaacaaagatgcagctacatatgcgaaacttttccaaatgatcaaagatatttggccacaattcaacccagattccattagtgtggattttgagcacagcattcatttggcaatctgcgaatttgctgagaaattagatgctgttttttcacctcatacaaaacctacgcaaacatttgtcttcagcacatcttttaggtcgttacaatacggatgcaaattttgcacttcattctcgaatgattactgcgattgcattcattccggaagaggatataattcggtccttacaggaactcgaagatcatactcttgatcattatccggaacttgcgcctatttttgaatggtttactaacacttatgttggaagaggaacaagggcacccccaaatttttcctatgatatgtgaactgtttttcagcgtactttggaaggcagcgaccgtaccaacaactatgccgaagcttgcaatcgaaaattgaaaatcggatttggctatgctcacccacatatttgcgttttattgacgatttaagaaaaattcagaaaggtttagatcagattatgaagaatatgttagaggtcaggaaggtccatcaaaaaggccaaggtacaaggaaccgatgagcgaatactgagaaaagtgcaaaattatgaagtcggcaatgttttggagaaaggttgcaaccccgaccccgcccctgaaccccgacatttttggccatttttcggggaaaaccccgaaccccgaaaccccgacgcttcataccccgacaaccccgaaaccccgaccttaaccccgatncgggtcagggttaaatatacacccctaagaatggcatttcgtgggagaaatgcaaaaaagttagacgaaatttgattttttttttacatttgccaaattttataaataaagagatttgctcaattt

SEQ ID NO: 4193 - DNA, 5389 bp, Heterodera glycines
  unsure (1)..(5389): unsure at all n locations
ttttgattaaaaatccaccgtaagattatgttttggtctaataacaaatatttcagtttattttccttgtttacttgtagtttgttggagctgattattgccgattattaaacggattcatcagaaacggactttgaaattttgattaaaatccaccgtnagattatgttttggtctaataacaaatatttcagtttattttccttgtttacttgtagtttgttggagctgattattgccgattattaaacggattcatcagaaacggactttgaaattttgattaaaatccaccgtagattatgttttggtctaataacaaatatttcagtttattttccttgtttacttgtagtttgttggagctgattattgccgattattaaacggattcatcagaaacggactttgaaattttgattaaaatccaccgtagattatgttttggtctaataacaaatatttcagtttattttccttgtttacttgtagtttgttggagctgattattgccgattattaaacggattcatcagaaacggactttgaaattttgattaaaatccaccgtagattatgttttggtctaataacaaatatttcagtttattttccttgtttacttgtagtttgttggagctgattattgccgattattaaacggattcatcagaaacggactttgaaattttgattaaaatccaccgtagattatgttttggtctaataacaaatatttcagtttattttccttgtttacttgtagtttgttggagctgattattgccgattattaaacggattcatcagaaacggactttgaaattttgattaaaatccaacatgtatttatttgttttggtttaataacaaatatattaagttattttcattttttaccatctgaattatattgtgtgttaatttaaaataggggcgcccgtttttccgggagtttgaccacttgccatggaccgatggagctgaaattttgtaacatacatagcaattctgaaaatcttaagcacagcaagtgagaaagcggaacaaggaggggaaatttttttatagtttttttttcaattggggtgttcataaaaatagggacactttggaaaactgagcaaactcagctactaaaaaattatgctgattttaagcccgattgaatgtaaaaatatcatcagcagacaaccgtgaagtgtatgaaaagcaatttaatttaggctcaatagttcaaaattttgagattatttttgtattgtataaacccacgatcccttccaatttactcaaaaactccgggactcaattcgacgaaccttcctcctctcgttattgttaaaaaaattttttgactcttttcttaactaatttttgctttttttgattttgattcaatttggttcatatttatcaatccaaaaacgcaccaaacaaaaaattcgttagtttttttcgcggtgtataaaaaagtcagtctcggtctcggagaccgagactgaaaacccgagaccgagactcgaaaccgagaccaaaaaaacccgagacttttctcgagtcgagaccgagactctcgagcatcactactccgccccaccctgagacccgctaattcctctcacatggattcgagtaattctttagtgggagcttcagaaaacaatatatccggggtttcagctctaatataattttcagatgatccactttcaaccaatgctggttcagatgaagaatactcaattgaatcatattccgaactcttaaattggcgctttctctaaaatatttggggtttcacccttaaattaccgcccctaacttctctaattttctcttcttttcttgttgccgtccctttagagttcatttgaaggagtaaaaacgaaattcgacttaaataatgatctgacacttgttggaaatcttcgtcttcatgaaattttgtttcgaggatccccttaaaaacataactaattttgcttattcattatttatacttcgtattcatcaacggcttcggcaatttgttcgtctaacttcgcataaaacttattctattttgtcaaattcgaaaatccctcttatttgccgattcgcgaagtgccccttttaatgacgtcatccttttttaccaattcaggaatccctcttatttgccgattcgcgaagtgccccttttaatgacgtcatcttatttgccgattcgcgaagtgacctagcaccattcggcgtatcccggcgccggcgcattgcgccgtttgccgcgtctccgacgacgatttgtgtcttaaattaatgtataggtacaccacgttgagagcgggaaaatgcgacactggatttttttgaaaatttccccgattttcagtgtatttagggggtatcccgatcatttaaaacagatattttctaattaccatcattgtcgtcgccgtccttattttgtccatcagcaataaatgcatttgcgttccattcaatttccaatgatcgcgcgtcaaattgaacaatacgccgttctttttggccatattttcctcttcctttttgcccattttctcttctttctttttcgtcgcttttttggcaactttctaccgtaatcccatcgtccatttgcaactcatcataaatgtcaattagctcaatcgaaatttcttttggctccttttccttctcccctagggggctttccagtggaatttggccacgttttgccatgaaaaacacggcatatgccaaactctgtttgagttcattctttcgcgaagataaggtgttgttattttctgaaaaatttacaaaatttcggccaataaaaatttgactaatttttgttttaccctttttcatcgcctcatttgctgaaactacagcagcaaataatccctccaacaattggcttagtgccggataattctcataaatctcttccgagcggtttttgaaaaatttgaattctttttcatccgaataatcatttttctgtcaaaatttaaaaaattgtatgaattcagttatctgaggttgggcgaaaatggcacaaaattaccatttttaatttacctttgaattttgcaggtaaaaaacttcctccaaaaggcacttttttttgtttaacccttcaataaccttcttcacttgttcattgtgtttgctatttttgccaagaattttatttatccatattcttgaaacaaaaaataatctctcccgtcagcgatttgggcgggcattttgccagaatccttagaatgttgcgtgattttgccagaatccgccggcactttgacagaatgttcttgtgttttttcggcaggttttgacattattttgcgggaatccgccggcactttttgtccatggcatccatccattagcaaaagcattgccaaaattagcagagaaatccaatgcattttgccaatcattcgcaaaatactttgataaaaaatggaaatttgaatataagttgttgaaattccctataaaaataaaatttaaaatgagagcactgaatgtcgtgcgtcaccgtagtgcaaccctttgtacccctttattccccattaatacagtaagaaacagtacgcctttattctgggtgaaggacacaatgcttaggccctcttcccgattcggtctcgggagcagagactgccgggggagaagcctgatttgtatataagtgatcgagagtaagcccccgggggcgggggggggggtaatcaaaggtggagggagtgatcaaagaaccgcccactagaggagagagacaattgtttgggaaataagatagatacaaaatgtgacatttggattacaaaataaatggtaaatattgtgtaaatgtgatgatgattattataattattttggtattcagccctaaatgtccactattagccaaaaaaattccgaaaaataaagttatggccaaaaatgactgaaaatttggttgagatagaaaaaagttttagtccaaaaacatggctgtggcctaactgaagtaaaccgtcttattataattatataattattaaacgaaaaaaatttgttataaaaattattattattaaatattaaataataaagatacgaatttaaaacattcgatgatattaataaatttgccaaatctctgaatgaatgaaatgcgatgggcttgtgaccccctttttgttaatattattggtgatatttttttgtatttcgtattttacaaattattataaaaggtgaccagccgcaagaaagaaaaaaacaaagaaaagttaagaaaattgttcgagttcgggttcgcgattcgaaaaatgaatgttcggcacatatccgaccaatttcagtcctaaacaggcactcacgcgaaaacaaccccgaccgtataatttgattaatatagttcataaaaatttattataaatttcatttacaaataaaaaactataacaaataatgagttggaagagtacaagaagaatcagcaaaaagccgttttggaagctatgggaaagaaaagggctcccggacttttcgacagaggactattcgacagcaaaggacatttcgaccagtgatgccgcgggttaagaaaaatttcgggttcgggtttcgggtcgggcactcgaaaaatttcgagttcgggtttcgggttgagaaaaacttcgggttcgggtttcgggttgagaaaaatttcgggttcgggtttcgggtcgggcactcgaaaaatttcgagttcgggtttcgggtttcgggttgagaaaaatttcgggtttcgggtcgggcactcaaaaaatttcgggttcgggtttcgggttgagaaaaacctcgggtttcgggtctcgggtttcgggttcgggttggcatcactgatttcgacagcaaacataaaaacaaataatttttattcaataaattatattgcttgtcagttttactaaatttattttaaattaacctactaatatgtattgataagatattattactagggatacggtttttatgtttttatatagaaaagtttcagaaaaatacacccttaagaatcgggcatcaaaattttaaaaatacacccataaaaatgaaaaattttctcaaaaattcatctccaaaatttattttctttttgattattaaaaattatttatctcaatataaatttggcttaagttttttgatttttgggtaaattttacaattttacaacccctatattttaaacttaattactttttactgtcgaaaagtcccctcctcaatttataatatttctgtcgaaaagcccggcgccccaagaaaaggaggaaaaggaaagaattgaaaaggaaacggaggaggaggaggaggatgattaaaaagaaagggagaaagggaaaaagaaaag

SEQ ID NO: 4194 - DNA, 4479 bp, Heterodera glycines
tgcctaattttcaacacttaccaccatccaaagttggtgcctgtgccgtcgtcctccattgccaacttttccgcatgtggtggttgtggtgccggcgacggtccgcagtttggcggtccatagacaaggttcccaaggctgctgtcgcctgctgttgccgccggtgccatggccgcgaggcaaacgaaaaataaaaaataaacgttcggcattttgttctaaattattttgcactcaaaaataatcccaaagtaaaaagaatgtttatttttatttttttaaatgttaacaatatttataattaaaaaaaaaatacttttatatacataattgatgaatgcaataattatattaatttaatgaatagaaataattaatttaatttaattattttatcaatcactgagtttttttatgcccacactgagttttgttggatcgaccgaccaaacatcattacaatcaaataattgctttgtttgtaatttttcaatttgataaaaaaggtaattaattgagggacaaatactacaaagataacggtagcctatccaaaaatttgttcaaaaaaattttatatagaaaagtttcagaaaaatacacccataaaaatgaaaaattttctcaaaaattcatctccaaaatttacttatatattttctttttgattattaaaaattatttatctcaatataaatttggcttaacttttttgatttttgggtaaattttacaattttacaacccctatattttcaacttaattactttttactgtcgaaaagtcccctcctcaaatttataatatttctgtcgaaaagtccggcgcccaaagaaaaggaggaaaaggaaaagaattggaaaggaaaacggaggaggaggaggaggatgaatagaaagaagtgagaaagggaagaagaaaagagcaaatgtgtgtacggatgatagtagattttgggggaggaccataccatacgaagcatactgtcccctattcgtactgtacatgtgtgtctaaactgtactgtctaacatgctactactctctgtgtctgttcatctcccatgtgaaaacagtacgaatatggacagaactgaatcggcctcgtagaaactgtttttttttacgatttgattctttggaacttttatgtgttagtaaggaaggcattttttaaaagctctatgagtcattgggttgtttttattcttagataattaagtagggaggatgataattttaagtgctaaaaactgccaaaatagtaattttttaaattcaaaattcttttcaagaaataaataaattttgaggatgaatttttgataaaaatttttccattcttaggggttttagaggtgcgccgtgactatagtaaagaaggcatttttcgaaatcaatatgagtcactgcttttttaaaatttattttttattagataatagtgagaatagaattatttttaatgagacagaagaaacccttaatagggacccaaaaataaaaaataaatttaaatggtaaaaattgccaaatcatctttttatttacgaaagtctaaattttgcagtaaattctggattaatgcccattttttatttttttttaaatatacaaattcttctgctgatttcgtgactagaaaaataaggaacaaaattatgaatttcaaaaaagctaaataaatatgtgcatttgtaaataaaatttgatgcaattttattaattatcgaaagatttaagttagaaaataattatttctaaaaattaaataatcacaaaccatttgtatgcagtaatatgtaaaaaaacaatacaaatgtttaaaaattttcctagaaatttttcacttgaggaaaactcgacaattttggcactatgtcttgaaattcagcatcgagaaaagccttttgaactcattagtgggcaaaaagcgacaacaaatgcgccaatgaagaagacccaattttcaatgctttatcctatcaaagcatttatcaacgtcaaattgtccgatgcaaaaaagtggtggaaaatttgtcggattatttgtgatgatttggccaataatttgtaaaaataaatgaataaattacttttgtcatttatcggtgcccacaatctctgctacaaaatgtgtggtcgttcgtccgctttttcttctgttggtgccttttccccacttttttacttttttacacatcgacacagaaaattcagtgattggtccaacgacggaattcactgcttccatcccgacactttcattcattcattcatttgatttgatcatttgtgaaataaatttttttttcataaaataaatcgaataatttttttttattttcattaattaaatagtattaatattcattaattaattaatcaattagcaaatgaattgcttttctctattgaccgtctttctttgcttggtcattaattgttcatctcctccaatacggtagtttcttaaatgaaagtaaattatttttttgtaaatttttcaaaattttcaatttttcagccctttgtcatccgacgttggcatttggaaattatgcaatggcaaaaatggaacaattttggtggaaaatggatgtacaaagtaaaatatttccaaaattttattttaaattaattattttaaatcatttttaggctcctcctctgttaccaaagcgaaatggccacaaacagaaaaattggaaaacgttttggagtgggcaaaggaaacattggcaaactgaaatttgtggaatgtgccgaagagattgccgaagaccaatggcacggtctgatcattacgaagcaccaagacggagtgataagctacgaatcgaggcaaattgagagaaaaaatattctaaaatatcaatttaatgaattaagccatggattcgacgacattttcggcaccgaacaaacgaaacaaacggaaaaatatttggaaattaatttgaccaaaagtaaagccaaattaataataatattttaatagcaattattattttacagatgctgaaccactgggaaacgaacttcaaaaagcgctttcttctgcagcattttttgacgattttatgccatttgttttggcatttgaatttggcgcaacattttgcgcagaaaacggcggaggcacaaaattgtgcaaagaaaaagtccaatttcatatttaaaattctcaatttaaaataattttgatttttagtgcctttcccaaacattggtcgccccaaaaacaaaggcaccgtttgttggcacaaccaaattccatggaaaaacaaaaacaacaacaacaacttcaatcccgaccaccaccgaacggcaaacatttgcgtttgaaccgttttccgaatttgtgtctcattttggcactaattgttcgaaaatcgttttccccgtggaagtggccaaattcattttgaacatcaccgctgtgccctaccgaattgcatgcaatgagtatgaacaagattacgagatcggacaatcggtggagctttatttggcaaattcaaacaaaagttttttcaatgcttgcatggaagtgccgacaaccaaatgcgcaaagtgattgaaattccggcacaaaatttggtgccaaattctcacaaattgtttttaggcatgtggaactgagcgcatgctataaaagcatgaaaacagtggggccaaacgacaatgtcgtcgccaaattatgccaagaccatcttaatgaaacgaatgttgccggattttctgtacaaatttgcatccatcgggatgaaaaggaacagaagcttgtctttgaaacattcttgaacctttctaccacagacgaattgtatggccaaataatgagagatttaatgatgtcattaattaattttacttaattgggttaattaagcatcaaaatgacgcgcaatttcccaatttccgttgaacaaattatggagataaaagaaaccattcccattttctttctcgaatttggcatcgatctccagcaaagcgcaatccgagaaaaagccaatgggaaagtgatcaacggagaattgaatgaaaatgtgaaaacatcgcttttttattaatataaaattaagccaattgcatttgctaattattttttaatgaattaatattaaataaaccaatggcatttgccaataatttaattaaatttaggttaatggcattggcaccattctcaatgacatcaaagcagaaaaattcaatgaaaattcggccaaaatgattcatttggtgtcgccttttgctgatcatatgaaagcgttcttccagattccaacgcctcagttctccaaacggatcagttaccggacggatttgaaaccgtacgaaaatgatccgaaaaaagaggtgaaaataaacaaaatccggcaaagggtatgggccaataatgtatcatttctaattttaaaccgaggcttgaaatggagccgattttttttaaatttttctaaaaatat

SEQ ID NO: 4195 - DNA, 1191 bp, Heterodera glycines
  unsure (1)..(1191): unsure at all n locations
tttcaaagagtttaanagcgatnntcatttatttccagagcgataaaaaacagatagtgaatatttaacaaatttaaacaaagaaaatttgggaaggaacggcgggcgaatgatttatggtctttattttcgtcaaagaatttcaaattttcaaaaatttctttcataaattatttctgtcaaaaatttgctctttattttctttttttgaatttcattttcttttcttttctttcgctgtttcaggaaatttttcggcgaattatttgacatttaaatggcaacggcgaaacctaaaaaaaaaaataaaagacaaacatttaattatttattttttcaaaattttgccgttagtccgtaaattcgttgccgcgacggcggccgatccgtgcggaattcgaagtgcctaatgagcgatgagaagatgaggaacagttcggcacgcgccaaactctcgccgaggcattgcctaaaggattttaatcattcattgggcacggcacaaagccaagccgacccgggaacggcacaattcgcacagctttggcctttcctccacctcaccttttcccgatcgaaaatggcaaaaatgcgtcgatgcgtctcagtgtgccgtttagcgggtcgataaatctttcgggactgaatcggtcgggctcagggaaatgggcggggtcattcaaagtgactgaataagcattttgcaaagagtgaacgaattggcaaatggtgacttgaaatttgcgggaggaccattgtgcccgaggggaaaaagaaggcgtcgagggaaacattttcagtgcaagtgcgaagcaaattaatgggcaaaatgttggccaatcgctgaatttcggcaattgtcgcgttcagataaacgaagcgggaacgatggcgcaattccaccgaaaaacggaataattatgagagtttaagtaaaatagggcaattaaggcgtgccaatgccaatgccatcctcttccccccccccactcgtcgcacttcgccctcctccccgagttgttctatcagttcggcgtggcatcgctgctgcacttcggggtgatggagcagcagcaaaatgccccattttgtggtggtaactgtcgtctcagagcccgcaaaaaacaaatcgagcagaagcattttcagttgcttttcacttaaaaatttaaaatcgaaaaatgaataaaa

SEQ ID NO: 4196 - DNA, 2248 bp, Heterodera glycines
tcaatgtgtgtgtcgagaaaagcccagaaatcgtcgcggatggcgagccattggcgccaagcggagcaaatccaatgggagacgagtggtgaaaggtgcgcaaaggtaaaggcccatcccctgacgtagcggaggccgactgagcaaagcggcgatgaggaagcactcaccggacggaccaccagcgaggattggcggtccaccatttgttggacacggataaatgccggatcatcctggaaggaatggttcgacggccttggcactttgcccatttggtcccactgaccatgggcgtaagtgcaaccgaacaaaatgttatcgattatgttggcgatgccgtaccgccaccggcttacacgatgtccaacggaccactgcagcgggagcctaaacgaatttggaaaagtgccaaaaaaagagccatcctcaaagtgatgacgagttgtgcagatttcggtcacttttttgtccatattttcattgatcacgataattacgctaattaccttccggaatcaatgcgtccaaatgggcgatcaatgatttcacctgaaatgttgacaaatcaaatcactggggattgatcgattggccaatcattttccaaacttcgtcctgaattttcttttccatcaatgcgcggccgagtccaaaatcgcgcaaaaggtgcagcgcaaaccgtcgctgttcgcgccacttttcgccttgaatttgcaccactccgttgtggccatctgtcaaaaaaggaaaaattaaagtgaatcaattaatagacaattagtgggcaattgaccaatcaatgcctttgggtttttgccaattagcgaatcaaaagttgtaattgtttccataattatcatccaatttaatcttgcccatgaatgtgtgcgtgatgaaattctgccaacgaccgctgaacgcctcgccatgggagacgaaaaagcgacggagcaaatccacgcgagagaccatgcaaatctgagagagcgtggagggggtgggggcatccaacgaacggcccttttatttggcaatgtttttgtgtttgttggcattttgttcgtatctttcttcgtcacccgccttctcacgtcaaaaggtttgccttcgttcggttagcaactgaccggaattggacccatccaaaaggtgaaaatgccatcgtagtcgacgtgccacctttgcaggagggcatcgatgttgtgggcaccgtgaagaagcactttgaaagaacgaaggtcaatcggtcgtttcattagctgtttaattgtacgtttaccctgcggcatatttccggcaattagccacggaattggccccgggggcagcaaacgacgcttccaatacaactcgtggaaaacgtacgagccgaagagaagaaacagaaacaaagacgagacattgtatgaggggaggagggcaatgagagatggcagagcgaaaagagagtgagaggactgaacagaacgccaaatagagggaatttaaaatgatagcatacgtacagcaaaaacggatgccaaaacagcaaaagtcaacggggaaagcaccagccaaagagttgcctggacaagaagcgatgggatggatgacgaatgccaccactctaattagggggtaattaacggaggaatgggagtggtgcaatcaaatgcacatgcacgaggggtgtctgaatttacgaaaaatacaagaggggcggggggtatctcgagacacaccttctgcagtattggtgcaattaattaattaattggctaattacctgaaaacgaacttttaatggcgaccatttcttccattattctcataaacataaaaggaagtgccaatggtttcgttcgtctcctttctttctttgtttgctaaatggcaatataatcaaatggttcattccaaccgtccgacagaataagaaaacaaaagttcgggatttctaaatgagtttctccagaacatttgcttatgccatttgaaattgggtgccgaaatgagcaaaaaaaagggaaagggaaagcgaaagacggacaagggaattccctcccccggggaacttcccccactcgccccctgcgcatattcaatctcaaactgccgaaatgggcgtggattcatccaacaccaattcagacggatcaatggcgacgcattttgaaaagaaagaccaaccccgcgccccctttcatccgacggatttgtcgtttgagagcagagacaaatggggggggggggagaggggaatatg

SEQ ID NO: 4197 - DNA, 3545 bp, Heterodera glycines
agggaaggggagaagcagtttcacatcttcctttctttgtagtttgtctttttaatcattttattcgcaatattatcgtaaatattcattcaattgattcgtgtgcatatacaaatggacatttgttttatacaacggaaatggcaaaaaaacccgagaaaaaagttgggaaacaacgaatgattagaaggtggacagatcagagtaagttcagaggggcattcggcggcggaggtgcggaggaagcggcggaaagtgccgaatcggaggaattgggccgagccggggaaaagagcggggaaaagccggcggggaccatctgtgggggagggaacggagaatggcaccaatcaatttgtagattggaaaatgccgaacaaagacacattcactgattcgccccttttggtcgtttcccctccacttgccattacctaagccaaaacccttttttgtgtcaaaaaatggaaaaacacactcactttgacttcgattgaatgtccgttgaccgaatgtttttcaccggcagccaaacaaagttgggcagcattaagcgaatcgaacaccaacgaaccacagccacgggggtaagccaccttaaagaagcgaattgaattgtgagggtaaaacagcgagttgacggcaccgaccatttccagctgttcgatcgtgccaaattggccaaaatgagaacgcaaagtgtccaatgtgtgccattcccaatttagaccagataaatgaagacggcacccaacatcaggctcaatgttctaccaataggggggataagaataattaagggacaaaaaaagaccatgaaaaaggggatggggtcgttgtcgaggatcagattcatcctttcgctggaaagcaaaatatcattaaataacaagttttaaaatggaagaaaaagtaaggaatggactattgtcaattgggaagttaaaattaaaaaatgtgtagagtgaaagtgaagcaattaaaaaagcaatgaaaatatttttgtatgtgtaaaaagcgaaacaatttttcgaaaaagattccattggttgaaatgccattgaaatttaccgaggaacggctcgttttgcgtccaccgctttcccattgattttgtggggccgatgggccatcgcaacgtcggccttaagtcaaaagcaaatttgctaatgaattccaatctctgccgaccatttccgtcgtcgcgtaagtgacgaagccgaacccacgtgagcttcgagttgccgggtctctgatgacaatgcaatcgatcacatggccccattgggagtaatactgacgaagtgcgtcgtcgttcacttggccaaggcctccgataaaaagtttcttggcgaaaaggccaaatttaaacggaatgaacgaatgaatagcagcactcactttgctttgtgattgcgaattctgttggttgtgcagaagaacaaattgcactagcgaagaaccgccattccgagggaaaaccatcgacgaagggccaaggaaggcggcggagtcatcgctgaaaggacaacaaacggcattaaacaagcacaaccggtagttttgaaacaattggttgtagtgcacaatacgcgtccactggacttttacgcgcccataaaaaacggacaaggtgatgtgtgaaaaaagtgtcgtcaaaacattcagatttcaatggttatttgagatctttcaccaagtataggttattcggatggaaacataaattaagttaatgaaattaatgggacgtgtaaaagtccacgtgtattctgctgttgaaccaaaaaattggacagaacaaattttaaacgaacccgcgaaaacactccgttgccgcataatctgccgaagaaaagtaaatgccggaaggaggcacttcagaagacattctaacgaacactcggaaaataatgggcttagaatttaccaaatattcagtagtttattgatgtgaacaaaatagtgacaaaataatttttattttacaaaaaatttttaaatatgattacggtcaaaatgaaactgaagggaatggaagagaaatgggacactcgcctcggagaagtgtaaatgagtaacagaccaacgaagggtgggtcaatcaaaatggacaaacattctgtgcttttctttgctccgctcattgtcagttcggctcgtcgtccgtcctttgccccgcgtcgcttctctctgccgcccctccgccatttccctctgattctccgtcctgctgtctttgcttctgttccgtctgcagagcggccagttttgaagagagtgcggcgccaaaattctcgcggtactgctcgcttaagctgtccaacagctgctcaatggcgtcgtagtaagtgacgtgcatttccaactgaaaagcgaaaactgtcacaaataaaagcaattcccttgcaaatggttggtcaccttttgaatgtctccgttcatacagtcgagacggtcggaactcacccgccagcctcgttgagtgagttccacgcaataactctcatctgaccaaatgcatttgcatattttcagccaaaatatttccaaaatgaaactcactttccaaagtgacaatgttgaggaatatgagctcgggagtgcgggatagtatttcggaaatggcgatggttttgacgtacggcgccatttcgcgtactgcggcaaaagcatccttctcaagttgtgagaaattggtaccgcacgcctcgcaggacactgacggggcaggcgaagagggccttgagaaatcgttgactcatttgtacatttggagtttattacaatatttcttttataactccaacccggtgctgcaattctccgcgtgattgccagagggctcgccattctcatccacagaattattttcatccccctcacttttcgttgtcattgccagccaaaaatttgtcaagcgccaaaaaataatggaaaatcaccgaaattaagtgtaattgtaaaggataataggtaattatttttttaattttattacatatgcatatgtacatatatacatatttctccttataggttttctttaacacagcggctcaattttttattttaactttgcaaaattaaaaaaaattttgggattttcgcgtgcaaaaaggcaagaactagagtgcagcgggaccgggacctggacacagacaactgagtaccaaggtcccggttttgaccggaaattcccggcttttttcccggttttcccagccaaaaagtcccggtttttcaacccaaaaagtcccggtcccggtcttgcccaatttcccggtcccgctgcactctagcaagaaccgatctcgagttacaaaataagttttcaaaaaacaaaagagaattcgataggggacaccctcgtttcggcgccgctcgtttcggcgccagcccagtttttggactataacttttttctttttccaccaaatctaatattattggtatcattcgaaagctctaagtgttctctattagcctgctaagtttcaaaaaatttcgttaatgctcaaaaaaattatgactagaattcaaaa

SEQ ID NO: 4198 - DNA, 2769 bp, Heterodera glycines
  unsure (1)..(2769): unsure at all n locations
atagaggnggttaaattataggtctatgcaaaattctaaaaaatttgcaaataagaaatttttttacaagggcaaaaatttttaatattttaattcttttttttagccaagtgcgcaatttaaggtcaaaacaaacaaaccttagaatattctccagaattttcccttcaaaatggttttggtctattatttacaaagttatatgctaaaaaatgggtcggggtcgttttcgcgccagtcgagtttttgaaccataatctttttcattgtcaaccaaatccaaaaagttatggcaaaaaagactgaaaacctggtttctacttttggccataagcttttcaaaattgacgaatttttttttttgtaattttgcaggctaatagagaatagatattccaataaatatataagtacttaattttttttattgtttgaaatatgtaagtaactcaaaagaaaaacaatggcagatgtttatcagcagagtttcacattatcaaaagagagaaataaattaaattaaattaacgtatataggcagtgagattaaaggcaaattgagacatttaattgtggaatagaagtggtggaaaagatcatctttaggagaatggaatatttatttgaattacatatgtaatatttaattaatgagattgcatggcaaaattgaatgaccaattaaattgaaggcattttaggttttgtgtatcaatggaaaaagcgaggaatgtcaaagaaagataaaaggaatgaaaataaaatgactggcagtgatttcacattaataaaatttaacaacaacacctcacaatcagcaataagtggaaaaattgcaattggtccgactgagcaaaaagtggcgatagttttgtaaaatgcgttggaaggcacacatccgagcacagcgacgttcagtgagcagcggtggcagtgcgactttgaactcacacgaattgggcaccaattggaagctgtgaattttctgatcaccgccagtgatcaaatggagctgaaaggagtcgactgtcacgccatccgcttgaatttgttgtggagcagtgccagaataaatgagcattttgtcacgagtgtcatggaaattagcctaaatatgacagatggaaatattaaaagttcgacacagagaaagtccgaaaggccgcaaaggcgtgtgggataatctactggtccgtgattcgttaatattacctgacaagtcccatcactggtgaacagaatcagtgcatcgggaaatcgatgaaagtcgacgatgtggagcaagttgaactgattgtgactttgagaggagttcggaaaagctgtgccgagtgagctgaacgaattctcctgaatgggcaccgacgaacgcaattccctgtccatgtaaccacgataagagcgcataatggtggcctaaaaggaatttacaaatcagaaacaaataaaagaaaggtgaacttttttgagaagttcgtccgatggacaaccgtcgtcacaattccattcgacaaaattgccaacaaatttttgtgctcgataggtaaagtatcgttgacaataactgcaaaaaactttttgacctacagtaaatgaaaattcttttccagtcggttttgtgtggaattgttaaaataaaggctgcttttcacgatacctcgttgaaagggacgactgatcgttgaatagcaacgaccgagtgccatcacgaaaagtgacgccgaacccatgtttgttggtgaagtcgacccatttgcagacagaagaggccgggagagaggcaggcaaaacgggcacaatgcctatgaaaattatgcaaaaaacagcaaatgaaaatacgtgaaaatgggggaagacaatgaaataatttaatttttttgcgagtgattggagagggaagggggtcgatcccactcttttttcatgtataaatgaattaagacggatcacacacaaaaataacttactgagagaagagaatggactcatgagcaaggtcatcgagttgatgtacttgtccaatgtttggcacataaatctcccgacccatccacccgacagttcgttactgcccatgcccgagtcgtgggcggacgggggctgcttaggcggaggactatttttggagactgtcggttgttgaggataaaaaattaacaatcagaacatttataaatattttttaaatagaaagtaccacagtcttcgctaatgttgtaaattgttgacaagaagcacttcttgagctacaattaatgtaaaatattgagggaaaacaaagcaaaaccccaaacaaacaattgctgcaaattgtttccatcaataaaactgcggttcaaattaggcggattcagtgacgaatgcgccaacatttccccaatggtaagtcgctgtttaggctcacgaattaaggtcctgaaaattaataaataagacaaataatgaaagcaactcgactttttaccgtttgatgaggtcaacagcactctttgaaaggggcggataacgcacgggaaaagagtaatcgcagcgacggatgcgcgagtaagtcgactccaaattggaactgtggaacggagggtagccgaagagcatcgagaagaaagtgcacgccacggcccaactttcggagtggacggaatggcccctgaaaaaagggaatggtaacacaaaaccaggctttcatgtgctaaattctcgggttgctcatcgaatgttctttttacttttagtcaatgacttcggctggcacataatttggcgttccgc

SEQ ID NO: 4199 - DNA, 4278 bp, Heterodera glycines
ctcgtacagacaaagcgcacaaaaattccttgctgacccacccaaaaaactgttcatggttcacagcaaaaaaggcacgccttttgattgacatccaaattcagaaagtaattctaaaaattaatttaaaattgaaaataatttaaaatatttgaaaattaaatcactttcaaattgtcgagtccgaagcgttcaatcagaaggaaacggtcgatcagtggaatttcaacgcaattgatcagatgcgtttcgcagcgcgacttcaacgcggccacctgaaaacggagaagttcgtttattagaaatagcaaattcattagcaagttttgagtcatttgatggcaattaatagtcccaattagcctaccaaattaaaaaattttagttaggtagaaaaggttataaaaacacaaagttggtttacgaaaaatcacagaacggttcgttgtctcattcaaaatactagatttattttttcataaatatttaatatttaaattaaaatgattgtacggtggcggataatgcaaaacttccccagcagcccaattcttataaagtgccaattttgatcagttgtaacttgggcttaaaaaaattacgtaaaatgacattttttcaccactttgtttgttataaaaaatgccaaaatattcgccaaattatcccatttgaaaataaataattttaaccaaaaagaggaaaaacaatttgtttgaaaaataaacaattaatgaaaatgccaaaaaaatcaatatgatcaaagccgataatttaacaaattcatccacaaagtctgacggacaaagcgtacaaaaattctttactgataaaaggcacaaactgttcactgttcgcagtgaaaaaggcacggaatttatcaacattcaaatgcaaaaagtaattctaaaaagtggcaaatcaatcaaaatttaaaataggatttaaagttcaaaaatatttaaataataatcactttcaaattgtcgagtccgaagcgttcaatcagaaggaaacggtcgatcagcggaatttcaacacaattgatcagatgcgtttcacagcgcgacttcaacgcggtcacctcaaaacagaacagttcgtttattagaaacagcaaattcattagcaaatttgggatcatttaatggccattaatttaagtgagcaaatataaacattacaagcaaattaaaattaactttggttaattagtttttggaaagtcaagtaaaaaagtgacaaatattatggtggtttaatttaatatttaaattaaaatgatcagacaaagaaagaagatgtgataaatgatcagaggaactcgcctggaaatagtcggccaatttgagaagcatcagcacatttttggctaaaaattgggaaattgagaagtccaaatttacaaagaaaattaaaattatattttcaacccctcagggggttgaattgaataaatacagtatcatgaattacggtttggcagaaaaggtccgctcattgtcagataattgatggcctccaaaaactgcttgaattggtccatgtccacgcccaattcgtccaaagtgatcattcgctgctgcttctccttcatctccacgctgagcatgcgactgatcaccggggaaacggacgacagccaattggcggacacagcgatctgatcaccaagattaattatcagtgatccgaacaaatttgtcagcgattagaccaagaattatgagtaatatgaccaagttaatcagtgatctgagcatgattaattatcagtgacctgagcaagaaatatcactaatctgacaaaattttcagtacaagaaccagtgatctgatcaaaatcatttgtcagtcatctgaccgggatttactagtgatcagaccaatgttatgggtgacctgatcaaatcttagtggatgaatgccctgtgctctctttctgctgtttcacctgtttgtctccaattttcactgtcaattggtcgtgatcagttgagctgttggaaggcgccgggaataggctccgctttttgagaattcggataacaaatgatgatgaagcattggagccgcaattaatttcactgcccttgttgagtgtaagggtctaaataattggtaaaattgccgaatatggtatcgactcaaaatcgcacaaaaacacttttataggtgtttagaagtaaaactaaatttttttactctggtactgaaatgtccattttcactgggactcagttgcctcagaccaaaaggtcatgaaccccacttttcattcatttattcgaattttaaaccggttcaaaaaccggtttaaatgcttttccgcgcccaaattttaagctgttccatcgttctcagcgcttaagaaaccctataaaaatgcgtttttgtgccattttgagtggataccaaattcggcaatttccaaataatttaattgattaacattttttatttgatcattttcgttaaatttaatttaattaattaaaaattaaatttaaaatttattttgttaaatttcttacttctttgatccgttgtgccccattttggccccaatcccaacggacaatttgtgccaatggctcctcattcgacggattggaagaagaagcattgccaacgtccgtgatttgcaatatgggataatcgcttatcgtaaattcactaaaatatgtaagtgattaatatagaaaaaaaaaatcatgtttgcttaattatatgctatcaatttggttgctttttaatgaaaaaaataattttgtaataataaatttttaaaaaatgaaattacagtgcagcaaattgggtaatttcacaaaatgtaccgatgcatctgtcacagtttaggagatttatactgatcactttttcgtcaacaataataaatccgtcaaagatttccattgaatgtgcttttaatttaattctattaaaaactatttaaatataaacaaatacatattttggcaacaaatattaattgcattggacatttagtgacttatttgtacaaagtcgtaaaaagacaaatttatgaattcatttcgaataaatcacgggtggaccctgataaattttggaaaattttttgtcaaaaatgcaaaatcaaaaaaataaaataaaaaataaaagaattttttgtcaggtgtaaaaatggaaaaaccttagaaaatgtggaaaacatttttagaaagtgcaaatgctacgaccccatgatcaatacatatttttatgtcagaaatcgttgtttattagatgaatttgtttacatgtgtaaaacaacaaagatgtgtaaacaaataaatatttgaataaaaagctaaggaaaattactaataattttatgaaaaataatttattttaatgaaaataaataaaatttggagtgccatggcattttcgagtgtaatgccggcaagggcttttggacagggacctgctgaacaagtgatagtcacttgtggtgccatatccgtacaatattacggcggatatggcaaaacttccccagcccaaccctcaattattttattatagtacatagcatatgctgtgatttattttttaattgaaaataccaaagtattgttcgaaatgttaaaattcgccagtcactaaaatgcgaaaatgaacaccaaaagtgggcaaaaaatgctcagaattaacctttttttattaaaccaaacattttcttttaacccaaataaaaaaattatctaatcgagaaataaagaaaatgttaaaaacatgaaaatgccaaaaaatcaatttgatcaaagccggactcaatcagcagaatttaacaaattcatccacaaagtcggacggacaaagccaacaaaaattctttgctgataacaggaaaaaaccgttgattgttcgcaacgaaaaaggcacggaatttattgacatcgaaatgcaaaaaataattctaaaaattaatttaaaattgaaaataatttaaaatatttgaaaattaaatcactttcaaattgtcgagtccgaagcgttcaatcagaaggaaacggtcgatcagtggaatttcaacacaattgatcagatgcaattcgcaacgcgacttcaacgcggccacctcaaaacagagcaattagtgtccctaataattagcctaatgaatttaaaaatgagtaaaaagtaattttttattgaaaaataagggtgaactctctttgataaaggatattcaaatttaagtatcattttttgaaaacggaataaaattttatgtaatgtctaatattccat

SEQ ID NO: 4200 - DNA, 2204 bp, Heterodera glycines
  unsure (1)..(2204): unsure at all n locations
acacgcacgtccaaaancctatcaaaaaataaagtagtgtaagcattgttatatgctggcgtaaaacctatcggtgggagaaagaaatgcttacatatcggtggttattgttcaattgaaaaatacccttttgccgctgacgccggagatggtcttagcgattttgcactgcagctgaatgtttttaagctcagcactcgtgttgcggagttccaggtttttgagttgtgcttcagcaatttgcttccgaatgtcccagagtttggccttttttgagcgaaggctgttctcgagctgctcatcagtcatgtcaggttctgctgacgcagaacctgttccgtacaagcccttccggattgcggcgtattcgtacgggtgggctttgcgacgacaaatccaacgccggcgcaattcagatggacagatgttgctgtatctccctaggccttaagaaaatgcaatccttagcattttctttaattttattactctgaatttcttctgaacagtcgacaaacgtctgttcggtgatttcaatttccaagtcgtccagcgctgacgcagaaatcgtttcatctggtcgaattcccgccgcttccagtgctgacgcaagccctggcggcggcggattttcctttgcgcgtgaaatggtcttcttaatgtcggcaacccatttattaatcacgcggaaataggcatccaacccaggaagaaccattgtagcaagaatattaagaatcagcaaaaattgagtgaaggagaagctgaaacgggaagaaaacaaaaaattaaatttaaaataagctaaattaatgtggtggagagcaaaatataaaaaattgttatacacacaacaaactgctatgggcatggactgaatgccaaaggagcggcggtatgaaaaaatagtaaagtgttcgggagcttacttgtggagaccccagaatttttttggtgagaccagaattttattttataaaatatttaccaaaagaatgagcacatttttgtgtttgtttgagtggaaaatccggtatatgaaggttctgtttttgtgtgtaagaaaaaatttgttgttttgctgtttatcattattttttttctaaattttgtttttgttaattgatttgattttgatcttaaagcttttgttttgcttatgtaaacgataatggagaattgtttggttaaaaaaatgcattagaatttgtttgaatgaaaaaggtttgttacttaaaaaagttttttgtacttttccttgcttataatatgaaaagaatctgatttggtttttgatatttgttttgaataaaaagcatgttatgatagtaataaaaaatgaaagaaaaagcctttgatggatagaaaaagcaatataaatgctacatcttatgttttgcctgtgttcgagtggaatatttatatgcaattgggatattgacgtgacacttgcggatcaaatttaggtggaaagttttaaacaggtcagttttaatttgaatttatggggtgggggcaataattatacaccatagtgttttgatttatgggttatatttcaatttctggattccttttaaatagttctgtattccgttgctgaggttgagtcccagtgattgaaacgcaggagaattgagtcccagtgattgaaatgcagaagaattgagtcccagtgattgaaatgctggtggattgagtcccgttgatcggaatgttggtggattgagtcccgttgatcggaatgttggtggattgagtccctgcgattgaaatgcttgagggtcgagtcccagtgattgaaacgcaggagaattgagtcccagtgattgaaatgcagaagaattgagtcccagtgattgaaatgctggtggattgagtcccgttgatcggaatgttggtggattgagtcccgttgatcggaatgttggtggattgagtccctgcgattgaaatgcttgagggtcgagtcccagtgattgaaacgcaggagaattgagtcccagtgattgaaatgcagaagaattgagtcccagtgattgaaatgctggtggattgagtcccgttgatcggaatgttggtggattgagtcccgttgatcggaatgttggtggattgagtccctgcgattgaaatgcttgagggtcgagtcccagttatgaaacgcaggagaattgagtccccagtgattaaatgcaggagaa

SEQ ID NO: 4201 - DNA, 2559 bp, Heterodera glycines
ttagtcgcacaacagtggtcactcgctgcaccccattttgttaactcatcccagcgtagcgagtgaccaccattcactgtgtgaccgaccatctgcgtctctgccccgcgagagagtgagttcactgcagcgtctctgcaaagacattgcgctgccctcgtacagacaaaagaagggagcgtggggtcaatgctgattggtcagcattaattgcgcaaggggcggagtcaacgctgattggttaaacactcatcattagggatttgacaaatatttaattaaatattttttgcttatatgcattgaacaaaggaactgaaaaacgactttctgtgttgaaatttttcatttgaatatcagtattggcaaacaacaaatattttctggggtttatggaaaaaaacatttatttcaatattttgaaaattcctattagcatttttggatttgtccatgtaaaatttacaaattctttaacaaaaatgcaattaaattgattttctctctaaatcgagaatgaggaaatttgtaaaaaaacattttatgaaaatgccaaaatcagtttcatcaaagcccggccaatgctcggacagataaagcgcacaaaaattctttgctgataacaggcaaaaactgttcatggttggcattgaaaaaggcacgcaatttatcaacatccaaatgcaaaaaatatttctaaaaattgggaaaacaattaaaatatttgaaaaattaaatcactttcaaattgtcgagtccaaagcgttcaatcagaaggaaacggtcgatcagtgggatttccacgcaattgatcagatgcaattcgcaacgcgacttcaacgcggcaacctcaaaacagagcacttttttcgacatttttgttcacaaaattttacaggctaaagcgagaaaatttagacatcaaatgaggatttgttgataagtgtcaaggcacccacctggaagtagtcggccaatttgagaagcatcagtacatttttggcttaaaattgggaattcattttaaaaaattaaaaatcatattttcaacccataaaaagggtagatttaattttccagaggatatagtagaataaatacgatagcatagaattacggttgggcagaaaaggtccgctcattgtcagataattgatggcctccaaaaactccatgaattggtccatgtccacgcccaattcgtccaaagtgatcattcgctgctgcttctccttcatctccacgctgagcatgcgactgatcaccggggaaacggacatcagccaatgggcggacacagcgatctgatcagaatggattatgagtgatctgtccaagaattatcagtgatctgatcaagaattctcaatgatttaatctcttttcaagaactaaacaataccggactcagcgatttgccaagtttatcagaatttaaaaaaattttggactctccattgtgctctctttctgctgtttcacctgtttgtcgccaattttcactgtcaattggtcgtgatcagttgagctgttggaaggtgcagagaagagactaacggaataaatatttagtgatcggaggagcaataatcaactccgaacgggactagcagtcgtcgatcacaattaagagttccaaaatatcacaaaaatcagatctcagactttcatatttatttgtgatttatcatttcgatcgaataaaacctaaggggttttgttaattgtgatcggacaagacaattcagacgacagagataaacgatagaatacgaaccgaaattttttaactatttagataaaattttaacactttacgtttcattggactttttctcccgctttttgtgaattcggacaacaaatgatgaagcattggtatagatgccgcaattatgttcactgcccttgttgagtgtaagggtctaaaataatatttgttaatcatgtttttttaagtttgatcatttctttaatacttcattgatttgttgtgccccatttttgtcccaatcccaacggacaatttgtgccaatggctcagaattcggcttggaagcattgccaatgtccttgattttcaatatgggaaaatagcttgtcacaaattcactaaaaataagtacatatgtgatttacatagaaaaaagcatgttagctaattacattttaaatattctttttataatttaatttcaaaaaatagaattacagtgcagcaaattgggtcacatcacgaaatgaacagttgcagccgccacactttggggcagagatttcattgatcgctttttcgtcaacaacaataaattcgtcaaagacttccattgattatgtgcttttaattaaaaaaaaatattttattaaaaaactttgacaataaaaaacaaaacaaattttcaaagaaaaagttttaataattaaaaatgtggaaaacattttaaaaagatgcaaatgcaattccatgatcaatatttttaaggtcagaaaaatcgttgtttattcaaatgatttgtttacatgtgaaaagaataaaagacatgaaggaaaatagaaaaa

SEQ ID NO: 4202 - DNA, 1425 bp, Heterodera glycines
  unsure (1)..(1425): unsure at all n locations
cctgcannggtccttcccaanncatgatctgtttggtaataccatcatccttctccaccccgtgtctcagaattgtctgcgatggtataaatcccccctcgaagtaactcgtgacctaaaataagggcataattctccacttgagacctgctagtccacgccccctacttaccactactcggctatcaaatttgcgtccagtcaatgcggcctgagctttctggcattcttctttagattggaattcaacgaataccttaagacaaacaaatatgacaaataaaccaattatcctacttttccaacaccacgctcgtcgtacccaggcctcgggatttccatgctcacaacatttccgaatttgttgcattcaacgcgaatgtcttccgttatgtctaaaaaatagcaagcagtgtgtttttcatccaatgagcaaaattaccttcgtaaacttcgtcctgttgcaattcctcctcagttaccatattcatcagacaaagcacttccgttgggggtccggctcctctggacaagtcaatccccgcgatttgaaccgcagtgctcggatgggtgaccgattgacgtgctccagcagcggctaactgaaccaatagacgactgtcgccgagttgcattccattcagaccaacaactgccttaaaagatttttgcaaaaaagaagtgaaaattgggccgacttggtcagtgagcgactgatccaaatattcgcaaaaggcgtaaccctttgacattccggtggtcgtgtccatcaccaaattgaaggccttcagctgtccaaacgcactcagcagctctttgacttgttccgagttcaaatggttagggagtcccccaatgtataatttgaaaggactgtccacaacaatgttagagactaaaaacggttgacaaatgctttcgttttggccaaaagcaaacctggcattctgccaagcagttcgtaattagtggttggagccacatagtcgcgaggtcgtcgtattttcaattgctgacccataaaatttataccgtcaaatgccatcccagcagttgtctcgtcaatagaacggaattcaatgaacgcgaagtttttgtccaaatttatctgacacgcaatgaccggatttcctggagcctgtgccaaaccacacaaatgcatctgaaacaaattgtctatcacactccaggaatgaattttttcgaattttagcttctctttttcggtacttttattgtttaagggttgtttttcacatgcaccatgtcaaaatgctcacctatttatgggtatcagggcagggacgatcagggggtggggagagcttaccacatcaaagggagtaaaaaatttcttaatcgaaaaataacagacaattagttatttttccagcgggcaccacacaagcctctaaaacacgataa

SEQ ID NO: 4203 - DNA, 4475 bp, Heterodera glycines
  unsure (1)..(4475): unsure at all n locations
cctgcannggtcacaattagtnntatttttccagcgggcaccacacaagcctcttaaacacgataagaccattgcgctaagggagggaggggctttggtaccccctccctttggacagcaccgaatcccatccgttaaaaagtccatggttgacctgttggttaaaaaagtccagcattgcgtcttcatttgaaccgaatggaatgttcccgacgtaaagccgtcgcgcctgacaagtgaccgaagggcccaccaccggaacagacgattggagggtggcccgagggatggcgccggtagctaaaataaaagtggtgaattcaagaaagtgggaatgctattctgcgtttgttgcgaggtgattgtgctcggtcaccctataagctattgggttgggatgaatccaaaaatgcagcaggacaccgttttcccctaaaacctaaaagactttcatatcgattaacatttggcggagtatcttaaatctgaaaaacgacgagacgaccaaattgagtgctaaaagttaaaattccgccaaaatgcttcggaaagcaccgtacagaagacctaaatgctaaaaaatccatcgattcagcacccttgcgcaattctaatggacgaccactactgaaattcaggaaattccagtgaggagccaaagggaaggtgggcccaccttggagttctttgtactccttcgggctcatgtgttcgtagccagcgggtggcacatcccaatatttgttgctcttcactttcgacctcttttcgcccctttccttttctcggcttcgctctctctcgcggtggcgttccttcgaccgcgagcgacttcgtcggcgttcgcgtcttaatgagattcaggaagcaaatcacatgaattggacaatgccagccccttgaaaagtgactaacgatcgtttgcgttcccgcgacttcgaccggcttcggtctcgcgaagtccgcttgctcttcttcttgcgctccctctctctgtcgcttttcctctcgcgctctctctccgcctttggctccgtttcgccatcttccgtttggcgaccaatcgcttcattgagttcggcttttatttcccgtttaatgtccatcagaccaattttttcatcttcgtcctctctcactcgttccatattcgcttgatgagtgttttcgtcgtccattcaaacaaaaatactcaatgttaaacagaaatacggaaaatgtgtaagttagataagtaagccaaaatatgaataatcaataaataaaagaattcgttgtgaaaataaataaattatcatttattggttagaatactgtatgttatgcatgtgaaaatacaaagttatttgccaaagaaagggagaataaataagaaattccttctgataaaaaaaggtgtcaattaaaacgctgaacaagaaaattgttgccatcacaatgaaatccaaatttctcatagaacggaaccaattgttctttgcattccaacgaaagtttgtaaacaccaaaattacgagccaaagaaacctagaaaagaataaagaattattttttgggtttttttgacccgaagagcaaaaaaaggtcttatcaggcaaaaaatggggtcgatcgtaatggaaatgggttctgacccccccccccccccccatggggggggggtcaaagttgatcgtaagacctcttggctgagcccccccccccttgcacaggtatgcctaaaaggaagagacaatgcaaattaaggtcattttctgaattttaatttccgtgaaaaaattctaaatctggcttttgccacttaggataaaaaggtgtcattaattttccaattaacttttattataaccaaccttgtttatgtgcaaaatatttaaaattgattttatatttttttcctttatttcaggcggagaataatgggctctagttcagtataaccaattttttcattgaaaatttgtttggtttcagaaaaattagatccaaaaaaatacttttttgaccataattttttgaatcattagttaatttgttcaacaatcgtaggctaatagagaactctcggtgctaccaaatgataccaagaatgtttaattggattatttattcataacactcctacgtgtatatgacttataattctgagatttcaaattttaggaataaattgattggatgcacaaaagttataccgaatttttcttgtgaaaaaagcaagcgctcataaattatatttttctcttcgtttaatcgcacttgattgcttctgacagtttttgaatagctttgagggacctatgaccgatttaaaaaggggaaatttttgggattatccatgaaaacatggaagaactgcctgaaaaggtcgccgctcagggaagggataaacaatcgtaaaaacccaatcattcctttccataaaaagggaatggtaacaaaaaaaaagaacaaatcaaccaacatcaattggtaaatccaacaaccattaccttgttaaattatgaatcacttaccaaatattcgttgagaatgtggccaaagtgttttcctctctcttcactgtccaccacaacatcttcaatacgtcctcgggctccacaactgtggatgaatttccactccaacaccaaagtcgcagtggccacaattttcttagtactaaaaaataaattcaagcattacaattttttattatttccattcggttacctttccttttcgataacataaatatggtaagcccgtggtttttgttcgtttaattggttgaatcgttctttaaactgttcaacgcttaacggtttaacctgcaaaatgcaatttgttaatcttttaataaaacattttaacgtacaattgggggaacttacagaagtcagttgttccagaagctcaatgaaaccaaaattgacgtcattcaacgacagaggacggagaacgtaatcagaaggaagttgggggagcacaacggaattgggggaattgtgaacggaagaagtcattaagagaattaggtatttaatccttcaaagaacgcacttaaagtcaaatgaatattcggtaatagtcccgatggtatggccacctttttggaaaatagagtaaaattgtttaaggggttttcgattccgacatccatttcgacctaattttaaccccgaacctggattcgaacaaaaagtcgaaagtcaatcttcaaaatcggcttaaacgcatgaaataaaatttgacaataatcatttggatggatagaattgaaacatgcaaccaaaaattattttttaaaaaataattatattattaatcacgatcgccgagacgctattttgaaaaaagggcataaatttttctcccgatatttagtattttttttcctgaaaagtttcaaccgaattacaatacaaataacatttttgagtaattgtttttcgtcaatagattatgatcccattcctataataaatttaatgtgtaagcaaatgcaatgctctttaacttttgttagcttgcacaaaatccatttattaatcaatactatgaatgcgttaatttaaaaggacgaacctttcaatgggaaaaataatttttttgttcaataattaaaaaataaaggcgaagattcagtataaattttttgctaatatttgcgctagaaatttccggaaacgaggaacggtaataaagaaaaggcgggagtgaatggaaaatctcgccaaaataagtgaacaattacagtgacccaaaaaagtcatgcctcaaagaggcaaaaattgggaatattaaattttatcgctgaaagatcaaagaacccaaaaatgagtgcaaaaaaagtcttgcctcaaacctgaaaaaccatcttatacactcacggtcaaacgcaaaagtattgcaccaaaaaaatttttttttcgcaaaaattcgattttctcaaaaaggaatggggtgaaaaagattttatttatgccaaaggaacgttaattaatgcactaatgaatacccaaaaactgtcccgattagtttctttgccgtcgagaaaatcggtcatgactcatgactcaaccaaccccttttttggtggtatgtagttcatttaaaaacctgaaataattcatgcttgtttatcttttgatgctgatcaaaatacgccggtgataagggttgatggtaaaaattattttccgactttttttgaattcaggtcgagggttaggaattgggcaaaatggatgccggattcgtgctcaatgaccccgaaaagctattaaaaggcacttttcgcagaaaaaaaacgccccggattgcggtcgcgctccaccccttgtacctaaattttgtttttctctattaatagagacaatgaaataccgtttttacggtttagaaccctccctattgaggggtgttggaaaatagaaccaccgggggttctaaaacggtaaatatggtaatacgccaaaaagaggttgtttttt

SEQ ID NO: 4204 - DNA, 1275 bp, Heterodera glycines
atttgataaactctattaacctacaaaattgaaatttccataaaatgcggggccaaaaatattgagtttttcgggccataactttttgaaacataatgaaatttttgaaatttggcttaataataaaaaatacatagaactattgaacgacaccaagtttccatgggatggcaaaaaaatttatataaattaccattggattaaaaatattttctggatttatataatctcaagcccgcgcctttcttaattagttcattaataatgatgaattcaattattcactttattcgccccgcctcactttattaaataattaattagttcataattaactcaattaatttatctttgtttgacccgcctctattaataaattgtttattaaatagctttaataattacttaacttattctcttgattcgacccacttcaattaattaattaattttggtttattctctttatttgcccgactctcttaattgattcattaattatttagtaattaactcaattcattctctttatcccttcttcctcttccatagattgtctgggattaattagattcattttatacattttgaacatcgctttaattgcatccgtcaaaatcccccgagggatgtttaatggaaaaatgaaatgatactctttttgctacggcaaaaagttgcattttccatccgtaaactatcaatcggtcgggggaatggcattatggattaattaaatttttaattgattcctaaaatgtctccggacatttttttattgcgttttttaagccctcgaggggctgtcctatttttagttttttttttaaatcaaggtcaccgccataagcttggaaacttgttttctgaaaatgcatatttttaccattaagaaaatcggcattttttttcaaaattttaaattttttattttccgtttttgtataaattataaagttgtgattttctcggatttatatggatattcgcaccattttgaattgtaaaattgagactttttcctaactaaattgttaataaatttcatcaaaaaccaaaagaaaaaaactaaaatttttaatccctccacgggtcgagagccatgaaattcgttaatttttacaataatttgattaatagactgttgtttgttgttcgatgaaattcgacagggcttcttaccattaaattttcttcatttaaaaaaaaatcaaagtttgaaattttcccgaggctctcccctccctctaaaattcgacgattttttaaaaatta

SEQ ID NO: 4205 - DNA, 9021 bp, Heterodera glycines
agtttgaaattttcccgaggctctcccctccctctactcccacaagattttttaaaaattaaatgtttaaaatgtcccccttgaatttgtcaaaagttgtcttcatttctcccccaaatttgtcctcccccattttccaattgccccccataaatcctcccaaatgccttcccaataggtcggtcgtccatcgctttttgtcctttctctcttccgcctcacttgtgcccaaaatcggcgtccatttgggcaccagtgaggcggaagagagaaaggacaaaaagcgttggaggcccgccccccagccttggtctgcgcattttgtcacccctttcgtcctccgaggggagaagcggaggaaatgacagcgattaacgacgaaaatggggggagggggaagaccttggggggagggacaaatggaggaggtaatgagtataagtcaaaatgttgtacatgagcactttttgtgccaatgttgcacagctatgtgatgggtcggggggggggaccgttacaaaaaaggcaatcgatggcatcagcgaaatgccgaaatttttgggttttttcaatcgattatatcagcgaaagtgccgaaaattttgtgtttaatcgatgacacctatgaaaatgtccaaaaatttgtgtttaatcgacggtaccaccgaaaatgccggaaattttgtgtttaatcgatgacaccagcaaaaatgccgaaaattttgtttttttattcattgatgccgaaatattcaatcgatggaatcaaaagataaaaatgaacggatatatatgaaattttttaacaggtggcaacccagatttaaatctccaaaataaatgtaaaaactttctaaaaaatgccaagttatgctaatcccattaatgccccgaaatctcaaaatgccaattcttaagttatctaaaatttgttataaatgccaataattggcttcccaataatccgagcgagtgccaatcataaaatgctaagttttgccgataatttcaaaaaaaaaaaatccgggactgacttggtccgtctgcaaactgcccacaaattggggccggtccagcatcagcggattgcctcgctgggtgcgcaacagtgagcggtcagacgtctccaccggctcggacacattccggcgaaagatcagcgcgtccgttcccgcaaaatcggccactaaaattttttttttttggattttgtgcaaaatttaattgcccgagggcgcgcgggaaaagaaaattgagccaatttaacggggggaggagagaaatttgggacaaaatgatgaaagggaaatcatcacaacatcgtacctgtcattaatttgaatttggtccgtttaatttgggagaaaacgaaaaaaattacggtgcaaattaatggggcaaaaaatacggtagggcatcgaaattgtggagcaaagtacagaaacaaatttgtcgggaataaataatttgactaaacttgttaatctcccgagtcttgttggacttatttaatgcaccaaaaaattttttagatttaaatatgctaattaggcgttaaacatggatctgacggactcgaaaaaatcaaattatgtctcgaatccgagactatttaaattaaatacccaaaaattttggccgaaattcttgaccacaaattcaagcaattcaataatataaaacgagattctgtgtatgaaaattgtttttagcactcttttggcctaataaaataaacaaatccgagcttttgtgcccgtaatcgagactctcgacaaaacttatcttcttagtctcattctctctccctatccctcgttatctcttcccctcgctctcttctctctctctcacactctcttctctctctttctctcttttaccggtggccgtgaagagcaggtcgccttgggccatcaaatatgtgccgttctgcgccggatcaaatggtgccaatccgacggcgccgaactcgctgagtgtgtcgccgccgggcgacagcaggcggcactttggcgcgaaagcgttagtgccgcagatcagcagacgaccgcccgacagacggctgagtacgcgcacaaaattccggcacaaatccttaatggatgatgatgatttttgatcgatcagcagtttttaaagtgatcagtcaggaagcctgtaatccgaaaaaatttcggatgaggaaaaccgacgcttttttttccctaaatttttttttgaagtgtaattttttctaaattataggcgcagaattagcgaacagatagtatttgtaacatatttttgtccctaaaatgccaattttgagcatttttgtgtgaaattttaaaaaaacttaaagaaaatttggtcaggcaccatcgaggaaaattttttgcaaatttttaacgaaatttataaagaaaattgtttaaaaaattcatttcgaaatatgattagcatcaggcaatgctcgggagtgatgaaaaagcccgatcacatgccctgatcagtcacttttctgatcagtttcttttggagagtctgctgatcaccgctttttttgttacctggtccatggatttcattgtgcattctttgtgctccgcctcctccggtgcccatcgatagatgccaacccgttcaaatgtttgcagggaaatgttgtgcaccgcgtcactgaattggggaatcggatcagtttcaaatttgattttggacgggatttgatcagtatttaattaacgattttggagccattcagcactgatcagaaacgaaatcactgttagaccccaagtgatcgagacttagaccaggttcctcgatcgatttgttcaccagaaccattgatcagaacctcatcaatcaggattttaccgggcttttccaatcatatcagaatttttgttttgattgagtagaatgagattgatcaggactggactctgggccagggttgccgcgggccgaaaaaagtctggatatggattcaggcccggattttgaaattttcgggccaggattcggggcaagaaaaatgccttgactcgagcgctaacactgatctggcatatatatttttaatcaaaaactgattgggacccaaattgatcggacaattttttttgcccttccgggaacataaaaaagcgaactcacgctgcgccgatcagcaaatggttgccgtccagctccaacaggcggaagtactgcttggagtcgtcgtcatggttggcactcgcatttaacagcggcgggtaatgatgaagcagaccgagttccaatgctaaaaggcaacaaaattggtcaaaagccgttatacatatttatttgcgtttttggtaaaatgccaatattctcaaccctggcaaaacaatgaaaaaaactggcaaaatttgtcaaaaatccctgcaaataccggacaaaaaacccaagcccagagggtcctcaaaacccggcaaatgccatgttttacaagcaaaacagaactctgaactcatggttcgagtttaaaatgccgcgcccatttttatttcgaatcgctttccaatgccaccgaaggaaccgaattttttttgtttttgccattttaaatgggcgcattagctattagaacgttttttcaaatgtgaaatattttaaattttccaattcatcttccaaattcccctgtcgacggaatgccaaatttttcgcgccttaaattttgttttttttccattttcaaaattcgttccaatccatcaattcattcatctttctccaaatctctcttcccattttcctcacttccagcacataaacacctcaaaagagaagaagagagttgttaaaaagtcgccgaaatgtctttccgcgccgcgagtcggcacagaaagagaagtgcgttttcgcttcgggggacagaccttgaccggagcggagaggacgggacggggggccccggagggcggtgaggggacaaagtgtcccctcgggggcacactaaacgaacgaacgaacgaacgcaccccgtccccgtggtacaaaagtaacaacaacaaacaaggaacaacatgcacttgccactgtcctcctccgtcccgtcgcccgcgcgagcgtgagccgcgcggagcgcccacttaattaattgcccatttttggcggcgctgttcaacaaatcccatctcccgcgcggtaagtcggtcgggagagggagagagataaatgtttgtggtgggtgtccttttggaggacgcggatctgctggtatgtccttacaattagcaaagtccgtccccccccccccccctccggggaaatgccgggatgggcgaggggggaaagggggacaaatgaccccagtcccattcattagcagaggatgaaaaagggtgggatgagtcatgtccattatagactactaaaagcgatggcatcttgaggaattaggtgcgctgcaatttttgggcgaggaaaggttatttgaggtaaattttcccattgtatgtgtgcctagttgtgacctcggactttttttgtgtttagggaattattctttctttttttgcgcgagtgggggtaattagctaaatagtgagtgtttcgagacttaattggctcgagaatgggaaaattttgttgaaaattcgggtggattaacaataaacacattcaaaaaatcagtttttcatgtgatcaccaaaaagtggctgaagtagaggtttttatggacagcaaatccatccatttcttgtggcatttcgattccgttctcaagactctcgagtagaaccgtcgtaaaaaaaggaaaatgggacactttttcagcggggatttatctttttttatacggtccctcttccggataagcctcttttttttagattttttgaaaatttgtcaacaaattttatggttcagtgacgttccacgggtacaaaaaaaaacatgtttttgttgacccatgaataaatatatacacaacacaaataaacgcttcttgaagaggcgcggaaaagcgaaagtgaaacgcgcggcgcccgtttatgttaattgtcccctgcggggccaatttggcggtgattggggcggaaaaggaaaagaagaagcaatggaggagagaagagagagacaaatggggaagcaagagagtgatcagagacgggggggggagagaatgagggtgagagagcgagagaaagaaagaaagaaatgatcaaggaaaatgatccagaaaaataatgaaatttaatcggaaataaaaggtaatcaagaagaatgagtttcaggtggtgatcagattcaaacagggaaatgtcagagagaaaataaatgattgaaaaaactgatcaggaataaaatgagcactaatcagattccgatccgagcgaaaaaaggtataaaacttaatcaaaaatttggtaatggcaatcggcaaaatggctgaaatttaatgggcatttttgggaaaattggcaaaatttgccactgaaaatacacttaccagcaaccgcgtccggatgatccatgtcgcggagattgaatgcccggggctccttggtcggctgatcagacggccacatttgtgccgtcgttgtcgaacggcacagtgccaaaagggcggcggacaaaaaaataattgaaaaacaaaaacagcggcgaaataaaggtgatgatgatggcattggaattgttggattgatcattgatcaacagcagatgacagtaatttgcagaattatggagtagcagaagagaatgatgacggttgagtcattattgttgtttggcattttgccaagaaattagtgctaaatttaaacagatttagcattttcggattgattaaaatgatagtcgattgattaaaattgttaaaatcaagtcaatccggcttaaatttggtcaccaattttggttttgatgccgccgccgtttgatgtaaatttggcatcccaaatgaattctggcactttctttttggcattttgccattgctttttgccatttttgcggtttcagcaaatgaatgaatgagttagtgaatgaatgaaaatgaaaaatgaatgaatggggggaattggacgacgaatgaatgactttcggtggtggcgggggggcggtcgtgggagagattgggggtgggggggcacaaaaacggacgaacggacggacgggggcacaaattggatggaattgtcagcgccatttcggttgacgatttttaaggggacattcagcggacactaggggggggggggtgaagggggactacacaaacaccatatgtgaatggggaggggcatttttgggggggattaacgggaaattttccttacaaattagagttttgtgggaatttttggaataattttgtgacagttttagccattctcgggcaatttcaagaatttcttggagatggggaaaccttatttgttgtgggagacatttttgagagttagtggagcttttgtggttattttttaaaaattgggcggcagcttaagcaatttttgtttgaaaatttggagaatattaaaagagtgggacccgaaattacgttgagacacggcatcgggacgaagcagggatctgttacgagtagtgactcaagattgggactaaggatttggggaaaaacttgcgggattagaaaaaatgaaaaatcccaagactttcacgagtattgactctcgattgggaccaggatttcgggaaaaagcggtcaggggattgtcgtgatcaggaaaaccgaggaatccgatcctctgatctcacaataagcccgacatttctctgttttcggggcgacctgaagcccttgggtcaatacaatcgaaaaatttcatggtatatttgagttttcaggaatttatgaaagttttgcgcgtttttcgggaggttagagtttaatggatcgaatggaaaatgaattttttggagggaggcaaagagtggggaaaaaatcggcgccaaggcggagacaatccgtcccacacgccaaaaaattgttgtgctgcagttactgctgaacaaatacaaaaattcggattatttggagcatcgcccccccccccccccctcccccgccccacttaagccgcttaattaaggggcaacgaaaaaatgggggaaaaattattcaacaattgcgccacttttgccgacggcaaacgatcagaaaaaaaacaattaaaattgcctcagggcacactaatgagtgattgagtgatcagagagcatcaacaagagcaaacagttcatcatcatcattggtgcagattgttaatagtgcagcaataattgtttattaatgaacaaaggggggcactcactcattcactcactaattagtcgccggaggcaatttgttgccggactttaattgcctgaagcaaaatggtggtgtttaggatcttcacaattttttttcatttcagttaaaagtgctcaatcagcagctcacaaatcagcagagaattgtgcaaaaatatgcagattatctataatgagagattattgaatttgtgggagtgagtcataagcaattaatggccgggttccgaaaaatccagggggacaggatcgagaaaactcgagactcggagtcgcgaaattaccgaccatcattcacaaatagcaggagatatggcggaaaattatggacagacaaatggtctaattgtggtgccaaaaaggttggttgcttccttggcattttgtctcctcgactaatttaaaattaaataaatgtatcttttttttattaataattattgaatatacgcttcattgtcattttcaaatagagaaataatgcatttaaaaaaataaaatattttttcgccggagttcttaaaaaggaggaaaaaatacgcaagagtaaatatccccaaatttaatcgttaaaatgattaaatttctcaaagtgattattgttgtgccaattattaaaaatttaataaaaaaaattccagtatatttttaaatttttaaatatttttataaaccaaggggcaaccgcttttgcacttttatttgttgttgctcggtgctaattacttataccatcactcatatttatttatgtgtaatttagtctcatatgtcaaaagttgttgtgtgatgaagaaagaaattggtacgtaaaaaacgctcaaattgcctcgggggagaaaaaaattattattaataaaaataataattttttgcctccctttttttggggggcgggggacggcgatggaaagcgaagaagtgcatcatcatcaccagcatcatcagcagagatcatcacccatttgggtaacacacacacacctttttttttgggggggggggcggagaggttgcgcaaagtaagcacaacagagcaattagccgccggccgccgccgtccgtcgcccccggggggcgggcgatgacgccgaagcgaactcactcactaagtcactgatcggagacggacggacggaggaggcaaatgacgcggaaccggatccatttcaggaggaagggagcggaggagcgccgggagggcggcggggggagtgaacgacgacgacgacgcgacgaataaatggaaatggatgcatcgacacatcccccgaggggggaggggggttgtggcccagagttgggttacgcgctcccgcactccagctgccggaacctggcttttccgaatggtccaaaacaccgaaacgcaacccgtagatctgcgtggaattctctgctctcgacccagaaaattcccgagttttaaatttccaactatcgtttagccggtattaagcaattaaaaaattaaatttgatattgactttggttgaattgctcaggcaagctttcgcgtgatccaaatttgcctgaagcaaaaaatgggttttgccggaggcatttgcattggctttaaataccggtggaaaattttttgttggtgggccaagtaggttttttctgtttaagcactaaacaaacactttggctatgaggagaagcatggtttggttccgcgcaggcacaacaatacctaaggcatcggaaatgttt

SEQ ID NO: 4206 - DNA, 1187 bp, Heterodera glycines
tttgttgggctcaatgaaaataaattagaagcaatgcaattttaagagcataaccgtaaaagtcacaattttatttaaaccgtttgtttttcttttcttcagaaaatttctccattaaggtattcctcctcaaatgtgccccagtttctgaaggaatatgagtataagctatatttttaccgttcaactgtcgtcaaaatattattttaaaaattatcattttattactttaccaatccataaaactactacttttttatcacttcacagtgttctaggcgtaataaaaatatattttttagctgaatttattttgcatacataatatatttcatttaatttatcgttatttttctttgtaaaccaacgctgataaaataattattatttaagcctcatctttgttgggctcaatgaaaataaattagaagcaatgcaattttaagagcataaccgtaaaagtcacaattttatttaaaccgtttgtttttcttttcttccgaaaatttctccattaaggtattcctcctcaaatgtgccccagtttctgaaggaatatgagtataagctatatttttaccgttcaactgtcgtcaaaatattattttaaaaattatcattttattactttatcaatccataaaactactacttttttatcacttcacagtgttcttggcgtaataaaaatatattttttagctgaatttattttgcatacataatatatttcatttaatttatcgttatttttctttgtaaagccaacgctgataaaataattattatttaagcctcatctttgttgggctcaatgaaaataaattagaagcaatgcaattttaagagcataaccgtaaaagtcacaattttatttaaaccgtttgtttttcttttcttcagaaaatttctccattaaggtattccagtagtatatgaccccgaaagcgagcgggttggttgcgggtgtttcccgcacgagcccgtgcctatgggaggggcgcaaccctttgaagttgccgccccatcaaaacccaggaggggaggggggtgtgttccaaaccaaacctaatgtactccctatgaagttgccgcccgtggacatttaccgccaagaaccaaagcctatgggaggggtgaagtcttttgatgttgccgccttgtggattttaatttaccctaaatcc

SEQ ID NO: 4207 - DNA, 2145 bp, Heterodera glycines
  unsure (1)..(2145): unsure at all n locations
tgcttttacccctgcttgaaatttaaaccgcaaaatattttcactgggtaaaatgcacgacgattttttcgaaactcgttctttgcaatttcacgtccgaatttaaaggtcgaaacaatattttcaaccgtgtgtccggtgtaagaagcccccggacaccccgagcccttaattatttctataaaatttttaatagcattttcacagtctatcagacttttcgtccccagacatatcattttcccggattcccataataatgccgtggctttgatggggcttatacatttgataaccgcggcattgaattttctagggttatacttaaattcgcattcggtgatcgtcagagagtttagtttaattccggtaccgagattagcgagagcaattatatttacgattatcgggttttgcattttgatacaatgtaccaatcaaattgtcctttcactccctttatataccccttctataaatagcaaccaaaaaaaataaaattaaattgaaaaaatgaactgtccacataaaattaagtgttgtcattactgcccctgtcattacgagttgtgtaacagatgtaaaaaacacagtcttttgcatttcggtacatcattttttgataatttctggctatgccccaaatgcgcgaaacatgttccctatgaaaatataaataggtcaaataaataagatgcattaaaaatcagtaaccgatctttgagaaattttgcaccgcgcggcgtttcatctttcttccctgcgagatacaacaaaacatctctataattactgttttcaatcggcaaattcatgttcgactgtacctttccggccgccgtaattttaaataaatctttgttttccttcacgtacctaaaaagaccgtttaaaagggtcgggtgtataatagttttgatcggaatgggtgtttttaatgtggatgttgtttggcgctccggagttaactcctcaagtgtatcattatatgattcaggatcaggagtttgctctttaagtcttttcctaggaataattattttccgtggttcttcggtctcctgtggtttggattggttcttgaggcccagatatggtgcaacatttggacctggtacatgattctcaatcactaccttctgtggtctatttttaagtatcccctttaccgtacgtctttctttatagagccaatcatgtctcttcgccttgaggtcctcgcttatgccggggtcttgtaaattctgagaaatttttgcgtctaaacttgctttttcattttggagataatcaccactattcatcgcactccgtagagccaaatattccgcctcgggaatcattaacattttctttgcaaatttcatgatgttattttttctaataaatgttgagctaaaacactcagtaccgggaccaagacagctcccagggctataccactcccctgttgtatcctttttcttgccgttttatctgaacgagatttggcaatttccctataaaaatcggcgtattgtgccaaccttcttttttgtttgttcgttagtttaaaactaaaactcaatatatttgcacaaatttcaacgattgccaaactaaattcctcatcagaatttgggtgcatgttaatcatgagatagctaaattgattattggtcgcatcatgatatgcatccatgaaataattcagtctttttgggaacagttgtgaccctagtgtcctcacttgtaattgtcctgaagggttgcgcattaaaaccagataatgggcgttcgctcttgccgttttaatgtcccgaccgtagagactctgggttacaaaaattacgcttacgttccaattatgggagcccctggtaaagagtagatcgaggaaagtattctgcatattaagcattaaatcgtcaagtattaagaaaagggggttttcctgttctttaatcttattcatgtccggaatcccgttaaaagtcttaacgccctccccgattaatcctaaaatactatcattcatctcaccataacaataaagaattttttcaggcgatggttcaattagattcaaaggatgttttaaaanccgtaatagccaacgggtcttatcacggccagtagcccccgagagaattagagtgaacggac

SEQ ID NO: 4208 - DNA, 2183 bp, Heterodera glycines
  unsure (1)..(2183): unsure at all n locations
tccgtcggcgcggaccccctctctttactgccgcggcttctcccccattccgtcgttcgggcggcgcggaccccctcatttctacggacccccctctctactgccgcggaaccctccccaccattctgtcgtccgtcggcgcggacccccctctctctccgttgtcgcggatctttccccaccattccgccgtccaggcggcgcggaccccgctcttcgacggacccctccccatcattccgccgtcccacaacgctgaccccctctcttccacggaccccctctttgcactgccgcgcgcgagttttgctgcgcaagtctcgggggtgcgctaggtggctgggcgtcgggaaagtaccgcttaaaatggtgtcagagataaaattctttcgtcgttcagcttagggggtggtggattgacggcccataaaatttgaagtcaatcggacaagtggtgcgcgagttttggtgcgcaagtcccggggtgcgcgagtgggcggggcgtcgggaatgtaatggtcaaaatggtgctagagatgaaattcttacgccgttcagcttagtgggtggcggattgactgcccgcaaaatttgaagtcaatcggacaaagggtgcgcgagttttgctgcgcgagtctcgggggtgcgcgagggggcggggcgtcgggaaaactccgctcaaaatggtgccagaggcgaaattctttcgccgttcagcttagggggtggtggaatgacggcctataaaatttgaagtcaatcggacaaggggtgcgcgagttttggtgcgcaagtcttggggtgcgcgagggggcggggcgtcgggaaaactccgcttaaaatggtgcctgaggcgaaattcttttgccgttcagcttatggggatagtggaatgaaggcctataaaatttgaagtgaatcggacaaagggtgcgcaagttttatccttttgaccttgtgctccgacgcggatttttttattttgaagaccccccccccccagcacccctccctcagctccgcactttgcaaaatatttttaataaaaatttataaccataataaaaaaatggaaaaacatacgacatttattttgatcggtcacttctcattgctgattctcggcatattggcgcaagatctcggcctcacgttcagcgcgttgacgaagcgcagcttcgatggcaggggcgcgtctgtgtccaaaaaagaaaacgaatctgaaaaatgtgatgaaattaaaaaaaactatgctaaattgaaaaaaaagcttacaattgttgggtcttcacgccaccaattcaagagcaaatcctcctccgcgtcttcaatttgtgcacgcaactcggtgtcttcatctggttgttgttgatgcggttgttgatctggttgaacattgtcgggttgttgaaagggacggtcagaattttcatttggaggcatttttgtaaaatgaaagatgaaaaaaaaaatgagtcgctttgagaatcctccgccagcatgactcattatcgatttggtcatactgaagagagagagagagttcactgtcagttttctctaatcttgcatcattttgttgcgaaaaatattggtggttgtcgagggatatttttcatctcatgcattactgtctctgcctcgctgggcgttaagtgaccgtgacttttaagccaccgaattaaaacgaaccaaaaaagcaaaaacacaggaaatgcaagaagataatgagaaaaaagtagtacatgtaaaagagtttcattaggctcttctggggaattcaaaatttgtatgtcaggttttgttgtgttggtgttattcattttaacattatataataatatttttcatttttatttatttatattttatccaagctttgagtcggtcacaatgtgccgattataatcaaccataatcatttggtcgaattcacccaagacaatcatctccacgccaccaagtggaattggtgaattgaatgttgctcgtacgtttgtcgtaccgcttctcaacagctcaaatccacagctgtcgtcaagcgttgaagtcaatggaatgacaaaaaaggtccatcctttcttgaactgngtcactgaaatgtcaaatgaacgttccgangtagccattccgagtgcctcatacatgtcaacaaaagcgctgacaaagtgatcatttgaaaa

SEQ ID NO: 4209 - DNA, 1743 bp, Heterodera glycines
  unsure (1)..(1743): unsure at all n locations
aaagctcctcggtttcccaaatcaatagtcgagaacgggtgatggattcgcgcattttctccacccttaaagatcttacaacgttcttcgaacccctcgtccgtcgagtcatctcggtttacggtgtaataataccccgttgaacaaagaaaatcgtttcttggcatttattggaaagctcaactcattggtgatatacgctttgaatgggtacagatttccgctatcgtacacttccgtgttgccaaccgtaacttttagttgctggacaaatgtttgccctattccttgaatggcagagacaccagtatccgtgtcctctatcgcaacccatttatcgtttgctcccggtttttcaattgacagttcgagataaaggtagatccgtgataaatctgtccacaaattgtcactgtacagtcgaaataggtaaggcgattcttgcgtgattgttgctagtggaagcacttgacgaaagaatgagcgaacaacggacacgttggtcggtggaactgagaaaatgttcaggccactgttaattgctaggggactgctgtcgctgattttttgtgggcaagtcatttttagtaagttcctagtgagtcaacacgtagacgcttatttttggttttaacaaccattggtggcccgattgacgattgaagtttatttatattttttcgcccaatttttccaattttgggagccgagtcttttttgtatcgcttaaaatcaaaaccttgacccttctgagtgtttatgttgttggccgctttttcaagaagattctttagtcccgacttactctcactaacgagcgactctttgaggtcttttccctccagcacattggtgagtactcgatttccgctttctattccttgacgtccaattgcggagccaatttgctttccaatcggcagcaagtatctcataaggcttcggaacactgcgccaactcccgctccacgctgatagggcaaccctcgataaatgttgtatccaccaaattgcacatactcggacgagaatgtggaccaatccacttgtagaggatcaaaatcaacatgcattttttaaaatttttccaactgtttttgcattatttatattcttttaaaattatggtttttacaaaattgtttacaagagcatctggttgcacctttccatagtgcaaaaagctgacaattttttcaaaggtcattccaacacatcgacagtacaaaaagaaaatgacatgacgcccacacgcacttgagttggcagactgaaggggaagagaattatattgaatttgtttgtagcgtgacaaatgattcacaataagaacactgggtggtggccacatccctaatgagtcataatactccaaacgcaaaggagaagcgcaataaatgcatacccaatgagagccacgcgaggtgctggggtcaagattcaccaccatacagtggggaaatttgacaattgctccggctggtatttggtctgccgcaaaacaaccaatatagtagtggcgagtcacgttgtttcttgccaatgttttgtcaatttccaacgtgttcatttttttaaaaataggacatttttctaaaatgtaaagttaatgtacaagttccgtattggaatggcatcaaacttccgatatttgtaaggatttcaatcagaatttcagaaacttcctttaaccaggtggggtgatattgtatggcaaaaaatnntgttattcaatccacttgg

SEQ ID NO: 4210 - DNA, 1999 bp, Heterodera glycines
tttttgttgatatgaatcattatcgtcagctgggatcctccccgctatattgctggtttccgcacgcttttcccgtgccagaaggccgtgggtcatgatgttgaggtcaaccactgtctcagtatctgtcaacagggcctgtaggagcagctcttcgtcacggacgccccgtttttctttggtctttcgcttaatgtactcttctctggtccaccgacgagccttgtttatcgtaagcatgaaagaattctgagttgagcgtaccttttttgccaacggatcgctgccctcacccaggagtctgtacaaatttttgccaagctcatgggggttggtgacatttgatgatggaagctcaatccgcaccgtatttcccgtttgccactcaacctgaacaaactgttgctccacggtgcctatggaaggccaagagtggggatacacaatcaccgccagacccacctcccattccgaattgaattgtagtttgcgcggtaaacgcactcggaaagaatttgtcctatttccttcaatattggtgttcgacggaacaacaacataaaaagaatttgaaggcatttttgttaaatttattaaatagtgcttttttatatatctttctcgctaattgaatttacgggaatccaactattaaagcgagcgctataccctttccatttcacaagtgcataatccacaccgttctgcctctttttcaccaaaatcttttcaatttcatacattttttgctgtttgtcttctagtgatttgcacaaatcatttgcgtaaaaccaaccactaataatttcattatggtcatcacgcaatcgataaacaactggcgaacgctcagagtgtacctctgccacagtgaagagctcattggtgaagcgtgggagatagcccttttggaacacgtgcttgtacttttcaatgcgcacgcgatctcccacacggtattttggctggcgtcgtacaacattttcagctgcatcatgtaatttttgtctcaacgcttctgcgtttttaaagttcacgtctgctgggcgcattccaatgctcgaatttggcgagtggttaattgcacgaacaatgtcttgcacaacatcaatccatttgtacgtgttacgctccgtaaagtagcgataaaggcgctctttgatgctacgattcgcacgttctgccattccggcatgaaattggggagaagtgagcatacaaaagtgttcaacgtcttttgtgcggaagaactgctgtactgcgcgggcagtgaattcctttccctgatctgttaacaccttccacgggatatattttgatcttttgaatatacgatcaaaggcaatgatcatgttagcgctcgtcttggtctttacgggctcgacaaacacctgtcgactaagggtatcaatacagactaacaagtacttgaagccatgattttgtttatcaagtcggtcaaaaatagccaaatcggcctgccattcagtatgcaagccgggtgccaatgttggcaatcggcggtagcgccgcttggcctggcgatgcagtgtgtatgtacgttggctggtcaaataattttggacatcgtttcgattgatttttggttgacttttccgcgcctctctcagcagcggttcaacgctcgtgaatgcgacaggcgaacttaggtccttgtacaaaaactcgagcaaacgaagctttttcaaatccataatgatggcttaaacttaagtggggtgtttttataaattcctttgccggattgaccttcgggaaataaatgcctactcaagagcggattctgccttgccctttcaacaaattctttgaatgccgttggctctttattttggccacgcttgtccttgttcaacaggtgactaacaatgtcatcaacactgctggttataaatggacgcccaccagctctcaaaacttgcccttcctccgacacccctagagattgggcgtttttataaattaattttaagatttc

SEQ ID NO: 4211 - DNA, 6373 bp, Heterodera glycines
  unsure (1)..(6373): unsure at all n locations
ggaatcttgtcaactgtaaatgccataaaatcgatttcttccttggtttccaccacaaattgatcgcaattgcaacaaagctataaaatttgcaatgcaagtgagaaaattttgatttttcgctaaattttactaataaatataattggcaattctcgacctatttttagaaacatacactaattacagtgccattattttggttcccacatttaccttatttatcaacatcctcaacaaaagaaaaaacacaattttgtccacagtgtagttctgcggcaatatgttgtttaaacctgagccattagtcatttaaaggttggctttatttttcattttttttcgtaatacggtctatcttttctgcagtaatcaacattcgattgttccattttctagatgtatacaaccaccctttaaaaaggtcaagaatttaactaaacaaagtgaagatcagctcgttaaattgaccattacatactcgtatagaaaattctgaaattttcatatatgctctattttattacaaatttccttctgtctttattggatttttaccggcaaaactgatgttaaataggttttatttttattaattgcagcttttcgtattagaacgcgtttaaaaatagattagaaccgggaatcttgtcaactgtaaatgccataaaatcgatttatttttcttttccacaacaaattgatcgcaattgcaacaaagttataaaatttgcaatacaagtgagaaaattttgatttttcgctaaattttactaataaatataataggcaattctcgacctatttttagaaacatacactaattacagtgccattattttgtttcccacatttaccttaattatcaacatcctcaacaaaagaaaaaacacaattttgtccacagagtagttctgcggcaatatgtagtttaaacctgaaattttaaaaaattaagttttaaatctgaatttggtttgaaactctattcatattttttttaaattgtagttttatgaaataaattctcttttattgattttaaaatacctgtaccataatcgggttctatgtggatcgactgaactttaagcctatccatttgctcatttaataaaattatttttcagccttttttatgcatttattttttaatcattttatcaattttaatataacaatttattttaatatatgatttataataagaaattacataagtgtgataattaaataatgacctcatttgacttttaaagttttaattaatttggcattttgttttatttttttgtgtctttcattttcatttttgtttttttgcatcgccccggacttaatttttgatgtggatttttgtgtggtaattttaatggtgcttttaattgttgtgttgtttaaatttaattgatttggattgctgtggctttaagtgattttaaaagtcttccttctcattcttctccttcgccccgttttggaattcggcaaaagagcagagaaggaccccggcaaaaaggcggctaattttacgacgtggcgctcctggaaaaaggtgacgatcaacgcggtactatccggggaatttgtagactataagtccgacagcgtctccaaaaagtgaaaagtaactcacgagttggaaggagtgtaaaagtgaaatcaaatcacatttggtggagaaaagcggaaagattcgacagttatcagctcggtaaagtaaaaccgtctacaaagctgagttttatcaaaacggtaaagtaattccccgcttcgatatccgacattggcacttcaaattgaatttgggagagaaattgaaaaacggcgaagtaaagccaatgattattgtgagatcgccaaaaaacactcgccagaggacggtgaatcttggggttcagccgttaaatggagacactgaccaacagaggggacaacagatagtggagaatcctgtgaatttggcagcaaatccgaatgtcaacgagggaaataggcgtaattctgtttcttcagcgaacacatcagtactcgacgcaaacgaaattcgacgcagactgaaaatgacggaaaatgccaacaatgcagcggatggacgaaacggacagcagcaagtgcaccgagaagaagtgcttctgaatgaccatggtaacaatttgttggcgaatgcaaatttgggtgaaaatttggagaaaagtttttgttcaaccattggttggtgaccaaccacaacaaatacagcaaaatttcgaaaacgaattgcgacaaaatgtaattgtgggggaacagcgcgtagcgacatcgactccttatgtcgaaatgcaacttttgaggcaacaaaacatagagcggcgtaatgtaagcccactccggtcgccattcgaacaaaattttcgggaaaatgtgattgtaaacccgatccgtaatgaaaatcgaggacccaatcagcattttgcggatggatttggaggacaaccaaatcctaatgcccgtctccaagtttttcgacagcaacacgccgaaatcgatcgacattattcgagtgcttttcatgcaccggtgccgatgcgacaaacctgtcacggacaaattcaacaagctgcgtatatggagcaacacggtgcgcatcagcctatgctgctccagcaacaaaatatgcgaggagtgatgcatcatcagcagccaatggcggggagaaatgaatattttcctgaatattacggcggaagacatttgtatcccgacggcagagaacaaccaaactcggggaataatgaattaaaaatcggtaatatggaatatgtgctgaccatggaccgacttcccgagctaaatggcaatgagggaactgacaaaatgaaaagttttttcaaaaaattttcaaatgtcacggaagaatggccggaaaaaaaacggattaaagcgttggaatccgaagtcaatggacgggcagagcgtgcctttaatgctgcgcttaacacccagccctatcgtttcgattcaattcgacgggcaatgcaacaacagctcgaggacacggattgtcgcgaaatgagcgcattcgacgagttaatgagcggagtaaagcgaaagccaaacgaaagtctggacgcattagccgatcgaattcaaagtcttgtttcccgtgcgtacccgggcttgacgcaaaatttgtgcgatgattatgcaattcggcacctaatcagagcactgtcaaatcccgatctctcattaacgctcgaaatgtcgcgaaggccaggaatgtcgtacgatgaattcgttgcattggccgcacgcgctgagtcaattcagcgtgcaacaaaagtgcaggcgaccgaaaacagaagcaccgacaatcggaaccgaaacttttacacttcgaataacccgattagacagcaaagtggaggatacgaaagtaatccccagcaaacacgaaagggagttgtatgctataattgcaacgaaccaggccatatctcgcgtgaatgtcaaagcgtaaggggtcagcgaaacgtaaacaccggcgcagataggagtaggcaacaatttgcgacgggagcaaataacatttcactgcgaaacaatgcagacaatcagcggaatgccataagaacatatccggctgtaaaatcccaaaatttcctcaaacaaaattgcatagtgatgcaagaggacaaaccccccgatgcattttgccgaggagtgaaattgacatccgaaatttcgagtttcatcgaaaatgaacttggtgaagcaacgcagactgaaatgtctaaaggaaaggaccgggtcggaaaaattttggtgattaacgtagagacatacggcacccaaacggtagcaatgttagatgggggagcccaaatttcactgattggagcaggatttctgtatgaattgatcaaagaacgaggcttagacctcaagaaatcggacttctctcgaacgtcagcacgaattgccgatgtaaatgggcaacaattgaaatgttttggagtggtaacaattccgatcacacgaaaaggttgcagccaaataccgatctgctttcacataacaaccgcacaatttggctacgacttgcttcttggcaccaattcactttcaaaattaggatttcttctgtacgacacagcgaacaaagaaatgattgaatttgaggaaatatcccaaaatgatagcaattctgctcgggttattttttctacaaaaattcaaccccgctcaacccgcctcatcgaaattggtgttggtgatcagtggaatggaaaagatgtggtcatttctccccaaactgtgaaaggaaatgttaaagtggaagaatcagtgggaaaagttgaaaacggcaaagtggtcgcccaaatcacaaatttgtcggcatttttggcacaaatcgatgaaaaaacggaaattgcgaccgtagagtcagcagaaatcgttttcgacagtgaaaattcgattattcaggcggaaatttattcgccaattgcaaaaccgaattcggggaaccgaaatgttggcaatgactttaatgtcggcaaactttcggaaagccaaatgttggaattatcggagctcataagtggccacgccgaaatctttgctttttctgaagaagaactaagccaaaccgacttagtccagcacacgattgaaacgggcgatgcggccccgattaaatcgcaaatgcgacccgtcccttacgcttacagagaaaaaatttctgtgatgatccaggattatctaagtcgcggaataattcagccatcaaattccccttgggcttcaccgatcgtaattgtgcccaaaaaggatgggacacttcgtttctgtgtggattacaggaaactaaattctgtaacggttaaagatgcatttccgttaccgaatattgacaacacactcttggcattgggaggaaggagagtattttcaacattggattttatgtcgggctactggcagatcaaaatggatcataattccattgaaaaaacagctttttccacggaattcggactacacgaatttttggtactccctttcggcctttgtaatgccgttgcgacattccagcgatttatgacgcgccttttctccgattgccttaacaaattcgttttcatctatattgatgacattttgatcgcgtccgaatcatgggaacagcacaacaaacatctgaaagaggtgttcgaacggatccaaaacgctggtttaaaattaaaaaatcagcaaatgtcattttgcgtcaaatgaactcccatttcttgggcacatcctttcaaatgaaggactgaaaatggatatgaccaaagtaaaacccgtccttgaacttccaaacccagcgacgaagaagcaacttcaatcgcttcttggctttcttgcttattatcgtaaatttatctacggatttggcgcaattgccgcccctttatactcgctcttaaaaaaggacatcgattttgccattggcgaggtcgaaaagaaggcgattgacgcattgaaaagtaaaattgtcagtgacgtaatgttacatttcccaaacttcgaagcggccaaaaatgaccccgctagaatgtttattctgttaaccgatgccagcaaaattggagtggctgccgttttgtgccagcccgacgaaaacgcaaatattcgtccgatttacttcgcatcccggcagtgtaagggctatgagagcagatactgtccaacggagttagaagcactagcagtacgattcggcacgaagaaatatagccaatttatcaccatgatgccgacgagggtattcaccgaccaccgcgctttgataccgatgtttaaaagtaaaaaagagactgggaatagccgcgtggataaatggctaatggaaataaatgctaaatttttgttacaagttgagtaccatccggggaagaaaaatgttattgccgacgttttgtcgcgttcacaggcattaaaatgtcctgaagcaccgaaggaattggacaaaatcgtcgctttccaaattcgacagaaagagaatgacccaaaacagcacggaatcgagaacaatcgcgaatgggcgaccaaaacgagagaaagcgaactcggctttctgtacgaatttctgacagaaaaaacgctgccgattgaacctaaagatcgccaaaaacttatgtcaatccttcacaatttcactgttttggacgaccttctctacaaatgtgaaaaagatgagtaaaagtcgtctttttgtcccatccgtatatcgcgaaaaattgatcaacgagcgacactcaggaatttgttcaggccatatngagcgggaagaaaatttttctccattnggctgaagaaatatttttgggctacatgtattccgact

SEQ ID NO: 4212 - DNA, 3828 bp, Heterodera glycines
ctcttcgatgccgaatttgtgctcacacccgaaatccgaggtctaacgagccaccaatgaaaattgttgcaacatccgaaccatttgaattggtttgcctcgacattttgtctatcggacccgcgcattcgtcatgcaaatacatattagtcgcggttgaccacttttcaaaatacctggtagcaacaccaatcccaaacaaaaacgcagacacaattgcgcgcgaatttgtaaaaaatgttgtcttaatttttgggacaccaaagaagattcacagtgatcgcggaaaagagtttgtgaatgaaactcttaacgaaattaccaaaattctacaaatggaaaagaccctcacttcgggatatgatccacaagcgaatggcgtaactgaaagagtgaatcagacaattttgggaatgctaaaacggtcaactgcgtcaaattgggagtgggatgaccgtcttccatttgttgtgttttcatacaatacaactccgtcagaaacgaccaacatttccccataccatcttttgtttggaaaaccggcaaattttccttcaaacatttccttaccagttaatccgttgtacacaattgatgtgaatggatacattcaattgttcagggaaaatatcgcgcatttggtcgaaaaggcgagggaacactccgaaaatgagcgccaaaaaatgaaaagttattatgataaacaggcaaaagtaactgccaacaaattcgtcgttggccaaagagtgatggtcatttttcccgggtccaacaaacgttctccgcaccataaactaatgtggaaccatttcggaccgtttaaaattacggaaattacggattcgacagcgtttgtaatccccgtcgacaagccgaacgatgtgccactgaaagtgccgattgagagaatgattagggtgcctgacggtgtccccgacactagtactcttccaaagggaaaaaacccttacaaaaatcagttgaatacaataatttgcttcgtcagcctaatttgtgaagaaaaagttgacaatggaaaagttggcggggtaggaaaaaaggaaaagttccaagaagttgaacaagaacaacttctggaaaaagaagtggaaaaaaatgccgaagttttcgatcaattcccgaaactaaagtcaaaagttggaggggaactcaattttggagcgaatgtgtgtcaattgaggacaattttttcctcagaaggtgtggaggacatggagatggacaccaccgaatttgccattacgtgggatttgcagtgtggaggacttggcccagaacatcgaaactgtgtgcagctaatcgcggctgatttggaccccgtgttggagagggccggttttggcttgaaggtgcccggagaattcaggacacggaaaaaagggaatcttgggcttaaggtcgttggaactccgttgaaagcacttctcgccacctttctgctgaagtccgatgccatttcttcctctgccgttggaaggaaattggcccaatcagtgatcggttcgcctgtcggatttgagctgattacgttcattggaagccgagaagatcaaatcaaaagcggcagaattccaaccgaagaagacttggagacaatccttcggaaatgggccgactgttgcgccgtgactcgtgccaaattgacaaaaagcggatttgggcgaattcacgtgccaatgccacaatcgatcgaagacttgccggacggtgaacgaaagccctgggctgaactgctcgagaagaccggcttcctgttggagaaagtgaaggcaacgtccgtcatgcgcaagcagcactttgtcacttcgccacgcatcattatgggcgactcaaatgctaagcaattggtagagcgttgaccgacctcacatttcattggcgcggaggacggaactgttggagatgttgtccgagcgtttgatgccgtcgccctctcatcaaaagtcaaagtgggactgatcatgatcggtcgtgatgcgttgatgcgcaatgaaaccgccgacagcatcatggacaaattggggcgactggtgcagatgtgtgccacgttcccccatgtgaccttcttttggcttccgccgccattcgtccgtgatcgacaattcgaacacgaaacactgatcggaaaattgcgcgacttttttggccaaaagacgaagaacatccaattcgtggcaacaacgacgaatggccgttcgcttcttgagatttggcgctacggcaatggttacaacacggaccatgtctcgcctgagggagtgatgaaagagaagggactcaacatgttgaaggcgtggcttttgacgcaagtcaaggaatttccgggtgatcaggagttgggcattgagaagaagaagccggagagtggagagaagggaaaaggagcggggacggcagcagatcgacaacacggccgcaccgagccgcctccattccgacgcgacgggcccgtctttcgccgctcgaacagccgaccgttcgttcagcacccgtactcgcgcaccgccgttgatcgccaccctttccgcccctttcgcacgccgaatttgccgaatcccaatcgccgtcactttgatcgctgaggacatcgctcgttgcaagccgaggatgtgataattaaataatgacctcatttgacttttaaagttttaattaatttggcattttgtttatttttttgtgtctttcattttcattttatgttttttggctctcttcgcccggacttaaaaatttgtgatgcggattgtgtgtggtaattttaatggtacttttaattgttgtgttgtttaaatttaattgattgggattgctgtggctttaagtgattttaaaagtcttccttctcattcttctccttcgccccgttttggaattcggcaaaagagcagaggaggaccccggcaaaaaggcggctaattttacgacgttattttggatttttaaattctgttgaaaaggattaagaaagtcggtatcctttgctaaaaattattccaattccaaaaagcctaattataagtaaaacattaagcataaacaaaaccataatatttttttcacacaaacaatacaaaatcaaaacaacagaacaaaatttgagaaataagaatcatgaaaagtaaatctaaaaatatacagatacaaaagaaaatgctttttgctttacataatcatttacacaaacgaaaactaaattttctttatacaaataacaaaaaataaaatacaaacgaatagcaaataaagtacctttttgagttctttttgcaaaagcataaacaaaatcgaaatgaaaaaaaggcaaaacaaacttcatttttcaaatcattttttaacgcaaaaacaataaaaaacaaaaccaaacatttctatttttcaaatgcatttttaacgcaaaacacaacaaaacgccacgccaattcaaagcatggcggatacacacactcaactttattatataggattgtgatcatttactgtgcgtgcgtgcgtacgtctgacccccctcactctctctctctccgtcccgctctctctctgcccaattaatgatctaattgaacgcccgcccattggacccccacgtccgttctttgatactctccctccagctagacacggcacacagtccaattcctagcaaaaatgtaccaaaagataatccccacctgctgaattgtgatgggagaaaaacaaaaaatgaatgaatgagttgggcggggcggggccaacgccctcacttcactttttaccgcacaatcatcattatttagaacatgttaagatgcatgttcccacaaaata

SEQ ID NO: 4213 - DNA, 3604 bp, Heterodera glycines
atgctgtgcgaacactttgtgtccctttatgactctcccaatgcagcagtgtccattttgccactattttatctcactcatcgtctgctcgcctctccttgtatcagctatttccaaagccaacgcccttttctccctcttttctgtttgttatttctcattgctgctgagatccaatagtcggtgtacaaatttgtcaaacccgccaacatttttaatcaaaatgctttataaaaatttcaatgaatttcttcgccaaattgttattgtgaatttcagaaaaaggaattttctatatcaaaattaaaaatttcgaagcaaaaattcaagaaattttttatttaatttcaatccatttttttaccacatgaattatgaataaatttttgggcctcgaattcactttggaatttaaacaaaataaaaaaatgaaaaaaatcacctcatcatacgttatggattttaagcaccgccgttaggcagcgcagttccaaaatttattccatgccacagatattatgggcaggatacgtcaagtacctcaaacttgggtaattaaaccgaagaaagaggtgcagtggggaagaatgacgcctaaaatgaaggaaatattcgatgctgtgcgaacactttgtgtcccctttatgattctcccaatgcagcagttgtccatttttgccactatttttatctcactcatcgtctgctcgcctctccttgtatcagctattttccaaagccaacgcccttttctccctcttttctgtttgttatttctcattgctgctgagatccaatagttggtgtacaaatttgtcaaacccgccaacatttttaatcaaaatgctttataaaaatttcaatgaatttcttcgccaaattgttattgtgaatttcagaaaaaggaattttctatatcaaaattaaaaatttcgaagcaaaaattcaagaaattttttatttaatttcaatccatttttttaccacatgaattatgaataaatttttgggcctcgaattcactttggaatttaaacaaaataaaaaaatcaaaaaaatcacctcatcatacgttatggattttaagcaccgccgttaggcagcgcagttccaaaatttattccatgccacagatattatgggcaggatacgccaagtacctcaaacttgggtaattaaaccgaagaaagccgtgcagtggggaagaatgacgcctaaaatgaaggaaatattcgatgctgtgcgaactctttgtggcccctctctgactctgcaatgcagcagttgtccatttttaccactatttttatctcactcatcgtctgctcgcctctcctttttatcagctattttccaaagccaacgcccttttctccctcttttctgtttgttatttctcattgctgctgagatccaatagtcggtgtacaaatttgtcaaacccgccaacatttttaatcaaaatgctttataaaaatttcaatgaatttcttcgccaaattgttattgtgaatttcagaaaaaggaattttctatttaaaattaaaaaattcagaagcaaattcaagaatttttttatttttaaatgcattttttaccacatgaattatgattaaatttttgcgtttcgaattcattttggaattaagaaaaataaaaattgataatcatttgatcatttttagcgcactttaagcaccgccgttaggcagcgcagttccaaaatttattccatgccacagatattatgggcaggatacgccaagtacctcaaacttgggtaattaaaccgaagaaagccgtgcagtggggaagaatgacgcctaaaatgaaggaaatattcgatgctgtgcgaacactttgtgtcccctttatgactctcccaatgcagcagttgtccatttttgccactatttttatctcactcatcgtctgctcgcctctcctttttatcagctattttccaaagccaacgcccttttctccctcttttctgtttgttatttctcattgctgctgagatccaatagtcggtgtacaaatttgtcaaacccgccaacatttttaatcaaaatgctttataaaaatttcaatgaatttcttcgccaaattgttattgtgaatttcagaaaaaggaattttctatttaaaattaaaaaattcagaagcaaattcaagaatttttttatttttaaatgcattttttaccacatgaattatgattaaatttttgcgtttcgaattcattttggaattaagaaaaataaaaattgataatcatttgatcatttttagcgcactttaagcaccgccgttaggcagcgcagttccaaaatttattccatgccacagatattatgggcaggatacgccaagtacctcaaacttgggtaattaaaccgaagaaagccgtgcagtggggaagaatgacgcctaaaatgaaggaaatattcgatgctgtgcgaactctttgtggcccctctctgactctgccaatgcagcagttgtccatttttaccactatttttatctcactcatcgtctgctcgcctctcctttttatcagctattttccaaagccaacgcccttttctccctcttttctgtttgttatttctcattgctgctgagatccaatagtcggtgtacaaatttgtcaaacccgccaacatttttaatcaaaatgctttataaaaatttcaatgaatttcttcgccaaattgttattgtgaatttcagaaaaaggaattttctatttaaaattaaaaaattcagaagcaaattcaagaatttttttatttttaaatgcattttttaccacatgaattatgattaaatttttgcgtttcgaattcattttggaattaagaaaaataaaaattgataatcatttgatcatttttagcgcactttaagcaccgccgttaggcagcgcagttccaaaatttattccatgccacagatattatgggcaggatacgccaagtacctcaaacttgggtaattaaaccgaagaaagccgtgcagtggggaagaatgacgcctaaaatgaaggaaatattcgatgctgtgcgaactctttgtggcccctctctgactctgccaatgcagcagttgtccatttttaccactatttttatctcactcatcgtctgctcgcctctcctttttatcagctattttccaaagccaacgcccttttctccctcttttctgtttgttatttctcattgctgctgagatccaatagtcggtgtacaaatttgtcaaacccgccaacatttttaatcaaaatgctttataaaaatttcaatgaatttcttcgccaaattgttattgtgaatttcagaaaaaggaattttctatttaaaattaaaaaattcagaagcaaattcaagaatttttttatttttaaatgcattttttaccacatgaattatgattaaatttttgcgtttcgaattcattttggaattaagaaaaataaaaattgataatcatttgatcatttttagcgcactttaagcaccgccgttaggcagcgcagttccaaaattaattccatgcccagatattatgggcaggatacgccagtacctcaaac

SEQ ID NO: 4214 - DNA, 1384 bp, Heterodera glycines
tgcaagacggaacatattttggacatggacatgttcctctacgacacacaaccagctgtacgcaattaagcgaagaaaaagcatcggtttgaccaccccaattattttttaaatttagactttgtccggactgaacgaagaattcatttccggcgctcggctggacaatttggtctccacgtacaccgccatcaaaggacttgtcgaaagtttggaggacaccgaagcttttgatacggacccaaatgtgcgaatggtcgcctgttttgacaacgaagaggtgggtgtagacaagaatcttaatttcgcatcatcgacaccgaaaagttccgtaatttgatttgtctctgataaatgctgcatccggacagagtttgcgggaaaacgacggggtgggacgacctgctccgccgccggttctcccgccgtccccccccccccactcccgggtcgtttcctccccgaaaaactttttaaagaaattttttttaaattttcgtggtgaaacaatgtaggggaaatgaattgcacccgtatccggggaatgggtttggacttggaaaggggcggggtgattggtgggtagagcaacccgtggaagcgaataaattttcctccgtttttaggttggcagtcgcagtgcccagggggcccagtcgcactgtttcgagtggttgctgcgccgcgttttgtcctccgtcgaccacccaaccgcctttgagtgttccatcggccgttccttcatggtcagcgctgaccaagcccactcggtgcatccgaactatgcacacaaacacgaggtcagttagtccatcctctccctttaaaattggttaaatttccaattaaacgtcacgccattcaccaattccaatgggattttgcaataatttcccaaatgttcgactaattatcttgccaaaatatgtagaaagccgatcattagaaaaaattccagaatgctactaatttgtaagggaagaatgaattaaaatatccctctaccttatcaaatttacatatatttgatttaatccaacacaaaaggagcggcacaaaccgtcgttccatcgcggcgtcgtggtcaaagtcaatgccaaccaaaagtcagttttgctcaccctttttggtctaataatttaaaaagctaatcattttttggtttcgcatctcattgtcaattaatgtaattgattactctccaccgtttcccccattgtttttcagttatgccaccactgcggtcactcactctgttctgaaagtgatcgccgactccgtcggtgttcccctgcaggcaatttgcacttaattagtaaaacaattatggtaactggcccacccttttcagaaggtggtcgtccgcaatgactcgcgctgcggc

SEQ ID NO: 4215 - DNA, 1896 bp, Heterodera glycines
  unsure (1)..(1896): unsure at all n locations
taaaaccancaacttctgatttcattatcataatatttgccttaatggtgcgggttatggccattcttttgaaaaaaaacctttttcaaggccattaatcattaatttattacagccattcgaacttccgaatccctccaacgcaatagaaaaagtttttaatttttaaaatattttttcaaaagggaaccataaattattattattaatacaaatgctttaaaatcagttttaaattaattttttaatgtgttctttcgttttttaatacccttttcattcaacaaaatatttgcatttttttgtctcttctgctgctctccctaattggcaattaattctttgtttagggtttcttctccaaattgcccaaagtgctcaagggattgaaaaaggcggagcaatgaaagggcaactgacaaatgagcccaaatgtgcgtaaaggaacggacaaaagtgctttgacaaacaaaaaacggaaccatcccccccccccccccccgaatttcataattattaaattgacaaataaaatgattgttttttcgaatcgacagatgaaaatttcttttctatgcatggacaaatttccaacaaactttgtatggtatgtcccataaataatcaacaattacattacgtctacagtacaaaattaaaaattccaataaaattgcacagacaaagagaaaggcgaagaggcaaaattgtggtcgcgaaatcacttttattttcttaatcagctaaagttgtcagaatgacttggaattttacatagtataaggtctatcagtctgcaaaatttcaaaaagttttgaacacaattttttgaaaatcgctttttttttgtaaaactcgaatatttcatgtaaaaaaaggatttgaattagaaaacagaaaaatgcgatttcagaataattatttgggacaacaattctgaatacaaaatgaaatgagctccaaaaataaatataaagcaaacaaaaatggaaaatcaatgtttttaattgtctatcactaagaattttcggtcgtttgtccgtcggccgtttgtccattcgttcatttgcgcgccttctcgtaattggcctcgaaccattgcacagactccgcaatggcacgttcgaagggtgtgaatttgaagtcgggcagccgggcgcgcagtttggcatttgacgaggtctttttgtactgtccgtccgccttggtcgtgtcgaaaatgacttcgccctgaaaagtggaggaggaaaacataaaacacacacaaataaaaggagtatctccatagcaagggccatacgacggacgattgcgattttaagcagcttttttaagaaaattaaaattttaggaaaaagctacctttagggtttgtaagaaaagtcagtaaatagtcgaaagtcaggccagacccaaaggactcgagaaatttctcgatttaagaaccgagattctcgagcagcaattaattgattacacattatttcaccttaaattgcattgctttgacaatggcggtgaccacatcagtgattgtcacttcgtcggaagggtcaacggacagaatgatgggttccacgtcctgtttttggataaatttaaaaatttgaggtaatttttaggggggtccggcggtgcgacaggttccgacagggaaattggaatttaatgaagccttacaaagaaaataatacaacactccacctcgtattcgcggattgcccacacaaagagacggccgaggtccaacgagtaaatgaattgccgcaacggtttgcccgagccggcaaccaccaaagggccgccgtcgcgcttggccaaaaagcacttgtggatcagtgccgggaccacgtgggctaattgccaatcagggggagatcacattcagtttaaatt

SEQ ID NO: 4216 - DNA, 5431 bp, Heterodera glycines
ctttcgattgtgctcctgagcatatccgcggttgagcacatctgttagtttattggaaattcgacttatttagctgatcatggccaacccaccgatcattcgtggggcgtacgaatagccaaaattgctgtcatgcggcggtccattgtacacctgaaaatgtataacaataagctaaacatttaaaaataaagtatttctgtgtgtataattattccataatgatcactaattaatcataattcattataatgatcatgtagttggcacattgtatggactaaaaattgcaaaaattgccagtcaagtttttttaactttggaacataaagcatataaaatgtttaaatttttcacccacgtatgatttttggaaaatccaacttttccagtcatggttatgagatatatttttatgaggaattttactttgtcaaattccttttagtcgatacaatgcacagccctaattatcagggatttaattgctctttaataaacacatgattatttatttctgcactgtttttcacgtgccattgtctcgtcaattgggtacggcgttttgtcggggaaaatgcacgtggaaaggcacgaaacgcaccgttccacgtcagtctcatggcagcattggagaacattttgacagatcgccttcgggaagacatatggtaattaagatacggttttctgaaatagaacaaacatcccacctatgattgagacatccctttcaaaaaatacagtaaacccaaatggatacggtatgtgggatttctttctttctttttggcactgtctcaccaaattcttgacaaagaattggaggttgtggcgcaagttgtggaacagtccgccgaccattgccgccaaattgaccacgtgcgtcggccgaacgcggcggaaaagcgcccgcgtctgctccaagtcggtcaggtcgcactcgctgctgcccacgaaaaaccactgctcctgcagccgctggggcttctgttgctgctcttcctccgtcaccacctttggcaaattcaaaattcaacgacaaaattaatacggagggcgggggaatggaagtgccctcctcaaccaggcttgtcattttgccatcattgagaggcctggcgtgccatttcggcatccctacaacccgtcgccacgagcacctgttgaattgccgacccgaccagtccggtgccacccgtcacgagcacacgaattgccgccgctgcttcaccgccgctttcgttgtcgccttttttagtcatttactcacacaaaaaaatataaattttctgattgtggattgatcagttaattgctgcaaaatatttaattgtgcctttcagcaattcgaaattcaattcgtaaatcgattggtccgtatgtttgtcaaaaaatttatgttcgttcgttttgtgaatggaaattaaatgaaaagcgaataaatctgggaaaggttgacaacacagaagaacagcaggaggggaggggaaaggacaattccaaaataaatattatattaaatgtttgtttagctgtaacaaaatgtgaaaagggaagaatggaataaagcaaaaaattagaaatattttaatgttggaagggctgccatcgaaaagaaatctcgaccatttacactaattgtctgtcggtcgtttgtccgtcggccgtttgtccattcgttcatttgcgcgccttctcgtaattggcctcgaaccattgcacagactccgcaatggcacgttcgaaggatgtgaatttgaagtcgggcagccgggcgcgcagtttggcatttgacgaggtctttttgtactgtccgtccgccttggtcgtgtcgaaaatgacttcgccctgaaaagtggaggaggaagagatgaaatgtgccaaaatttattgaaaaatgaaaaaaaaagaattctcgagagatgttcgagtaattccaagtgccgtacgattattctcggctctcactttaaattgcattgccttgacaatggcgtcgaccaaatcggcgatggtcacttcgtcggcagggtcaacgcagaaaatgattggtgtcacgtcctgtttggttttgaaaagttaccacaagtaaaattaatagatcattagttgatctattatcctaattaagagatgtgtgacaatttttaggtaataattttgccaaggccgtagccgaaaaaataatttcagaagtgggaatacaattgctctttggtccctcatatccatacgaaatgtgctcattaaagtccagtctcgacattgacgatttaatatattcccaatgattaatcatcatatacaaaaacataacactccacctcgtattcgcggattgcccacacaaagagacggccgaggtccaacgagtaaatgaattgccgcaacggtttgcccgagccggcaaccaccaaagggccgccgtcgcgcttggccaaaaagcacttgtggatcagtgccgggaccacgtgggctaattgccaatcagggggagatcacattcagtttaaatttaaaatattaatgacaaatttaaaacactgaaaattctgccggaatgtaagaaatgttcagaattaaaaaataataattctgtgtacattttttgtctgttttttaccgttctccaaattgtaattgtcacgcggtccaaatatattgcacggcactgccgaagtgtacctttggaaaagcatgtgcccatgcccatttggtttgagcattggaaaaatgtcgagaatcaaaccaattatggtaattattagagagggagtggggagggagagaggatagagagaaaaagagagagagtgcgagtccgataaagaaagaatagatgagccaaaaatgaccgagagagagagagagagagaggagagagagagagagagagcggagagagagggaagagagagaacggaataaagagagagcaaatgaagggagagagagagagggaagagagagaacgggataaagagagtgcaaatgaagggagagagagagagagagagaggagagagagagagagcggagagagagggaagagagagagagcaaatgaagggagagagagagggaagagagagaacggaataaagagagagcaaatgaagggagagagagagagagagagagggaagagagagaacgggataaagagggagcaaatgaagggagagagagagagggaagagagagaacggaataaagagagagcaaatgaagggagagagagagagggggggggaagagagagaaagtttaattattcaattaaaaataaaagacagtaattttttattcgatgcactttcgattgtgctcctgagcatatccgcggttgagcacatctgtttgtttaatgcgaatttgaaggatttcatttagctgatcattgcaactcaccgatcattcgtttggcgtacgaatagccaaaattgctgtcatgcggcggtccattgtacacctgaaaatgtataacaataagctaaacatttaaaaataaagtatttctgtgtgtataattattccataatgatcactaattaatcatcataattcattataatgatcatgtagttggcacattgtatggactaaaaattgcaaaaattgccagtcaagtttttttaactttggaacataaagcatataaaatgtttaaatttttcacccacgtatgatttttggaaatccaacttttccagtcatggttatgagatatatttttatgaggaattttactttgtcaaattccttttagtccatacaatgcacagccctaattatcagggatttaattgctctttaaaaaacacatgattatttatttctgcactgtttttcacgtgccattgtctcgtcaattgggtacggcgttttgtcggggaaaatgcacgtggaaaggcacgaaacgcaccgttccacgtcagtctcatggcagcattggagaacattttgacagatcgccttcgggaagacatatggtaattaagatacagttttctttaatagaacatcccacccatgattgagacatccctttcaaaaaatacagtaaacccaaatggatacggtatgtgggatttctttttctttttggcactgtctcaccaaattcttgacaaagaattggaggttgtggcgcaagttgtggaacagtccgccgaccattgccgccaaattgaccacgtgcgtcggccgaacgcggcggaaaagcgcccgcgtctgctccaagtcggtcaggtcgcactcgctgctgcccacgaaaaaccactgctcctgcaaccgctggggcttctgttgctgctcctcctccgtcaccacctttggcaaattcaaaattcaacgacaaaataaatatgggggggcgggggatggaagtgccatcttcagccaggcttgtcattttgccatcattgagaggcctggcgtgccatttcggcatccctacaacccgtcgccacgagcacctgtcgaattgccgacccgaccagtccggtgccacccgtcacgagcacacgaattgccgccgctgcttcaccgccgctttcgttgttgcttttttctgccatttactcacacaaaaaaatataaattttctgattgtggattgatcagttaattgctgcaaaatatttaattgtgcctttcagcaattcgaaattcaattcgtaaatcgattggtccgtatgtttgtcaaaaaatttatgttcgttcgttttgtgaatggaaattaaatgaaaagcgaataaatctgggaaaggttgacaacacagaagaacagcaggaggggaggggaaaggacaattccaaaataaatattatattaaatgtttgtttagctgtaacaaaatgtgaaaagggaagaatggaataaagcaaaaaattagaaatattttaatgttggaagggctgccatcgaaaagaaatctcgaccatttacactaagtgcctgtcggtggtttgttcgtcgaccgtttgttcttttgttcatattcgcgccttatagtaatggcactaaagccatagcaccgactccgcaatggcgcgttacgaaggatgtgaatatgaagtcgggcagtcggacgcgcagattggcaaagatgaggtgatctagccagggattagaatgaagaaaggaataaaaagtacgtagaatataaagattgataccgcaacataaatgtcgatgttctggcacttgaattaaaaatatttacatatgtttaaagaaatcgtagccataatacttttttgatattttaatggaaattacaaattctttatttctgcactaaaaacatacaactattgggaacagaaaaagattcaaaaatactttaaataaaaatgcaattaataattaatttcttgtttatctacaagaaagtttttattggctcagaaccaagagaattat

SEQ ID NO: 4217 - DNA, 1942 bp, Heterodera glycines
actgaaggcattggtcgattttttatacatttattaaaagagagaaagagcaaagatttaaggaattttatttctctgttttcaattttttaatttcccccctttttttactataaaaatgtttgctttttccatttgcctctcattatttaaaaatatttctaacataattattattgtgcccttttgacgtccttcttcgcaattctaatacggcaaattgtgctaattgccacaaaatgaaccgacggtaatgagttttaaaaattacaaacttcatttaactactgttttcccgcattttcagttggctgtgcagcgacatttggatgaacattctgccgttttttggtcgtcaccaactcggcctcaaattggcactgatttcgccacgtttcgacattttagtggacaaacatttcgatggccaatcacaatggacacttttgcgaccaatcaaaattcgcaaaaacaaaaccatcgcttcgccagaattatgtgtgcttagggctgccaattacgcaaattttccattgccagaatatccgttacccagcaaaattcgctttgattgccttgcgataaagtaattgaaattcaagcattttgtttgacagaagtattcacctcttttcaggtacattgattattctgtgctcgcatttatccgtgccaatcagcaaatttgggacaaaggcaccaagttgcgtttgttgctaccatgtacttcaccaacaacaaatgtcgagccagtttgggataccttcgtcagtcaaatttggcccatttttgcgacaaacattcgccatttgacatttcgaaattctacttatttgaccaaattgcttcatctcatttcgccgatcattctcaccaatctcaccaaattggattcaatcggtgttggttcttttaaaccagaccaaattgatgaagatttcgacgggccaaatgcaactccaactgctggccaagtgttgtccgaatggttgcacgttccgacaaaagatggacgaccgaagcgattgttttgctattttcatccgtcaggaaacactcaatggatcaacagtttcaaagaagtgagttgcccatttccgttggattgattgaaatttgtttttgattgctattcattatccattttttagctatttctccgtgccacttcttctgtctgctacaaaattttcatcagaactaaagcgacatttgagccatttgaattggtgaatgaacggaccaacgaaaagctgacaatgccgaaaccaaaagaagagaaattggccaagcaatggattatgaagagatgtgcaattggggagacggcggcggttcaatgggaggacaatacggacaatttgaacgatgtcacattttgtcttcaaaaagttgaagtttgcattgggtgagcaaaaaagtgcattttttcttttattgaatttgaattttgcgcttaatttaggccagtatctccaccaccgacagaagaagcgggacaaagcgtcgaaaaggagggacaaagcagcgaaaaagagggacaaagcagcgaaaaagggacgtcttctgacaaatgagcgacggacagaacaacaaaaacaacagtgatcagcagaagaagaaaataaatattaattgagaaatgatcgatcattatattcatcagtgaaaattggtaaaatgtacatattttatgaagaaaatgtatgtgttcatggaaataaacgatgtatagtgaaaaaaaatttttaagtgccaaaattagttgttaaacaaacatttaaatttaaaataatcctgttaacaataattgtagtacggaaaccctgtggtttgttccccccatttttgggcaaaattttttaaaacttatatataaaacatgttcccattggttttgaggtcgctgatcatgaatccggcatctattcgacataacgaa

SEQ ID NO: 4218 - DNA, 929 bp, Heterodera glycines
gggggaaaaattgagaattttgatcatatttttagcagattttcattaaaaaattcttaattttgtggttttttggaaaatttaacaaaaaaccacaaaaaacctcaaaatttttcaaaaaaccacaaaaaacctcaaagcctcatttttaaaatttagcctcattgacctaccaaaaaaccacaaaatgaggctaaagcctcacatatgggaaccctgatcttagggctctcgaatgataccaagatcgttggattttgtttacaaagaaaaatgttacgatcaaaaaacatgtactcgtacgaaaacggcctggccccagaattgatctatccaataagcaacttttacaatcctatttcatgaacagaaaaatctttggtaatatatagaaataattaaatgaaaaatggcgattaatatcgtttagaatctcttttgttaattgccagcagtaaaataaaataaatattcttaagatttatctgtatgtaaaaaatattcacaaaaattggcatttttatacaaagtttgttaaaattcaatttgaccaaaatttctcgggcgctacttgcaaagagcgctctttatcaaaaagcaaaaacaaaaggggggacccttttgtttgcaaaattttttaatatttagatatgtgaagttattcactgttgtattggtcggcagatgctttccaatatgtttttcatattctgatcgtgatcacgttgacgcagataaaatttgactagttgagatctttgaatgataacaattttgccatgaattgaatgtggttttggtttgttttggtccaattttgatgttttctaaaaatccaatttcttactaaaatcgcttttttatgactttggaaatgggttttcatgctttttcatcattactacgtaatttttaactgtttcacagca

SEQ ID NO: 4219 - DNA, 5913 bp, Heterodera glycines
tcccgatttccgaaattttttgaggttcggaatgccttccccgccatggacacaaaaagtcatgggacgcgtaaaatgtgatccgaacaatttggtcgaccccgaccccgaacgattttgttaaccccgaccccgaccccgaacttgctgaccccgacaaccccgaaccccgacttttctaaccccgacgttcgggggtgcaaccctaatatgtacataaatatgtaagaaaaatcccaaaatatgtacaaaaaaccccaaaaaatgacataaaaattactttttttagtatttttaggcaaaattttcaaacttattttttctttcaaaatatgtaaaaaaatgaaaatatgtacaaaaatatttgccgaaattttggatttttttttgaggatttccaaaaatttcgtaaaaaatactcaaaatatgtaaaaaaaatgaaaatatatatgaaaaaaatccaaaatatgtacaaatatgtaagaaaatcccgaaatatgttttattttacgacacctattttcaatgttgttgaaaaaaattggtttacaatttttattggaaaataattcattaaccaaataaccgagaccgaaaaccgtgatataatttaaaaaatggaaattttattttatagcattataaaaaagaacatacacaagctcaatgcttttggaaacctgggatgatccaagataagaaataattttatattcacttccattggcccttcgggaagtatttcttataattatataaataaaatgtgaatgtcctcaactgtctgttcttcaaaagtcgagtagtcactctcacataattagacaccattttcgctgttttgccgctggtggagacaaaggcctaaaaattcggcgcaatttgaattacttaaacgaaatcaactgttttttggctattgtaaagtaaagggttttctttgtggatttcttctgatcaactactttaagccctagatcggtttgtctcatcaagagcttcagattgacacctttttgggaattggaatttcgacttccaaattttttcagaaatcggaatttcgacgtccaaagctttttagggggtcgaattccgtgccatccctgttgctcacccagtgcatcgtttggcatcgcaaagcataaagttgacatagtttaaattgttccaatttccttctttttcccactgatccgccaccgtattatccccaattggatatcgcttcattagccctatgatacactgtacatctattttttctgttagcagtgtaagcttttcgtttgtccgttcgttcacaaattcaaatggcaccaatggcgttgactcatatgactcatcaacaaaaaaatgaatttcgtagttggcggaagtggtggcacggataaattgctaattgatggaaaaacggaaattaaagcttatcaaaatcattcgcttaaaaaattatgacccttttccagtttatagctcccgaacatttccaattctgacaatgttcaaatcaattcctaattaagtttaaacaaaggaaaattagaaaacttggattttaactcttttctggaaaaaggcctaaactatggccatacctctttgaaaatgttgacaaattcagtttttgacatataaccaccaccgcaacgcaatcgcttcggttggccatcatttcgcggagtgtgcaaccatttggccaatgcttggccagcagttgcatttggcccatcatcagcgatgccatcgggcaacagatcaccagaattgattgaattcaattggttgagatcggtgagaattgttggcgaaatgcggcgacgcaaattgtccaaatgatcaccatcgcgaaagttaaagcggcgaatgtttggcgcaaaaatcggccaaatttcacaggcaaaaacatcccaaatcggctggacattattgtcgacgaataatgaaaggcaatcatggaagcatgaagaaacagacaaacataaattggtggctttttcaaaaatttgctgattggcacggagaaatgcgagcacagaatggtcggggttcctgaaaaatggtgaaaaaggagtgattttcttccctttatgtttgaattactcaatccgaaggttcctaaaacgaattttgtgggcagcggacggtccggcaaaggaaatgccacccatttgtcatcgatccattcagacagtttcgcttttggtcctttgaacttttgaattgtgatttgtctcaaaattgtcaattcgcttttgccattgaaatgggcgtccactaaaacatcgaaacgtggcgaaatcagtgccaatttgaggccgagttgggcatggtcaaaaaggggcaaaatgtccatccaaacatcgttgcacacccaactgaaacacgcaaaaaaaatggtagagaattacttagctattccggatccggcaggattaatcccgtaaatcctgcaaatcccgctttttcaaaaaatgcgggattgcggactggaacccggcaaaatcctgcgcatgatccggtcctgctccggtctctagttgcaagcgacggaacaacaaacaaaagccatagaaatggcacgattccagattttgaatttatttccgcaattttttttttaatttcttaagcaaactgcaataaatagggatgccaaaaatatggatataaaatcgagaaatatggatataaaattacgaaaatctcaaaatatggagataaaattgcaaaatatggacataaatttttccaaattgaggggtaaattttacaaaatttcttcaaattcattaaatgtaaagtaaaactttcacaaatgcttaaataggtcattaaaaagaagaaaaaacatacgataaagcaaaaatttactcatgttaatgataaatcaacccgtatggcgaatttttcgcttttttgcttatttttgacataaattaaccacttttgagaaaatttaatttgttaagattttcaagaaaattttgctaaaaaattattttttgaaaattttcttgtctttaggggctcaaaaagacgaatttagttgataggggcggttctaatagaggttttttggaaaaatgtcaaaatatggacatagaatatggataataatgccaaaatatggacaaatatggacataaatcgcgaaatatggaaaatatggatatagaaatccatcctagaagcttcaaaccaagctaaaaacatgtttttcatgcgtttcaggcctcccacagtccaggaaaaaaatatggatttccatatacctaattggatttcctaattatgagcagcacattggagaatcactgagcacgtattttggtacttttaaaaccagggttgccagatgaaaatgacaggggaaaagtatattttctgactttttgatgagtaaaaacattaaaaaatatattttctcggtactgaggtcaaataaatttttaaattttgtcaaaaaccaaaaaaatggttattgttttgtgcaaaaaagtggtaacatagatatggaaataaaatttgtaatctctgtggcataagtttttgaattgctcaatctcaaaacttagtttttctatgtaaaacacgcactaattgccacaaaatcgccacttttcaagtttttactgcctcccctccttggcaatttttagttgctttatgttcagtgttaccaatgccgtcgtgttccaaaagatgtttttacaaatgaacccagcgattgctgctgattttcactaatgctagaagagataacggcgccggaaaattcgtttcttttttcgacgggcgatgccattaaaaattaatttccgcctaaaatattttataaaaataattgcgtattttaaagaatttagtgtaaaataggaccctgggtgggtagcataagatcccgcgcggggtcacagacttcaatcccacatttgcattaatccaacaggatatccgtcccagttatttattgttctctccccttctctctcgctatatctctctctctctctcagcagctgtttcgttgttctctccctgtctctcacgttctctatctctcctctctttctctctatgtactctccactcccactgcgccgttctctccccatcatttccaagccaagcgaagaatttcaaccaataataccttcataaaaatgaccacagccttatttattaaaatattatttggttaatttttcttcatgtcatttcaccatggagatttttctatcatttgataaacttattttgactatttaaaatttaaatattttgtggcaaattgcatggcaacaaaaaaaaacgaaagataatccaaagccgactccattaattattttcactgttcctcctactaggactaatgctgttcgagactctcggtctcgagcctagactcgagaaacgtcacgggttttttggtctcggtctcgggttttcagtctcggtcttcgagactagagaccgagactttaacaccctaatgattggctttttgtaaacttaaaattaaaatatatttttaataatttttttgctttatattagagaccggacaagagggtcagtcggtcggtttcggttaaaaaccgaaaaaaaaccgaaaccgaaaaaaaccgaaaaactcaaaaatttgtcggtcggtcggttttggttaaaaaaccgaaaaaaaccgaaccgaaaaaaaccgaagaaaaattttcggtataccgtttcggtttcggtttttttgaatttttttatcttttcccaaaaaaacaataaaccatttttatcaatagaaaaagcgaaagatcacctctgagtaaaattgtagaactattgaagctctatcaatggtgtataagttgggaaaataattgaaaaaggcagccaaaaaacgtttgttagcttcctgattcttcttaaaaattagggttgctccccgacccctggggggggggggcaaaatgtcgggggccggggaccccgattgagtagtgatcaacaaacttttttaacaaaaaaaagaccaaattttctctttatatgctcgaaatcttccttttttcactttaatcatctgattcaaattcattagttggcgccagtaaaagtgcgtccaatttggcattttatacaaggcatcccaggccccaaaattttcagaaatcgaattccgaggctcaattttaacctaaaaaatttgacaattttagtggtgcgctttgtgcttatataactttttgaaaacttggggtgggggaggggggtgtccgacggtgccgataggcgccgcctaaagtttttcggaattttaggaatttttaattaattttattaagaaaattgtacaaatttaaaaattttcaagagtccccaattccccgagttagtgtcggggggtcgggggataaaaagtcggaggtagggggctcggggtcggggagcaaccctattataaacccccaaaataggtgctaaaaatggaaatgagataaatattttaaaaatcaaaaatgtagtcaagtaaataaataaataaattttgaatatgaatttttgataaaattttccatttctcaggggtgtatttttcgtttttgttgcatttttgttaataatttttttcaaaatagcagaaaatattttacaaaaaattcttcaaaatgaaaaagagcacaaaaaagcaataaatttattattattaacaggcgctccattgattcggttttttttcggtttttcataaaagtcggtcggttgtttcggttttttgattatttcggtcggtcggtttcggttaaaaacccgaaaaaaaccgaaccgaaaaagtcaaaaatttctcggtcggtttttttcggtcaaaaaccgaaaccgaaaaataccgaaaaaaacccgaccggtccgatctctaataaa

SEQ ID NO: 4220 - DNA, 6106 bp, Heterodera glycines
actaaaaagtttgataatcagaattcttaggaatcgctcccccgacactaccccaataaagaaggatactaaccacttgcccaccggattacttgttttgtatttgtaaatatttatttatcttatatattattttcatttatataatatattctttgctttattgttatttatatattttttatttacatattttatatgattaatataaaattcatttttaaattttattataaataaatctaattttattaatttccataacgttaattaaataaaaaaaaattcaaaaaacaaaaagtagattttgtatagaatatttttttaaattactctgaagcagtgggactcgaacccactacaaaaggctggcacattaaaaatgtttagattttattctatgttttatgtttattttttatttgtttaatattcaaatttattttaaatttaattaaaaaaattttatttttaaaataaataattattttattttaataaatttaattaattataaaaaaaacaaaaaataaatttaaaaagaaaaaatgacttattgcaactaaataatggataaaaaattatcaaaaaaaatttttttatttaattattttaattaatttaaaaaaacaaatagataataaatttaataagaaaaaatggattattgtcactaaatactggatagaaaattatcagaattaatgggacccgaacccatgacacacatcagaagaaaaggcaggcacactaaccacttaaccaccgggtcgcttaccttcactccatttaacttccttttccctttctttctttttttggaaaaaatcccgaccaaaagtgcttgtaatccctttttagggcactttccagacgcggacccaaacaaccctggtatcattcgaaagccaagagtttgtagattggaggaaattgtttcgttttttgatttgacccattttaagacatgcaaaaagcgttcaaaaataggcaatcccaaaaaagtgctatttttgagtcatttttcgaacacagttcgaacagttctaaaccgatcgaaatggctatagtttttccttatagccattgaaaaactgcgtcgatagaccccactctcgccccgtaaaactcgctagaaagccttaaattagtttttaagtgagttaggggggtagattcttcttatatagggaaccagggccccaaggggccctgtgaaagcgccacgggcgctttcaacaccggggccagctgggaacagttggtggtaagtattttaaaattagccgagtgagtacgttaagcgtttgaataatagaaaaaaggtggtgtgacttaaaactaaaggttaactaagaattacacataaaatttttcagacaaaaatttattaataataaagcaaaaaaagcaaaaatcagcaaaataaattaaaaaataatcaatcaaaaaaatcatcaaaagaactatcaagatcatttggttcttgatcgtgcgcacccgctgcgtgtccattatctcgttccacgtccgggtcattagccacgtccggtactcttgggcccacgtccggtattgctgcgtccgggtcattgtccacgtccatcagtccacgattcggtgtcctcgactgctgcgtctccaagtccaacagttcgtggtaaaccacgttctcgatgtgcgttccgtacccactttggcagaacggcgcgtacaccctgatgccgtccatctgcgtgaccctggacatggcgacgtacacttgtccatgcgaaaagcattgacggccgttgagtacgagcgccatccgctgcagcgtctgtccttgtgcctttaattttttgtgcttatttatttcaatccttaaataatctgtatttcaccttgtttatggtcatagcaaagcaaaggcggacgggaaactgcagacggcggaagcgtagcccacggtggtgtcgtgcgcggccatattcgaattgaatttgtggaatggcgattatgttctgcgcacccgctcgtggtccggtgagaatccggcagaacaggttgttctccgaagtgcgcatcacttgaagtcgtgttccgttgcacagtccctgggtgacgtccaaattgcggatcagcatcacgggcgtacccacctggattaataggttaaaaatgattaaaacaaaaaatagttcactttgatggtcaatttgtgcggcggcattccggatggcatttcgttgtgcaccgcctccatgttgaagtcggtgcggaaattgtgcatctcgtcgtttggctcaagaggctcgtcgatcgataggaattcccttccgcacccgctcattctgccaagcgccacctcattgatgtgctgcacgtcgttgttagtcggacagaggatggcgttgtgtgctattgcgtccgcgttggccagcgggtcgtcgaacattgcttcagggaagcagaaatgtatggtgtggtcgaggtcgtccacgaggagttccggcggaatgcgaagttggttggtgaagccttgggtgtccgtacccacgcggtgtattccattgccgatttcctgtagccagtcgcgcaaagattgttctccctgtgccgtccgcatgttgatcgttaggctaaaacataaatatgtttgtaaaaaacaaagttgacaaattacctgatttttttgaacagacgaaagagcgctcccatcttgatcgacgtacccacttggtcctcacgagttccatgctcgactacgggagtcagttgccgccagtcgccgctcaacaccaccactttgttgccgaacggtgtggcatttgcacaaacgtctcgcaacagccggtcgatgtagtcgagcacggtgttggacaacatactgatctcctaaaattgttatcatgaacgaaaagcaacttatgtttttgtttacatcaatgatgatcagttgtgcgtggcgcagttgctccgcttttgccgactcgaagttcaacatcggcggcgtctcctgcgacacgtcgtttggcacgtagaagtgcctgtgtgccgttcctccgccgatcagcaacagagcggcgatcccggtgctggcggcggcgacaactgtgtcccgctgcagtacttgattgcgtacccactgtgcgttggcgtttccatcaaagggaggtttgcctgcgatgcaccacttgatcagcgtgttgtagaagtacgtcttgcctaaaataatattataaaataaattatatttttaaaaataaataagccgttaccgcatccgcccgcgccttcgaggaagaacaacttctggtcgcacccgccaagaattgatgttgagatcgcgtcaaaggcggcccgttggtctgtgttgaggcgtccaatctgttcaacggcaacttgctggggtggtttgcggcgttgcccagcatcgtccccgtagaagctgtccaagatgttgtcctcctccaggagctgtgcctgatgttgaaagtcgtagcccactggtagtcctttgagcccaacgtccctttaaaatattttaaatatgaaatttattatgccaagtttactcacttggtgttcgttgccatgcagtttaagtaatactcaaggttgagcatcacctcagccgcgcggacttcggcagactttggcacagctcccgggtggtttgcagccgtcggcgggttcatctcgtcgaggaactcgtcgaacagcgcctgagggttggacggatgggcgtgcgcaagcagcatcgcgaagtagtgctgtagccgcttgaggtttgacatttctgcacaggcttcttgcatggctcggcggaagagttcgtcgctcacttgaagacccaagtgttggcacgtacccacgaaagtgccaaatagaacgccatcaatggtgcgaaggtcggcaaagctctttggtcccggacggtggagcagcagtgttctatttgattgttttattaaatgatttcattttaaatttatcacctcaaggcaaaaagttcatgcttgcgcggtgacacggtgtacacacgcacaaacattttcgccttgtccgggtcttcttccagtggacgcacccgcttcttccatgaccgcgacctgaagtcccacctaaatagcacaaaatatttactaatcaaatttataatatttatttcaactcacgagtaacgatatggcactcggtcgtacgtcaggtgcgctgcctcctggtcccttgcgcagagtgcgaagaacgctgtaagccgggtgttctcgcgaaccctccaccgtccttcctcttcatgtccttcttccacaacaatcgtttgtccgagttcgtcgtgcacgctgagtgtgtagatttggtgcgacgtacccacgattttgtatgagttcagtcgaaggtatgcctccatggcggtcatgtatcgcactttgaacgtggcggcaatttcgtcgtagtcgtacacttcgtccgcacccgcagttccatcgtttctgccctgttgcgccgatcttcgtggctgtgcgacacggacataggccttttcaaaccctgaatgttctggaattattgaaaaaaatcaaaattaataaaataacaaccttttaacaggtatttgaagatatacttgcaggccttctgtccaaacacgtactccacattgatgtggcatccgtatttgagcagaagaaacggattgtatgggatgacgcggctgtcgtccatcagaatagcgctccggaccccccttttcttcttgtaatgcgtctggccatgttctcccttaataattatattttaattaagttttaataaaaataactggtacatgctgcctctccggaaggcgcccttgatgtggcatgcgctgatagcgcacttcggcccagtcccgttctgggtcagcagcgggatcgtgatggtcttcgtcatgttggttgtcggatccaccagttcttccaaagaatgcatcactctcgtcgggcggtatgcggacatagttcgtgtaacggacctcttgaaatttttagaaatacatttcatgtttttagatgacaagatggttacccgagagctctgtcctatccgagtatggcttcggaaaatgtttgcggcaccgcgaaccctccagacatgccgcattgcagtcgtgcagcatcattgatgttacgttatgccagaggcgacgctgttggtgtgcctccggagattggtccgaagatggcggaagggcagggatgcgcgcgcagacatattcgtccacgtgctgcggagtgtcgatgcggaccccccgttcaagaatcaggagcatgtgtatgtgtggcatgccttaatttatttttcttttcatataataaaatttaaattttacctcgtttctggtgttccacactgtaacaccatccggcaactttgcccagcacaccacgtttatactgaatagtgtgctatctgcttaggagggaacacgctgaaaagagacgccaatggaagtgtacaggcacgcagggacctctaacatgcaagatgctggggcataagtgcaggcacgcagggacctctaaagacagagagaattcaaaagctatccagacgttaaaatgaaatgcttagctagcatgtaaaaaattccatcaatcaaaataatttaattatttaatcgtaatatgttgcaagttttttcttaaaaaacaaaaatttaaccgtcaccacaattccgcgactcggccaaaggtgcaacgtagtagtttggtacaacatatatttatattgttgcgacgaacgtagggcgtcataactcattattttaagactttctatcgaaaaagaatatagaaaattactcaattaaattatcattgctctgaatagttttttaaatttgtaccaaagttgttagggatttgatgcaaaagttgtgcaggagttgtaaagttgtttaaaaagttgtaaaatttgttcagcttttgatgtcatttttcggaacgcagtagtttggtcagggatgaacttataataccggaatgcatgtagggcgtaataacaccttatttaaagcatttctatcacgaaaaatttctgaaaaattcaaaaaaatttttcaccctcagaatccggcattatg

SEQ ID NO: 4221 - DNA, 2966 bp, Heterodera glycines
  unsure (1)..(2966): unsure at all n locations
ataaaaaataattcaaataaggcaaaaataaataaatatctttttactacccataattcatatttcaaaataaataatggcattgataaaaactataaaaaaccatacacaatttaaatacatctaaaggattttaataaacatgtattaaaataagtgtgttaaacttggaaaaaagacacaacaggttccctcctcaagaaattattcaattgtaaaaaaaactaaaaactaaatttttcagatagttgaaggagttttaataaaataaaattttatatatttcccaggaatcataacaaataaatttgaatttcttggaaaaacaaaaaaattttcatcataaaaataaatgttcgacatgaaaaattttaaatagtttaaataaaaataatttattagcaaaaaataaacttgacgcaatacaatattattaacactgcactgctcatgagagaaaaataaataaaaatataaaatcgcataaattcatattttacagaattataaaatttatattgagattgttacgtagtcttttaattaaatataaaatttatttaaagatacaatttaaaaaaataaaaatgaaaatgaaaataatttaatgtaaaatttggttttgaaataataagatatacaaataatgcaacttaatattttttaaacaaaaaggaaaatatttatgcaaaatatttattatgcgtttatgatgtatttgtatatctttatgaaataattaattttctctaatatacatcgatttgtgtagtagatttagcacattttttattagtccatttattttttactattcattttttctcgttactacaaataattagatattttaaattatattattactataaattcaaaaacagctaagataaattgataattcttcccctcccccgttcccgaaagttttggaaaaaagcgccgcaaaaaatcaacttcgatttttcgttctcagaatttcacaaaatgcttatttctaacaaaaaaatgctcaaattgatcatggaaaatcaaaaaaataacatttgaaaattttacgtgttttgaataaattttgtaaaaatgaggcttttttgcctgccaaatgaggcttttgaaaattttaatctgggagccctgcatatgaacaacaaatcataaattaatacggagataaattaattacaacataacaaaataagacagcttataattttttaaaaaggattttgtataaaatttaaagatataaattgcccaaattaacaaatctaattttgatttatgcacaatttaatttattatgcacttttacaattttataatatcaaaaataattatcaaactttacgctttcatttaaaaaacattaaaaaattttagagttttaaagttgattaaaaatattaaaacaaacatgactataacaatatgcataatatactttatctaaattattaggaaacaagcatttaaaaacgtaattaccttctatcttataagaagctggaagctttcttcaggctaaatacggaaattgatcaacaagatttagaatagataataaaaaaattagaattttcttaagtaacaattaaaagagtgtatgggtgcatttcttttgcattcatttattttgccttctatcaaattattcattttaaattttttagtgccattctaatttataaaatagtaaattaataatttgcttttataaaggcaatttaaattttgtccgtaaaaataagccaatatggtaatttttatattaatttcgactgcttaactataattgaaaattgcatattaattttatagtgatttgaaatagttgatgataaacgttaaaatttaaaataaacaaagataatgagcaaaatcaaactcataatttcaaattaaaaccgaactaatttgaattgaaaaaaactaatttttttacacaattcaaataattctataaaaattagttaaaattcttttagtaattcttttattttttatgttgattcgtgttattaattataatgtactacatttatttaggaattattcactcatgatttaacaaaaaattagaataatttgtaaatatccttttaataattataaaataattatggcttttatggcaaaatggtgaataattcttttaaatatctctctttttgtgagctaatctttttatttactaaaccataaactattattgaggcctttttgtgaatcgaatgaaagcatgcttctttatgtaatatttgctaataattgattttgtctttgtaattatttatcgtgaacaaaaaaaattcatataaaatatataaatgaaaattcagcaggagaatttgatacaatcaatgtaccttaataaaagtttatttaagtcgatatttttgaataatgcttttttaaatttatggtatttttatcttttaaaataattgatttaaaatttatttaatattttagaaatatcctaatactttataaagctatagcggaattcattgatttccattaattaattcgtgttttattgatatcgaattgatacttaataattattaaacaaatatatgttacttaccttattaaataaacatttattgtttagctcaaaggttttaatggttccttgttatgtttttatcttctgttttctataatttgcagcattactccatacatttcaattagatacaagcaaatttttcttcatttggaatataatattttattgctttctaattcttatcggtgtttttttgcatatttttttatagtttggaaaaaatatataaatttttaatatgagccattgatattatcattgtttatttacattccattataaaacaaataaaaaattttcgaattcttaagtctaaaatctaattaaagccattaatattttgtttttatttgttacgcangtttttttaatataaaaatatataaaa

SEQ ID NO: 4222 - DNA, 2142 bp, Heterodera glycines
  unsure (1)..(2142): unsure at all n locations
ccagttgaataggcttttatattacattaaaagaatcgacattcagcgaaatttggaaagggcacgatcagagaagcagaagcagtggtgaaaatagtgtagaagtgatagaaagaggcaaaaattggcattttttcgggtgtatgcgattgaatatgtaagctatgaggggttgcaaatatagcatgcatagcccaaaagcttcacaattttggcatattgattgaatacattttattgcctcttggcgatttttattggatttggcaatatttctactgatcatcctctcccatcggccataacccatgtttttaaatcttgcataaaattgtggattttataaattgtaggtgatcgaaattttaacaacaacaataagaaaaattaaaatcctacaatttaaatttaatctatcattttttttttatattttggttgtttttgtacatatttctaacacatttcgtgattttttacatacatattttgcgattttcttgcatataatttgccagtcctagctataagttttttttagataattttatttttttttttttttacatataattatcccaacagcaaaaataatcattatgtaatttttattacagataaattattcatctttaacaacaataataaaaattaaaatccctcgtacaatttaaatttttcattttttttgctccaaattctttcacatcaaaacatacatatcatcaactcacttaatacgacatggagtggaaattgatgagaagaagaatgtgagtgatgaatgcatggacaatttgtcaaaattggaaccctccaaaaaagcatttttcggcgcaccaaaagagagagaatttttgggtttggcgcggcggcggcgctgtgtttttgggcttgggtcagggacgagtttaacgccgcaataaataaatttttgtgtctttttctacgcccctcccccctaatttgttgtacaataccaattaaaaaataacattttatattcaatgttatgttatgtttgttatttatttgtcgatgtaactgatgactgaaaaggtttttattattattttttttcatttacccatacatatatttttttctcaaaaatatcatttttaattcaatttaaaaataataattttttatataattaaaactgtttttgttggtgccaaattatttatgatggcatcagatcatgctttttcattgtactaaaacaaaagttgcttttttcaaaaaaataaaaaatttttacgtccggtaaaaaatgtttttattaaaattaactgagttaatcttaaaatatttattgtttttagactttttttagtgaaattggcaatatttttgacttgtgtgtttttttgtcaatttgttttaatttttatattttatttattttttttaaaatttatttatttatttttaataatgagaggagccgtagaatttgtcccatcaattttttgtcaatttcgattaaattttattatatcttttttttgtcaattttccatttactttaaaatatatttttatcaaatgagaggggcccaaaaaattttgtcccttcaaattttttgtcaaatttctttaatttttatttacttctgcatttttttttcttcaaaaaatatttttttaccaatgcgaggagccgaagaattttgtcaatttagtttaaatttatattttttttcgaaaatatattttttaccaatgagaaggttcgaggaatttgtcaaatcgagtttttgtcactttttcactaattttttcatttttttttctcaaaaataaatttttattttattttttttaccaaatgagaggggctgtcgaagaatttgtgtcccgtaaaatttttctctcgcgcaagacgtagaagagtcgcgaccttaaacggatgacgacgatgacaaaactcttcctcacacactcacaaccacaacagcacacagtcacattaaagcactgcttgctgctgccgttgctgtgaaattagggacgaaagaatttttttgggggtccaacgcccaattttcccgtcaatacacagaaaaaaaaattcggttgattttgaccgggggaaggcaattgaatgggatganattttgacggtgcttttgctta

SEQ ID NO: 4223 - DNA, 2972 bp, Heterodera glycines
  unsure (1)..(2972): unsure at all n locations
aatataaagaaaaataaataaaaaattctatttaaaaaatatacttaatttaattttttttngaaaaatattgaatttaaaaatgcttctggcaaacaaaagctgactttcaattctttctagctgttcccatttctgaaaaagttaaaagcacacgataattgtattatgatgagtcctttcaaataaatgcaaaatttaatttaatttgtttattattttaaaaggaattttatttgaataaaatgacaacatccgacaatgattcttatgaatcgtgcattactattgcagaagatccaacagaattagcagcacatgacaatgataaaattaaacaaacaaagcactcagcagaaaatgaggagaacaaatgtttagcaaaattagtgagttttattttttgataaaattaaatttgacgtggggcaaatccccgactcttacgttgaaaatccagtttttggggtttacttgacattttgaagaaccaaggcactaaatgctcgatcccaaatcccaacccaatttctagggtccacaaccaccaaagacttggaacctctcgatttttcgggatttcgtgaattttcctaataattttcccgacggcatttatgaccccggcatgaattcggccccaaaagtattcaacagggacgcacttgaattccttccaaatctcgattttggacctcagaatcccccttttctgtggtcttttcagttaatgaaacactaaatcacctattttccgagggtccacgaccatcaataaatgccttgtaaattcttaattttcttggatttcttgaatttttttataatttcccgacatctctgacccccggaatgcgtgcggcctcactggatcacgagggatgcactcaatttttaatattataattccactctatttttaattattttaattccactccatttttaattattttaatttcactccatttttcattattttaattccactccatttttaattattttaatttcacttcatttttcattattttaatttcactccatttttaattattttaattcattttttttccaattttttaggaaaacgttttgagcaatgccacagcaactgatgagtcagtgtccagctcgtccttcacaaattccatctcggcagcatccatcaattcaaggacagcacttggtgtgaaaaacaacaacaatggcatcaacaccaccaattcaacatcgtcggcattatcatcatcatctgctgctggtggtgctgctactgcttctgttcggcaccaccaacaacgtaatcgtgtcctctcatttcatctaaatggcactgtggtacatcgacggaggccaaatagtgcaagcaaaaatcccattcatgtaataaaaatttttatttgaattttttaacttgtttcggtatcattttaatagcgattagtctgttctctctatttacaaataaaattaaattttttattattcatttataaaaagattgaaaagaaacaaaaaataattttttttttcgtttctgcaccgcgcgaattctttcttttttataattattatttaaatttaaaattaatgaattaaaaaggaatttgaataaattaaattaaattattaaaaatttttattaaaatttatttcttttgcctgccaatttaatacagatgatcaccaatctgttcgcatcaatgatgggaggagaacgagctgcgcgaaagtatggcgtgaaaaggcaaatcttgcagcgaactcggagttcattaaggtgtttaattatacaaattagaattgatccgtcgaaacttaatcactttagtcaaacatcggcgtaattttaagaacgcttttgcgtacatcacgtcattcgtactggcagacccaaaatttactgatattttttatattacaatttttggccaatatttttgcgtatataaaattagcataggagtggcattgccgggtcccattttaccatttttttgataattaacccctaaatggcaaatggtcatttttaataacaaaaaacaacgactacaaatttctgattctcccttcagatttttttttattcggtcaacaaaaaaagactgaatatttttaattttttttgacgcattttttgcttagaagaccccaattggtcagtgttcgttcccgtggctctgtcttccatcaacaaaagcgtcgtgacatgatcaccacggatgacgacgacaaaaacaacaacaataatgatttggtggacacaactcgtgagaatgcttttgacatgttgttacgcttttgtgaaacgccggcggacgttgcctttctcaggagccatcctgatcagtaataatttaaaaaaatataatattgtaatggtagtgaacactgatcagtgggtctgaccaaaaaagagctgaaaatctataaagttttggtcctttttacagattttttccttacgaatttgttggctatagttaattgtagagttgagcgggaccgggacctgaacacggacaactgagtacaactgattaccgaagtcccgggtttgaccgggaccgggactagtcccgggtttttcccggttttcccagccaaaaattcccggtttttcaacccgaaaaggtcccggtcccgggtttgcccaaaattcccggtcccgctcaactctagttaattgtcaattcgatacaaagatcagaaaaaaaattgtgtcacacctctgctggtgatgatcgcgactgatcattccgagtatcgacattgtgatttcgaccattttttgagaggggagggggttggaaatttagggttccagtccatttttttcatatcaacaatttgttcactgttcattttaatgttacttttcttatttaattataatcaataaaataaattaaattttttattagtcttgaacgcctcggcatcccagttgagcagtactcaacaat

SEQ ID NO: 4224 - DNA, 3199 bp, Heterodera glycines
actgcgtgaggcagagcaaagggtccgcgaacggaaccttccacgcgagaaaaaaaagaaatgaaatttttaataattactatttaaatctctactttattattcacattctaaaaattgaaacccaatttttatttttgattaaaaaggctcttagtaagaattgttattatgttaaactattaaggctgattaaaccatttatttgaatttgaaatttgtctttgaatttttaaatacaattgtgttcatggaaataaacgacgcaattgtttttttgaaaaacacaattttctttgaaaaaatctgatttcaaataacattgctattgcaaagaacttggcgttccgtcactccattaatccatttgcagtgagggaggatgcgcgtgaagcatgctttgaaaaaaaaataaaatttaattcttttttaaaatacatttattttactcttggcgccaatttttatttgttttcttaaaatttattttaaaaagtgaatgatttcaaaaaatcaattagaaataatgaaaacattaaaggttttgcattttttgatttcacaaaaccaaaattttgtacggagttaaaaactaattgtttaaattcattttttaaattaaattcaatgtattttgatcattccttacacttcgattggcactcctccctatgcccttttacgattccaataagtgcccaacgcccatcggcaagttgtcgcatcaatggtgcaccagaatcgtccttttgaaattaaaaaataaattatttccgaatttttaaatcatttttttatcatttcaaggtaattattgtgtttaaattgattatttaaggttaattgatgctcaggttggtctaccactgtagtttgtcgcgctttatttgttgtacatatcaaatttgtcgggcatggtttgttgacacggattgtaatgaggtcttcgcgcagggccgttgtttctttcagatggtccgagctgttttcacgagctaaatatcaaaatatgaaaattgcaataacggcatattaacgactgagtttttttgaattaaaagattgaattttcagaataattgggattttgtaattggtccaaaattgcttaattaaattataactgacccccaaaagtgtcgccgtatccggccatgtaagcaacttggccagtccgtggattgtacgtagcgggcatacaaattttgttgattttggtgctcacggacactgggtgttgaagctaagaaatgaacaaatgaattaactcattaatgatctatatctttcttaattacctcgagaatcgaaatgtcgtcgttcagttcgtgctgcctgaaagtttgcagtttgaagaagcgcttgatgccaagctttgacgaattccgaaaatcaccaccgcctaatgttactttaacatacttgttggtgacaaggaaactgaaaattaaaaaatatttatgaaaatatataagttttgattattagtgaaaaatgtaatatttttaaaaatttaaaacaccttgtgccctcgtcaaactctccttgaatttgattgtctttgcatttcatgaatgtttcggcaggcaaataaaggcaatgagcagcggtcaccaaatgcttttccccaattaaaacgccagtacacaattgaagaagctcgatttggtttgtccgcttcgtcacacactccaattggacacttgcgacccatggccattcctcatttggtgactgttgaccgtactccacctgcgagtacagtaattaaaatttaaaaaagttttattattgcacattttttgaatttataatttatttttgtcactggttattaaatgaaaaaatttatgtagttaatttgttaggagtctttttatccagctgtgttaaaataattgtttccattttttcaaaatttgtaataattacggagaaaaaataactgtatccgtagattattattattttttttactctgttcgttgccgtttggccacatctaatcccacgatcgcggcccaaaatctcttcggcctcttcctcattttcaattggcttaaaaatccgcgacgcattggcgatggcgacttcatcgcgcacatctgcatgaaatgcgtgccatgcagtgcttttgtcgttgcgatttatgcccttttgaggcaaaaatgccgacgcaaaaattgaaaggcaaccaaaaataaggaaatgcggtaacagattcatttcttaatttaattttgcaattatttttacataaaaaaagaatttttattaatttaattcgacaattttttattacaattaaaacaataatttttattaatttaattcggtaattatttttacaattaaagtaagattttcactaatgctttaataaaggatacttaattcatttatgtaaatgggcaaaaaattttctgggcatgatgaatattaataatcggacagaaaatgtcaattgttggggatgacgaataattggagcgctaaaatgaatgtcaaatggtgaaataagctgacactttaacttgcatttgtcaactgctgctggtgcttgtttgcaacatttaattataaattatcggcatagttaagtctcgattgaactgtttaagaaaatcgggaaatcatgattgagaattgaatggaatttatcattatttaagcgagaattgaaacagaaaaagctgagagttgcaggaagtggctaactaattaatatgttagactctcgtgagggaaaagtcggggacaattgggacggggcttaaccctaatttaaataaataattttttgttgaaatatatccatatatatttttgttgggtgaatatttaatattaatctgtttggtgaagcagagacagcactaatcagaaagagatttccagcagataatggcgattgattatagccgaatgaatcgctcaaggtaacgtggatggaagatttttagggcttttactgtgtggtgaatgttaaatgatttagggttttagcttctgaagaaaataattttaaatttcttaaccttttttagaaaatttctacaaaaattgcgtctgatcatatcattcaaaaattgccaaaaaaaattatggtttcatctcgataatcatcgccatgattttgtttaccacattgtcgccaggaggaggcatgttcaggatatgagataatgacacctgaaaa

SEQ ID NO: 4225 - DNA, 3884 bp, Heterodera glycines
tttccaggttaattttttttccaattttctttcttttttttttattttcatgcctttcttaattttttcaaaatcaaattcatatccaaaatttataacatttttccaaatcatttcattttcaatgttctttttctcattcatatgcatttctttcaaaaagaatcaaacattgttcttgaccgcttttttccggagctttgaaccgggtttaaccgcttttttagacgggagcttggaacccgtttggttttcagagatttctgaggaattattttgtaaagaagatgaagaacattgaagctcagagggaaataattgtttagttcgaaccattgcaaatctaaaaaataatttttgaatatatttttatagctattgagagcatttcataaaagattaaaaacaccttaaaaaattatgaaattcaaaaaaattatatcaaaaaacgattaaaacaaaaataataatgaattattagaaaaaaaatggacattcacaaaaatgtgataataatttaaaagaaaaatattaatgataaaaagttcctttaaaatgaaggacacacaaaggaaaagaaatccattcggaaggggaaacgtaaaaacaaatgatgaaatcaaaaacgtaaataacaaaataatgaagtgttctcttcccttcatacataatcttttattttatttttctcttcctttaaaacataacgccaagcaaattcaaaaacacaaaaaggggcggagcttcctctcacttagtatagagtaagggataaaattttttcctttggacgtcatttttcgtcactagaaatcacttttttggcgttttgtcactatttttcactatttcgacattttttggaaaatttattaacaaaaatgcaataaaatcaaaaaatacacccctaagaatcgaccaaaaattttttttaaaatacaccactaagaattggaaaatttttcaaaaattcttcccccaaatttttttcttgacaaaatttttgatttaaaaaatgtcaatatttgctaagagaattttataacggaaatgtagctcatttgcagctgcaaccagtgaataaaaattattttttgctcaatttttggctaaaaattatgtcactatttcggacttttttcactattttgtcactttttttggcactttttcgacactattttagttaactatttccggatttttagtcactaaaagtcgcggccctagttattactattgttatttttgataatcattagctcaaaacttatttataatttgctttatttttgttattttgatgaaattatgtgtcacttattttttttaaatttgattattgtacgaaacgcaaaattgaaacgttgtacgaaccggcttttgtacgaaactccattgtacgaactcccatgaccccacgttttttgtaggattcttcaaaggtttcagcgcaatttgcacaaagaacaatcgcaagagagaaaatgtccatttcgttgaaacattcgcaatcactgccattgatcagatcaaaaaacagttataatggaaatttctaaaattcaagaacgcaaaaaaataggtatatgaaaaatgtagtttacttaatcggttttttttgttgccataatgggtttattttttgcttccactgaccattttactcgtttcaccgcatgtgcttttttttaaaacgtatttgccattcacgtacgaattccatcccctgttgtatagccttttttacacatatgaaagagaatatcacacaaaaagaaagaaacataaatgatgacaaacaattaaatggaataataaaacaaatgaacggcaatttgtcagcggagaaagtgctcaaaagggtctttcattggttgccctttgttctgtgctatgccaccatttctcgctgccccttctgtccaatttgtttctgtcctcttcacggtcatcactaattggtcaagggcatcaaatgggtctttcggtgctgtcgatggccgtgtctcaaccattcctaaaatatgaatttgtgctcttccgttagttcgtttctctttgtctgctaatttaattttgccgcttctcccctttacctcttttctgtacgggattagcactgctattcggctgaggaattgttgggaaggcggcaaatgaggccgattgtgaaatgtggggcagttgctgattttgttgttggtcaactgatacggaatgagatgaagttgtgggcaagaattcggagagtaaaagttccatgcgattcgaagcttcgagcgaactctgcggacgttgttgaaccgactggcgggaagagagagaagacagcgaaaaggggtcgaacggagcgtttttcgacgccgtcaatgttttttccatttcgaccacttggccgtttttctctgccacaatgcgccgtttttcatcgagtgaaagtgctccctaaaaagttcgaattaaaaatgaatggcacacaattaggggatgggacaaaatttcgccgccgaaatttcgccgcgacataatttcggataagaataaaaaagagttatatagtcggagcaactcgtttaatcccccgttttttctcatcgtaaggcttttgttgcgtttgaacatcaatccgagtcccccccccccatacctttgccattgtttcgccactgttttctgtcgtcccactgtcccttttgtccgttgttctgttgcagatgccatcatttgccgatgtgccgctcaatgctcgtgccaagtcgcccaaatcgacttcgctctgattggttttgttcatttcattcgattgggcattcagaaagtccgcaaagtcagtgattttccttaaatgaaaacaatcgcttcaataacaaatgcgagtggctcctctccgtccacctttgttcctcctgactggcactcagctgctccaaacaatgcctttgctcggtttcgacccgtcggatcagttgatggaccagttccatgtactggccgaactgttggaggttcagagtgggctcgactgcggtggaaataagataaggtagcacactccgagcaccttggacacaaaatcagctttcatcaattagtaattatatttttgttgatgaaaaataaattttttaaattttcccaattttgccctccctaacattgctctttgttgatcccgaatttggtgttttcgtgaacaattttgtaaatgcccagcactgccatcaaaacactcgggtctttgctggttattttcggtaaagcgggcaacagctgatcagtgaccatccaaggctccatgtggggaagcaatttggccagacaaaccattgtttggacacgaatctaaaataagaaaataatatttctctccccccccccattattgcaaaacaatcaacttataatgtcaaactctttacaagtgattaaaaataaaaagctaatattataaagcattttttcgaagttttgaaagtaaaataaaaacgaaaaatgaattttagaaaaagtaattgcgattttacggaaaggtcctttgactcgagcataagacggatgagtttggggatcaattgagttcgcatttgctctcggtcgacaaatttgacaatgttcggcacttctataagggtcaactcctagaattttgtgggaataaaaaaccaatgttaggtttcttttcaaattgattaactgaaaacctgcctggactctgacattgtcgccggtgagagaattgtaaatcaaagggagcaaatgctgttttacagcatccggggccattttttccagaaagtaaaataacccgttgcataagcaaaagaccaatctgaggggataaatggggtgaaattaagcaaattgggatggatttgggcacc

SEQ ID NO: 4226 - DNA, 1328 bp, Heterodera glycines
ctatctctttttctgctcaacagtaataggaattccaaccgcattctcagaacaattacgccgatactaattgttctggaatttgtttctcggcgcgtttgtttgggagaaatttggaaaattggctatctctttttctgctcaacagtaataggaattccaaccgcattctcagaataattacgccgatactaattgttctggaatttgtttctcggcgcgtttttttgggaaaaatttggaaaattggctatctctttttctgctcaacagtaataggaattccaaccgcattctcagaataattacgccgttctggaatttgtttctcggcgcgtttgtttgggaaaaatttggaaaattggctatctctttttctgctcaacagtaattgttagagaaggaagtaattattgattaggtgtatgaccccacgccacttcgccatcttccccctcccattcccctcattcagttgttattgtgcccaccaatttgacctctccaatttatttctgcatttttatttatttatttcttcggcaaataaacttatttaattttttatcttcggacataacaaattttggcgcagtcagcaattaactgcacatcaccggcaaagcaacaaatccgagctttatctcgtgttgatattgctcgagagggaaaattagaaagctcgtgttgatttctaattttcgcagatcatcaaaaacttttctctccgtgtgagattaaagtctgccgtgtgcagtttttcttcaattggccatggacccgcagcaacttcaacaattgcttaatgcactgcaacaaatggtcacaaatgccgcaccgcaaaacgccgcaccagcaaatttgagcaatgccaatttggcaagctctattgatgctcggctttcagcattccattacaatccggaggtcggcaccacatttgaaagttggttcaaacggtttgggaaattgatcgaggacgacggaagcacactgccggaggcctcaaaagtgcgccttctcctcggcaaactcggagaggaggagtacagcaaatatcgggacacgatcagcccaacccagccggaccaagtgaattggaatgacacgatttcgcacctcaaacagctttttgccgagacacgttcgctgtttgtcccgcgctacgaatgtgtggaatctgccattcgtaattttaaccatttttgtttttcgcctttttgtcccatcccaggccttctggccgtccatcatcctattcatccaaaatttcccttccttttccaattacctatttttatgacatttccccaatctctcttggattc

SEQ ID NO: 4227 - DNA, 4591 bp, Heterodera glycines
  unsure (1)..(4591): unsure at all n locations
gttttccgttatgaaaagctgcaaatgacaaaacgccnaaggaaaaaatatcgacgaaagtgtcacagcgaagncccctcagcaagttcgggagagacaaagtccaaatcggggacaaagcgccgattattcattttgactccatccggggancggcaaaattttacctgtttatgatcgattattggttaaaaaagcatttgatttatagggcccggattggctacacctcttttgagattatcccattccgagactcagtgagaatgccaccttacggagcctcgacatttgcggccccgacatttgcacctatgtccaaaatcggattcgaagtaaaattttttcaagccctgatagccgaaatagcattaaatttaaaacacattaccttctagtttattaggaacattaattcatgatcaaatgatcggatactgtggaatctgccattcgtaattttaaaccatttttgtttttcgcctttttgtcccatcccaggccttctggccgtccatcatcctattcatccaaaatttccttccttttccaattacctatttttatgacatttccccaatctctcttggattcccttcactcacatctcactcacaatttgctatgtaatatccttctgttcgcccctcccaatttgtggcactatttaagcctttgcttctctcattcagcacctttttttccccacacattcccaacttcagacaaatcctaaaagcgatctttttcaactgttaattaatttctttgcatttaatcacatttaacctttcgttttacctttgctttctgacttaaataaactcttttccaaaaacccttggtcaaaggaaaaagggttaagaaccgggaagtccaagtggtttggacacaacaactttttggtgccacgacccgggacccctaaaaaggaatttaggggaagcaaaggccaagagccgaaaaaaggctaagtgccggaaattttgagctggtaagagctgtgtgcttccagccgggctaagtgccaacaaacgagtgaatttgagctggtcaagctgcgtgcttccagccgggctgagtgccaataaaaacaacaggaaaagagctggtaaaagtgtgtctttccagccgggctgtgtgccgtacttttgaaaaaaaagtaaattacgctgtgtgcgcataaaaagtaaaagagagagaaaatgacgacaaatttgcctcaaggcaaagaagctcaaaatagtgggtcagattttgatccgatttacttttcgcctgaggagaaccaaaaatgggcgaatttgctggtcaggatgagagcattcgagcaggctgtgtgccgacaatttcgtcaaattgaaacccaatttgttcaaatttcgagtcaaattcaaatttcaaacactgttgatcgtgtccgagaattagagtcttctctgagggaactcgagaatacaatggaaatggacacatttcagactcaggaaaaaatgattgatgttgaacaagaagttggtaaagtgaatatgagaatggattatcaggaaaggctgactaaagtgcgtttcgggaaaataattgaaaaaatgaaggccgaagtgagcaaagttttagagagtcttgacactctccaggcaagagttcaaattttggaatatgaacaggacgaggaaattggtcgaacaatgtggatggaggatgggcattcagaggaacatgcccaattgccgaccaatcaggaagaaaacggagaaaataatcaagtgcaggaagaatgtgaaataatgatttcagacccatttttgggcgggatatcgccattggaggggtacgacggaaacccaagtgtttcattttcgcgatgggtggcccgttttgaggatatgctaactttgtacccgcagtatacggaaacgcaaaaattaagcagattacggattttgcttaagggccaagcgagggccgaattcgaagcaatggaaccccctcccacgagtttatccgttgctttaggccatttaaagagtaaatttgagaatgagaatacccgctctatagcaagacaggcaatggctagctgtaggcaagcgcccggagagcgcgtttatgagtttgccaatcgcttaagtgaagcggtcagaactgcgttggcgggagaaaaagaggaaataataagaaaacgtctttttgaggaatttttggagaaattaacgccggaattgcaattcgaagtgaaatccggcaggccatcaagctactccaacgcttacgaacttgctcagcattttgagctacttttggccacaaaaagggccaatcacgtctcagttgctgattcagttgccgaattatctcataaagtcgaagcgctgactattcatcagcagccaattcccaacagaaggggtagcgaaagacgcgcctgctattactgtaaacgccccggacacatagtaaaggattgcagagataaaagaagggacgaagagcgcagatatcggggagatcaaagggatggccataaatattttggaggagaaaggcgatggagtcgagagagaaattttagagacaatcgcaattttgcccccaggggaaggggccaaagggatggaaggatccatcgcacacccaccccttatggtgaagaaaatggccagaattttgaaagtgcgagaagacattcgcctgggcggcgagtaagctttggcgggagagttggagccgcaagaattgcgagtccactttttctggcactaattatggtcatatcgctttttggtcgtaattcagcgaccagtcaaatggctagtccaatgatatgccatccggactcaccagcgagtttgtggtctattccggtggacccgatttgtcccacttggtcgccaacagagataccggtcacaatgaaattgtctgtctatcgattgaacacaatacagtataaaactgcggcgacagcttgtaaatgcataaagacaaaaatttctaggagaattggattttttggtgggcgatatgaggaggtggcaacaagcccaattgaaatgcctacggcaacatgccggaaaatgagagaaaatggagaatcgcctgcgggacaattagtacagataaatgggatttttagggcaacccaaaattcgttagaagttgggtggagaaattggccagcggcgatgttttggagatcaacggaagtgagcaattgttatgcatatgaaactgttgtgttcacacgacacggaatggagggacttaacacaccaacaaatgattgtcccacctgtgcttatcagtccggaagttgccgctgtccacaaatcagcttaatttggaaaccggacttaactcaacggtgtgcttatgtaaagattgccgagtggcaaggagaatattcctcacgcatatggacagcggaaagtggggattttgccctaacatttgtaaatatctctgagaaaacggacaccaatggaaatgactttgtgatctctgatcagacattcgctgtacccaaagtggaatttgttgaaatgttaagaaaaagtgaacaggcaaatacaaaactaagaaagaaaaggtcacatgcatttattaatggggttagacgtgaatatgtaataaatgagacggataccactgtaaaatggcttgagccggatcaagaaacaaaggagttggaaaaagttgggctggtgtattcctcgcagctggcagcacagcttacagcgttaagtgtcaaagttacagcaaatacacaaaaattgtttgctgaaacagtgcataaaatatgcactagcctccgatttctcgccgatcagacgttgactttggcggaggcaaatccaacacttttggcccggtttttcctagcaaacccttatttaacggcacgattggtgacaaaagatatgttggaaatcagaccatgttttgcagtaaatgagagggaactgcattttcattggcaaaatggaagatgttttgagagacttccggttacatttcggctttttggaagctatgaaaaaacgaaacatggatttttagacccaaaaacgctaattatacactcaaatgcgagagaaaatagttgcaaagatttccgatacttatatgtgcagacaaaagggacacattctcagtatgaccaaataactggggatgttaaagaaatttcttcggaatcgatacattatctctcacgtcaaggaaaaatcgatttcccagaaatgccaatccaatttttcagaaataaagtgatcgcaaatttgtccgtgttgtactcaccggataattttgcggaaacaattgaggttgctaaaatagcacaagaaattgttcggttgaaccgaccgaatgcatgggaatttatttctgaaaagagtgatcatatggccacaaatattgtctcaaatggacttttctcattcctaaggggaggtttaatttcggccaaccaaatgtgggtgttcatttgttgctgttatgtttcaatcacaataattgtgcagctgatattgccagcaccgctggcacagacaatgcagtatttgggaattggagggatattctcaataaa

SEQ ID NO: 4228 - DNA, 1099 bp, Heterodera glycines
  unsure (1)..(1099): unsure at all n locations
tatgtttacaaaacccatgaagatgttttttccacccatgattatgactcgggggaatgttaaataaatgccctcccattttgacaaattcanatgtgccagagcgggtcaaaccatatcccgtaccggaaaaatacgagaaagagctgaaattgcacatgggaaaatgctcgaagccggcgtaattaaagagagttgtacgccatgggcccacaacgttgtgttagttaaaaaatcgaatggccaattgcgcccatgcgtggattttagaccattaaataaaataacaattccggatccgtatcccattccacgaatggacaaaacaattttaagagttgccggacaaaaatattactcgacattggatttgtcgtcgggtttttggcaaattccgctggattcggaaagttcctataaatgcgggattgtaacgccttgggggctttaccaaatgctaaagctgccctttggcctaagaaatgcaccgagtgttttccagcgaacaatggataaaattttggaaggaatttcgaatgtaacggtttacattgatgatattttagtccatacaaattcaattgaggagcacttgaaaacgttggaattagtttttgcccgtttgcggaaaaatggtctgaaattaaaaatgagcaaatgcatgtttttgaaaaataaatgcacttatttgggccatattttgactgaaaaaggctatagaccttctcttaacaatcaagaggtgattgaagcatttcctgagcctagaaatgcaaaagaagtgaaaagatttctcggaatgatgtcatttttccggaaattcattcccagttttgcttctgtggccagtccaattcaaagtttagtaagaggaaaaagccccgaatttcgatgggaggaaccacagagaaaagcatttttggaattaaaaggcaaattgttaaatgctccgtgcttaagagcaccgaattatgggctcccgttttacctgttcaccgatgcgtcagccgtggcatatgcaggagcgcttatgcaaacccaaaatggggaggatttgcatgcggtggggtattggtcgcggacactttcaaccacagaa

SEQ ID NO: 4229 - DNA, 2848 bp, Heterodera glycines
agtgagagtgagtgatagtgagagtgagtgagcgagagtgagtgagagtgtgagtgagagtgagagtgagagtgagcgagtgagtgtgagtgatagtgagagtgagtgagagtgtgagtgagagtgagagtgagcgagtgagtatgagtgatagtgagagtgagtgactgagagagtgagagtgagtgagagtgtgagtgagagtgtgagtgagtgatagtgtgaatgaatgtgagagtgagagtgagtgagagctagagtgagagtgagtgagtgtgaatgagagtgagagtgagtgagagtgtgagcgagagtgagagtgagtgtgtgaacgagcgtttgatcgagcgtgcgttaagtgtatgagtgcgcgcgttatgcatgtgcgcgtgtgcattaagcgcatgcgcctgtatggccgtgtatccgtgtttgaacttgtatgtgcgaaaatgagctgtccaaataaatcccccgcagcaagaaaataattttttataatttttctgccaatcaatattcttcgtgacaaccgaaaaaatcggtgccacccaaaaaaatcaacgccagcagttaagaaaattaagagactcccatctctctaaattccaccacctaataccctcaaaaactgttgtaaacagcgaaccatttttattttatcgatcaatatgaaaatagtaatagaaaatgagacacatttgttttttaatattgtgatttgtgatcattatattatagatatgcacttagacatctcttctgtttaatgtccctattcttccctagaaatcccttttttttttttgttttcaacatatttttacacatattttcatattaaacggtaataccaacaaattaaatggtcgaaatgtcaacattaaatccgcgtccaaaattaccaattttaaattttcttatcctcctggcattcttttaccagctgtcacccattcccctgcttcccttagtacatcaataaaaattgtcgttcgcccagcggaaaatttaggtcagctgttcattccggatgttagattatatcaacacaacgagaaattaactttttttcaccaaagatattttattatttaatagaaaagaataaacagaacatcggcaactaaattgcaagaaaaatcaaacaaaaaaatttaaaatagtacataatatggtaaattaatcaaggatcgattaggttcaaaattatgctcaaccggctgatgggcgggattagtatttgtaaacaataaagtggaaagatcataagttgaagaggccctacaattataattaatacaacgatatctaatgccacgccgaattcccgtttctttctcgattaatccttcacttctaaaccaaatcccggacaatagtacatactttctcggtatgatgtcattagattcggtgatagtcgggcgacagtttgggtagataggatcgaacccatgcccatagttcaatatgtttttatacttggtgttccataattctgctgctcgagcggtgtcaccatcttcacatttaagcacataaagttttgctagctcaaatgcctctataaatgcatatgtatagacgccagagcatggtttagaatcaattccatatggaatccaagacggtggaccaaaattgtacgcaacagcacaatttaatccctaatatatatcaaaaaattttggctcaaagttttttttctcaccgttgaaaacccaaaatgcacagaacccgggagagttattataccctcaccagcacgctgaacctaataaaatataaacgttttttattataataaaattagggataatattttatatattaaactgatatggttataaaatttctttaaaaaaaataatttccaatcactatgataatgtttttgctagtcacaagcttcgaaaaaatattcaaaaaaaaatgttttagataccaaaaattactaaacactatgtaaaaatatatttttcttaaaatcttatctttattgataactcacagttcggatacatcggatcctattttcacggatgatattagggttcaccaaaattgacttattccgcaaatattccggatcatttgtgaattctttaacaaaaaaggttgagagcagatttttaaatttcaaaaaatctgccgccggaatcgaatacctgaaaatacattgtcataaaaagacccccctcccccactaaaagtaccatatagttatgccaacattgtcagttccgcttgaagggcacaataaattcacactataaaggtcagaattctcagtgtgggcggtaaaatatgagccggcttttcgtaaataaaaatagggcgacgtaattccctcaattggaacaccaagaccaccattatttgtcgataaaaactgtagttctaagatggagcccaaagatggctgccagtctttgtcacccttttgcataggcaattcttgggcatattcaaatattctttgttcttctgttacgccattccaaaaaacgctaaaattttacttctgtaaacattttctatatattttaagagttatgtcagtaaaaatacagggtgccccaaaggttctgagagcctattaaaattgttaaaactttatactcatctgtctgtcagacaaaatttccgggtgcaaactatctttttaactttttattatcctgtttatatgctaacctatatagatgggatggtcatttaaccaaaaaaaaaaaagaaatttaaaagaatttatttcaaactccacaaaacaggggccattgataattccctgcttaaattattagtgaacaaatagaccacaccttcatatagacgatttcca

SEQ ID NO: 4230 - DNA, 2998 bp, Heterodera glycines
gaaattaattttttttccccaaagatttttttttttttaatagaaaaggaataaccagaacttcggcacttaaattgcagaaaaatcaaacaaaaaaatttaaatagtacataatatggtaaataatcaaggatcgattaggttcaaaattatgttcaaccggctgatgggcgggattagtatttgtaaacaataaagtggaaagatcataagttgaagaggccctacaattataattaatacatcgatatctaatgccacgtcgaattcccgtttctttctcgattaatccttcacttctaaaccaaatcccggacaatagtacatactttctcggtatgatgtcatcggattcggtgatagtcgggcgacagtttgggtagataggatcgaacccatgcccatagttcaatatgtttttatacttggtgttccataattctgctgctcgagcggtgtcaccatcttcacatttaagcacataaagttttgctagctcaaatgcctctataaatgcatatgtatagacgccagagcatggtttagaatcaattccatatggaatccaagacggtggaccaacattgtacgcaacagcacaatttaatccctaatatatatcaaaaaattttggctcaaagtttttttttctcaccgttgaaaacccaaaatgcacagaacccgggagagttattataccctcaccagcacgctgaacctaataaaatataaacgttttttattataataaaaatagggataatattttatatattaaacagatatggttataaaatttcttttaaaaaaataattaccaatcactatgataatgttttttgctagtcacaagcttcgaaaaaatatacaaaaaaaaaaatgttttagataccaaaaattactaaacactatgtgaaaatatatttttcttaaaatcttatctttattgataactcacagttcggatacatcggatcccattttcacggatgatattagggttcaccaaaattgacttattccgcaaatattccggatcatttgtgaattctttaacaaaaaaggttgagagcagatttttaaatttcaaaaaatctgccgccggaatcgaatacctgaaaatacattgtcataaaaagaccccccactaaaagtaccatatagttatgccaacattgtcagttccacttgaagggcacaataaattcacactataaaggtcagaattctcagtgtgggcggtaaaatatgagccggcttttcgtaaataaaaatagggcgacgtaattccctcaattggaacaccaagaccaccattatttgtcgataaaaactgtagttctaagatggagcccaaagatggctgccagtctttgtcacccttttgcataggcaattcttgggcatattcaaatattctttgttcttctgttacgccattccaaaaaacgctaaaattttacttctgtaaacattttctatatattttaagagttatgtcagtaaaaatgcagggtgccccaaaagttctgagagcctattaaaattgttaaaactttatactcatctatctgtcagccaaaatttcctggttgcaaactatctttttaactttttattatcctgtttaaatgctaacctatatagctggggttgtcagttaaccaaacaaaaaaaaaatgaattaaaaaactttttttttcaaactccacaaaaaaatgtccattgataatttcctgcttaaaattataagttaacaaatagaccacacttttcatattgatcggtttccagacatggccactgtgtattttgcttgtaatcagcaatcgttttgtactcctctgataaaacgttttgatgataaaatccagaagcgcgcttttttaattggcattgacttaaaaaatataagaaattatttgatattaaaacaaatataagaaattatttggtaataaacaaacataaaaaaatatttgatatttttaagacaaaccgaacaagaacacggtttcggtttgtaattctgcatataggaagttgaaatgattccggtatgcgaaaacgaataacaccgataagtcgcgaccagacatttagcgatatgatgttatcaaaaaaataatcaatatttgagcccaaatcatcagagcttggggtgatcgttttggcgccgacaatagagtcgtaatcacacatttcgagattctaggcgaaaaaaatacaaaaaaaagcaaacaataaattttaccagacaaaaaggaacataaatgaacacacagaacccctaaccccaccagcccccaaccccaagggcttctgcccgccagcagacccctgaccccaccagcccccagccccacgggcacctgcccgccagcagacccctaaccccaccagcccctagccccaagggcttctgcccgccagcagacccctgaccccaccagcccccagccccacgggcacctgcccgccagcagacccctgaccccaccagcccccagccccacgggcacctgcccgccagcagacccctgcccccaccagcccccagccccacgggcatctgcccgccagcagacccctgaccccaccagccctcaccgggttggaagacgccgaaaaatagcaaaatatgggtgttaaactaaaaaccccctaaatatatttatacgggcttaaaagttaatccaaatcaaaaaaaattttttgacgcaaaaagaatttttaggctcctttctcaatagcgtatgagcaaagaaaatatgtaaatccatgcaacgcacaactctcgcgattgttaatccatcaaaaagcgtatgagcaaagaaaatatgtaaatccatacaacgcacaactctcgcgattgttaatccatcaaaaagaagaacgaatttaatccaaatatctatcaattttaaatggtgcagaactaaaaataatcaagaagatattcaaatatttcaagaacaatacaattttagtatatttg

SEQ ID NO: 4231 - DNA, 5758 bp, Heterodera glycines
  unsure (1)..(5758): unsure at all n locations
tttgaagctctatcgactcaatataaaaatttcgaaaatttttaaaattttcgagtttcccttaaacncctctaggatttcggaggccccttggtcgaaaaaaccaggctaaaaaatgttnttcgggggtaatntaggtacctgattatgtttctgacctttatttttcatttgggaagcttntaaactgtttttcaaaaaattcgaaaactctcagtttttggtccctgaaaatttgggcaaatgtttaaaaaaccgtaacataggtttgacaaggtcatttcttgcatttaaatattcaaaaaatgtagaaaaatacagagatttttatgcacattatttgatgtttttatcttaaacaagaaaacaaatattcaaaactttctgaaaatttttcgatttttcagaaaaaaatcagaaatcctttcagaataggaatactggattttttaaagattcaaaaaatccgtaatttttttctcttcaaaaaagtcatttacactttatagctgccatttctttaaaaaaatatataaaataaatagcgaatttgaatttccaaacaaaagggggggaggtttaaccaaatcattttcctaaacttttttcgattcataattatatgtgcattaatcacaaattgataactttcacttggatcaatattttggtatccgcaaaaaaagcgacgcgcgcatcggtccgaaatgtacccgggaataccattaggctgggggttttgcttggccggggtctctttacattttaatcgcttttctttggttttgcaattactctttttctctaattctctcatctctcctatgatgaatgcgcatctctctgcctaggggggggcccagatttttaccctaatactactggggtggcaataattatggcgttttaaattctttggctaataaaaaagcaaatttcactcattttggtcatttccattgaatccttttcatttaattcatttgatgattaaacaaaaaatttcattaattctttacagttaacattaattttttttagcaatttttaaattaaataaatttgctagaataaagccgtgaggtcccattacccagtgctaataggggaattaattccaggagaccttcttacgcgtccgtaattaggcccctcagggcttggaagggaagggatgatgatggatgcctggggacgtctcccaggcggggatcgattggccaagtctcttagatggctcccaactgactcgactgatcccgttggctggctctccattgccttttaagcgcccctcgggatgggaggagttatcggagtaataaatgggcgtgggaaaatgccatttccggtcaaggccttacactaggataacttttaggtagaacccaatctaacattgatgagttaagtccgtcgctttttaaattaatgattctgttttttatacacaaaaacctaattgacctaaaaaatactcaggctaaattcgaaaaaatagtgagatatcccggctggaatcccagcactaaaagactcccggatcgggaccatggcaaaatcgggattggaatccgagcaaaaccggggtattcatcacggaatcctattacggccttctgccaatcccaaatcccgatttttttcaaaattccgggctctatgaccaacaaacatttattttttttgaatttctaatttaaggtgacagaatgaaatataccttttattattttgtcatatttgctgtattttccgatttgcatgtaaaagcattcacgccaaaagatgaagcaggtaaatctgtaaatatttgttgaactttctctaagttcctgttgaaatgtccaacaatttaacaatcattcaaccagggctgtaaatggcgttataaagaatttcctaaaatacgaaaatctgctggctatgccccttagccaattccatgaaatgcttatgtaaatcctcgtcttcaataaatttcgaattttaaggcaccagcaatggacaaattgtcaattcgttggcagaccaaatgaaggaagtgttggacaatggagaatatccggatgttcaatttttggttgggaaggatgacaaaaaggaggcgagtcaaaaaaagcaaaaaccatatcttaatgcccaaggataaacaattacatttttagaacatatttttatgtaaatcttgtaaattctcgaaaaattttctgcaaaatctaaaagcaaatgcaaataaattttgaatatagtttaatgatcaatataagatcaaaatttcaatgttgataagaccaataaatatgcctcggtagctcaatggtcggatgcccacggattgggatttagggtgggttcgattcccacccgagtcctaacatattatcattatttatttgtaggaaaaattactaaattctcaagacttttccgtcagccttttaaattgaatttttgaccttttttaagattgtatcagctcatagagcaattctctccagtgcatccgatgtttttgaagcaatgttccgttataacgtgcaaaattcaaagaattcaattggaaaaggtaataaatttattccaaaatcatcatttctattaaatttaattttaatttaaggtcatgccactaagaaaaacttaattttggtgccagacattgaaattggcgcgttcaaaacgatgctaagatttatttatacgaagagttttgatggattggatgccaataatttgttagaagttttaaaagctggtgaaaatttatgattgggattttaaataaattactatttaattatagctgacaaatataacatcagtggcctggtaaaagaatgtgccaacttttgtgccaaagtttcaattaaaaagttgccaaatgtatttgtggcttttgaacaggctttgttgctgaatatggaggtgaggaaagaattttaattattaaactcattattcatgtatctaaaattattcttcattactgacaaaaaatttacgggtgttcgttttttcaaaaattcaagacaattttcataaattttttgtccagttattttatttttatagagttgtacgcgaccgggacctgatactgaaagaacgtacaactgagtacctacgtcccggttttgaccgggaccgggaaaagtctcgggtttttccctgttttgccagccaaaaattcccggtttttcaacccgaaaagtactggtcccggttttctatggtacgatccccgacgagttaaagtaataattatataattttttataatatttttatttttgggatttttctctccgttgtttgcactacattgatcgaaatatcagtgctttgatcaaatcagaatcctttttgcaaattgatcaaaatttgttgtgtgaaattctcgaaagagatgagctgagaagcagtgaaatcgaaatttggaatgcggtaaattaaatattataaattacaattatttattttctaaaattaaggcactccgttggtccgacgaacagtgccgtcaaaaaggcatcgaatgttccgctgaaaatcgaggcaaaattcttgacccagttttgtccaacattcgttttccactcataccaaaagaggattttacaaaaagcgttggtaatgaataatattttgatgattagagagtttgctatcttgaaaatgcttgaacctggcttggattccttgttggacctggacctgtaatggttccaagtctggattaagggcttttcataattataccgtatttcctcgaataaacccccttcaaaatggggttatactcgagggtggggctttaatgttcaacccttttttacaaaattgcaatgtttttatgcaaatttttccaatagcaaatttttattagtctttgaaataggccaaaatttttgctacaatttaaatcttaacctgaaatttttaaattaaaaagatttttcattttttggcaccttggaaatttaggcgaatgcttgaaaattcataattcacttcgaaatggatcaattaaagtgcaaaaaagcattaaaaatagagaaaaatctggagaatttatactttttttaaggattttctagcttaaaatgaagaagttagctgataataaattttggaaaaattcgtttttcggaaaataattaaatcactgttatgaaaaggtatttttgaaagaaatatacgaaaaaaaatctgcaattttttccactataagattgcctttatttcttatcgaatcggaatcatatttttattttgcactaattataattctaataacctaattccatagacttaaaatttaaaagaccgtatgtcgtttttttaatattacaatgccccaggtcaaggccaaacttaattgatgactcattttatgaatgaattaattgtctaattaattatccatttcaatcaaatttcagttccaactggtgtgttaacaattgaagaagtgatcagcgtgtatcagcattattcccatccaaagtttgatgtccctgggcttatcaaattgaaatttcccacccatcaacgctacaaaaacggagaaaaaattgagatggaaattgaaaaagtgtccgaatttgcggtggaggaggtgggaagtgagcgattcagcgatgccatggatattgggggatttccatggaaaataatggcacaaattgaaacgaaatacaaaagcaatgagaaatggttgggcttttacctttccaacgatggccctaaaaaaggtagaaaaaaagtcattttcgtaaatctgtcagggaaaaacaaaaaaaatattatttcttactcattgttttaagcggaggaatacatttactaaattcttttttccagaggtttttaaatattatttaaatcattcgaactaaataaatgattatgtaaagaattttctacaaaaataaaaattcaaaaattaaaaatgcatgtgaaaaggactagtaaacttaataagtactgctttaaatataatgctaattttattaaatatttatttattgtgcagaaaattggtcttgtaaaagttcggcaacacttcgaattgtttcacaaaagaatggaacggaggatttaattggaacattcattgaccgcatttttaataaggaatgtagcagtcatggattttattatttcattagttttgcggtgagtgggattcaaataaatttaataaacttcctatcttgaaattaaaatttttaaaattttaaaaaagaaagtgacaaaaaaatgaatagaaatttttgaaattttttggttataacttgtaaatttttttctagattttaaaaaattaaataagataggatttgataggatatgtaatgcatcgtttaataccaatttttattaatttaactaaatttaagctaagttatggtttcttattagcaataaaattaaaactaataataaatttaaatgtttctatcattgacacttttgtaactttggctcaccatgattttatattacataattggtttaaaattaaagttataataggaaacattgctgattttcatgtttaaaaaaaattaattacaatatttgtcaaatttttgtatctcaaaataaatcactaaaaattaaggaattgttggatccgggcaaaggattttacgacaaagatgaggacaaagtcacattggccattaatgtcattgtggatgagccaaaaactgagaaaattatttccgatacaaacaaatccaacggcaca

SEQ ID NO: 4232 - DNA, 1870 bp, Heterodera glycines
tcattgcattgtcttcatttcactcataatcatgccccaccccgcggacatggcactagctgttccaacagctaacagacactctcaaaaacattgcaaatcaaaatgcaaatcccaataaacaaaactccgatttattcgctacaattaattcccaattgtccgaattcatctacaacccggaggcggatttggtttttgaaatttggcacgaacgttatgggccatttcttgagacagatggacaatcattgccagatgaaatgaagacacgtctgttggtcggtaagcttggtgcgcaagaatacgcgcggttcacggagagcattctcccgcaaaaaccaacagacctatcatacaatgtcacagtaagcaagttaaagagtctattttgcggcatcaatcaatgaggaccgagccaagaacacggacatcaagtttgagcggctcgtcgaggaatgctgctccattttgtcgctcaggagtgccgccgctgcactcaaacatcctggtcacgggtggcaggccaattcaatttcagttaagccgcagcgtgagaaggagcgacaaggacgacagcgacagttcagcacatcctcgcaatcagggcatttcaatgaaggacggacgcgcagtcaatcagtaaatggccgccaatcatcaaagccgcgtccgccttttccatgcaaaacctgtggaggaaatcattggaacaacgagtgcagaaacaaacgtggaggaagtcagcgcaacaacgaatgtaacaacaaacgatcgcaaaagtgcttcaactgcaatcgagtcggacattttgcacgcgagtgccgaagcaaaaagcaggcaaacagcaatgactcgatgtccgtcatgaatgtgtccgacgacactgacggatggatcaccgtggattgcctcatcaatggcaggctggtttcattggtggcagacacagccgcccgaaaaaccatcatccaaacgcccatttgggagaaattgggaaaacccaaatttaaaacgggcaaaactttcggaaaatcatattcagggcataatttcgaattaattggttcatttgattgtacagttgagttcgcaggcattaaattggagttggaatgttttgtggcaccaacgggagcactcaatctttttggtcttccgtggattcgcgcatttgaattggcactgcaacgtccaatcgccacaacacttcaaattgtccaaccagaaccagcattcatggccatggcgtcgtccgcagacctggccagcaaactcaagcgaaaatttcccgaagttttcagctcagaacttggccattgtaccaaaatgcgtgcgcatttgtacttaaagccggaagcgaagccgattttctgccgccctcgtccggtaccgcatggcgccatcgatgccatcgacacggaattggatcgtttgttggcgattggggccattaaacaaattgattacagccgttgggcagctccgattgtggcgagtgaaaaagaagtcgggcgacgtccgagtctgcattgacttctcaacagggctcaacgacgcgcttgaactcaaccgacacccgttgccacggcccgacgacattttcaatggcgttcgaggagcaaccgattttcgagccaaatcgacttcaaggacgcgtaccttcgaggttgagttggacgatcaatcgaaacagctggttggtttgaatacgcatcgcggtttatttcaatatcggaggttgccgtttggggtcaaatctgccccgtccatttttcagaaattaatggacgagttagtcacaggcattcatggagttttcgtctacctggacgacttcatcgtggcaacaaactcccatggatcagca

SEQ ID NO: 4233 - DNA, 945 bp, Heterodera glycines
gtgatccccgccggcattcgcacgccgtcctgtcgcttgttcacctgcacgtgggcaactgaaaggacagcacccaatcagacaaagtcattaaaattgtgattgattgcaccgaactcaccccaatcggaggaacaataattgtcctttggcggggcccattggcattggcaagcaaaagaaattttggaacattgggagaaaaggaggagaaggagggggaggagagaaaggaagtacgacggaagggaaaaggaagaggaggaggaagaacgaaccatcatcatcagtgctgtaaaggggggggggaagaggaagttggaaggagggggaagaaaaattgatcggaattgaaagtgtaagcgaaggagaaaaggggagaaaaaagggtggaaataaacactttggggtgaaaagaaagggaaggaaatgcgcgaaaaaaatgaaaatggattaaaatgaaaggggggggggagggggcagtgactgacaataaaattcgcccacaaaatgaaagagtgggtaaacccacttcagagcagaggcaattcacttcacttctctttgggccgttgtcctgagccaactgctggcaaatgttcgttttgttttgtcaaagactgaaaaggcggggccaaaattcgttacaattagcaaaataaatattcactgatcagagagaaacaagtgacaaatgattaaccgttcgattggctgatttttataccaaatcactgggaaaagaatggcatttccatccaactctaaaaatggtttcattttcggtgatggtttggcttcatcttcggcggcgattgtttagccagctgatgaacatttgcttcagtgcctttttacccttatccaccaacacccgtcccaacgatgggccctcctccccctcaacaccctctgttggtgccgtccttcctccgtccgtgccgt

SEQ ID NO: 4234 - DNA, 2144 bp, Heterodera glycines
  unsure (1)..(2144): unsure at all n locations
ccctcgtgaatggcacggcaaaagggtcggtgaattgtgcctgagatatnntacaattctctgaacatttattcactatctgatgtcagccggacgttctgatcttctccgcgtccatgtacacncaattttcggcctcgtcaaagtgtaacattccgctgggcggcatcgtggcatgggcgagcactcctcctgaggaatgggacggggaggggacgtcgaactgcaaaaatgccaaggcacctcttttgtcgaaaggccaggggtcgtcatgcattccgctagcaaatttgatgttgatgtccgcctgttgcgacgtgggcacttctctgaagttcagcggagtcactgccccccaaatgccaaaggcctttctgatcgcctcccttgggatgagagaatgaggtgccgtttctgggctgatctgatcagcaccaatttaatagttacctcgctgtatttctgggaagatcgggcgaaaagttgtggaaagtgtctgcaaattggtcaattaattaattaattaggggcggtctcatctctgttgctgtcgcgcctcaccaaatcactcacatgttaagtccgtcttcttccatttaaatgccgctccgccgccctctgtcagcatttccactccgtccggcatgccacagcgcggctccgccattttcttgcgtgttttgatgtccaatacgcccgtgacgggcaaatgcgcaatctcttggaatgctttgactgccatttcgaaaacgttggacagatcgcccgccattccgtccgtcttcacgttcagttgggagggcgttgtgtatccgaatttcgtcagatattcgcctgcgtcgtcctccttcaccggctccatttcgtccagcaaagtgtcctcatgggcagacaaaacattggcatttagcgacaatgccaacagaagaagcgcaaaaagtggtgacaaattgccggggcacattttttggctttgaattgaccgattgacgcaaattgatcaaatcggaacctcagcgaatggacgaagaattcatcttcaacaaaaccacgtctgatcgacaaacggattggtacggagagttgtgatcgttcactttttgtgcgaaatgattgatcggttgcgtggcatccgtccaaattcagcggagagagaggacaatcagtcaaacgaaactcattcattcaacccgcgcatcgaacgtaagtttaggtcgagaagagaagtgggggaattgtttttaatgtcgtaagaaaaaataaaataattgtaaacaattaataaattttattgaaatgggtgaattagatccaaagtccggcccacacattgctggccctacaaacaaagccaaacttcacaaggcccactcttaatttagacaattaacgcacttaatttattgggctccaggacaaggaccaatcagaataatggaaaaagattaacatattatattattattattattgggccatcatgtgcttattccaaacaaataggtgttcttgaaatttaatttcttttgcacccaaggataagtagaagggaagtttcagtctaaagcctgcatttccatcgaatggacattcttccaatgtaggaacatggcccataggtagggcgggtcagctctccgccagaagaagtccgcgcggttgactgttcggggggggggagggctttgggccccgcagtcaaccgcctgtggcactcgtcggactgcttcctccgccgctccgtcctccgtctcgtagtatttgagttataatgaaatttgaaaatcttaaacttttgtcttatacgtcaaactgcttaccattcgcttagaaaaaaatcctccttttcaaaaacttttttaaaaacaaatttgttcagtttagttagaaatgaagagagttatggctgatcaaaataaacaatacaaaaaaggcattaaccaatgcaaattttgaattagtgcgcaaaaaattacgccaattacgctattggcgttatgagcgcaacttaaaaattttatttttgagaattccgatctgatggaggtcaaaaggatcgccttaatatatattgcggcggctctagaataggatgtgaatgttttaagttctgaaaatgccgcaaattcggtgctccccgatgg

SEQ ID NO: 4235 - DNA, 4446 bp, Heterodera glycines
taattgtaattgtttttgtttttggcaattttgacaggaatgaccgagtgttgttcatctgctgtttctgacaatggcactgctccctcctcctcctcttgggctgagttgggtctttctgctgcgactctcaacgctcttggcacaatgaagtcgcgtcgcttctcaatcaacaatttcttaaattacttattttcttcatttagctttccttttccaactccaattcaaaatgctgtgattcctatcgctgttaaattgaaaaaagacataattggagcagccgaaacggttgatatccaattaataccatttgattgaatccaatttgtcaacatttagggcagtgggaagactctcgcatttgccattccgattctcgagcattggctgaccaatgccattgccacaaatgcccaacattctccggccaaaggctcactttttgcgcttataatttcgcccacgagggaattggctgttcaggtggacagttgcatttgtttctctttacaaattgcctttttaacccaattttcccttttttgtcagataaaagaggtgctcattgccctttccgttcaaattgttccacgcgctccgaaaattgttgcaattgttggaggaatgagtgagcagaagcagcaacggttgttgaaggcaaagtatgcgcactttcttcacatttaatgcccttttgttatggcgattgaggccccgttttttgctgtttgagaaaactggcaatttttttatcttgttgaaaaaaagaattttttcccgtggaactagccacaacgtcgggtccctggttttatttcagttttgttcttgaaagcaatatgcataatgaatcaatcgccttttgatctctccgccatttttagaccagaagtgatcgtcgccactcccggccgtttttgggcattgcgtcaaaccgtgcgattttcccattttaagaatttatctcgtctaactaattcctcgcttcgctttattttagtcccaaaatgccttttagggcgaccaacatttggcggatttgtccgcacttcggtttttggttgttgatgagattgaccggatgttggagcaaggccattttgaggagctccgacacattgtccaggacattcacaggccagacaaattgtcttcggaatttaatttaagtgtttatttttcagggataaaaaggagcaaaaaatacggataagcattgcttccgaccaaacggccgacccttccgatggcattgctttgccaccgcttcaaacgctgattttttccgcaacgctcacttttactcatcacattccgttgcggaggggcaaaaaagaggcgcagcaaatggcgacggacccaaagcaaaaagtgaatactatcacattatgtttaagagaaaagtcacttttcggggtctttctaaatttatttaaaagggaatttcaagaaaaagaaagaaatttaagaattttaaaatttatttttttaattgttaaaaatattttcatttttaatcatttaattaacgatctgctaattgtaagcattttgttttggcgttttaatccaattcaatttgtttggtctctcttttgaggtgcgtcggattgccctttcgatgtccatgcgaaagggcgcagcgaatctttctgtgattgatctgacgccaccgcagaaaacgccacagactctgaccgaatgtcgcatgaattgtgccgatttactccaaaaggcacaaaacatttatatttcccaatctcattacaaaaaattcattttgcttattttttatacattttcaggattcaaatttgctgtatttgttgaagcggcacggcgggcgcactttggtatttgccaattcgatttcggccatccggcgaatgcattcgctgctcaaaaaattggcacttccgaacacggcactgctgcacggacggatgaaggaaaaggaacggctgaagagtgtggacaaattcaaaggcaaaggaacacggggacaacagagggaacgacgaattaaaacaaaaataaacacccatttcaaaattaaagaattatcagaaaagagcgtcgtatttcctgatatattttccctccaatttccatgcctttcagcgtcggatgattccgttctcctcgccaccgatgtcgccgcccggggcctggacttttatggagtgcaaaatatcgttcattaccaatgcccaaaaactacggaagtgagaaagaattggatatgttcttttccggtttgatttccttttctgttagagttacatccatcgcagcgggcgaacagcgcgagcgtcgagtgccggactgtccgtgctttttgtcgatccgttggatttgcatcaatatttgaaaatttgccgaaacttgaacaaaggcatccccccccccccctccaatctctacatattagccattttgacccttccccccttgaagaggaagacttggaattgttggccgtggatcagcccaaactgatggagtcgtgtcgctctttggttcaattggcaacggaagcggaagcattggagcattcgctgaaaaaagtgagcaaagggaaagggctgtgggttgattatcacaacgaaacacttgcgcagagaaaggcgcgtgagcaatggtttgaacggatagcgcgggaagcggatttggtgtgggaagagggggaggaaaaagggcgaaagatgggacgacggagtgacacggacgaaggaccgacaaaagagtgggccatttgaacagtcggacaaacggtcgaattggacttacaaaaacccatttcagggaattaatgagacggcggaaaagggccgttgagaaagcattgaaaggaaagctgaagggaaatcagcaaaatggagaacagagagagcggaggattaaccaaagtgcagaggggaggaaggtgaaaattgggaagaggaaagtgaggctggagaagggactgaagaaatgggtaaaacgggcgaagatggacagcggacgatgacgagggaacgcagggggaagagaggaagggaagtgaaagaggaggagagagatgaaaagaaagaggtcaagtggaaaaagagggaggaggaggagagaggaatggaagtgaagagcaaatgaggaaggaagaggggacaagctttgctagtgaaccattttctgtttgtttgtttgttttgtttaatcttaagtttaaacgaattgaacttttctttgcatcattgcttctccctttgcattatttgcataatggtggctcattccttccgtcgttggcaattgtcgaacttcattctctccccatttgtcccttttcccacccccccccccatccgtccgtcctccgccctttgtgccatccatcgcttcgtcctccggcagcccttttctttcaattggccaagcctatctatcgacatctcacgtatattgtcccgaacgagaatgaatgaggggacacaatttctctgaatgccttcccccgaggggattcctctgctttctcttcgtgctctgtcccactcagccctttccctccgtttttccgccttttggttttggaagaaaaataccccttgaatttttcataggaaaaacgaaggcaaaaaatgccatcagtcaatgagagagaaaaggccgtaaggaaacggaagagaaaatggggcggagaaaaaagaaaagttaaaaaacaactaaatttttatgacaaaatttatgaatttattattgccagtttctaaatgaagaagtctttcccccttaattttatcatttttttgttcatttcgcctgcgtttagtccaaattgccctttccttccctcgtcattttcatctttcaattcgtcaaacaatggccattccggcatcttttcccgaacacagtgccttttccaataagcccaaatcgacggaatgcctttgcggtgaaatggaaaagggccaaaatgcccccgggggaagaaagacaaaagtttattttgcggtacgaacaaattgtgcgaggccatgggaacgaatgttcatctgcggaggaaaccgactgctgggaaattggaggccggaaaaggcgttggaaatggccagagaaacggaggacggcgaagagaatcagtcgcagcagaaaacgaacagcggaagaaagtgaaaaaagcggggggggggggcaattagaagaaaaagcagcggggaaagaatgaatggtcaagctgatcagaatgaccgacgaaagaatggggcagctggtgagagaatgctgatcagatacggattaatcgcctaatcagagacggattagttagttggctgatcagtttcatccatctcaattccgcatccctttgttcatatgatcggtgccttatcgctttagacagtcggcttcgtccgtttgtcgtgcttccattgagatgggccctgaggacagtcagcg

SEQ ID NO: 4236 - DNA, 1599 bp, Heterodera glycines
taactttatgaccaaagattttcaattataaatactacccttcatggaatattgaagcatttattgaataaaaaatgtagcaacaccggatacatttaacaaaaaaatacatatgatgaaattattccaggggtgtcttttattcaaaaatttttaaaaaagcaccccgtaattcatttccaaagtcctcccggcatttgacccaattcagaatcgacccggaattccacacgatcgcctgggtgccgtagtgttacggcaggccacagcccactgtttgaatccgcgatgaattgtttattttggccttaaaataaatattacaatcacaaaaaaattatctaacacgcacctagcaaatcaccgttcaaaaaatatgaaaggcaattctctcttttgttgtggaaaactcctattttatctccctttgaaaatggtgctacatattcggattcctttccattgttaaaaatttggcctgttgagtcaactccatatgtgttgtcggcccatcccacagtttggtcctttcgaaggccctttggtgcataccccacacatataggtcttaaaataagaaattcataatatcgaaatactcactaaccctctgctgtttaaaatttgaacttcaaaataagatgaacttttatgtgatttaaacgtttcggctccttaattttataaattatttttgaaaaaaagaaaaatctatactttcatatagtccctcgtgttctaagacacatcctttgcttttacggattgataaataattggggctagaattcattatatctaaatacgattatattttaaaaatcagaatggaagctattgaaacatttaacatgaaactattcattgggtttttggaattacaaaacaataaaatttgagcgagtggtcgctattttatatccagattcataggtgtaatcttatgacgacacaagccataaaaaaagaaaacaatcaaatgtgatagagacacgccctgctaaatgtccttcattttttattttgcataagaaacatgtctttcattttttattttgcataagaaacattggaaatgtttcattccctataaaaatttgctgtcttgagaaattaaaaaacataaaacgcaacctttgtgcggtgtgatattcaataatttttcccttttacgacattttttttaatcgttccccatccgagcacgaaaacggctttgatttttaatacaacaagaattttgcaacagatatttttaatgtgaagagcacaacgattttaaatgtaatttaaaatattgaaaaatattcatgtgattaaaataccatatcaaaagaactctaaaacacccaatgatttcccttcccactgggcatacgcccaatgacttcccttcccactgggcatacgcccaatgaatgttcttccagctgggcttacgctcaatgacattgccaatccgtatgaagcccccttggtattgtttttagtcttggaaatattttcttgattggtttatgatttgcacaggtccgttgtttcacaagaaacgtattaacgtcgtctagtgttatattttggtctacttttctttgcttc

SEQ ID NO: 4237 - DNA, 3815 bp, Heterodera glycines
  unsure (1)..(3815): unsure at all n locations
ttttaccccaaaaatttcccttccttcaatggacactgaccctttgggtgtcgcaaaaccagagagtctaaattttaaatgtgatggaaattttttaatgaaacacctgtatcgcaatatagtggtttacacctctccttcctgtagacctgctccatatactcatacagcgttatcctcgcagcacacgtggtccacaaagataaaactatattcgacaccttatgctcctttatgaactccttcttcttttggtacacggcacgcatcacaccctcatttattccacaggccttttcaactcaatcgtatcatttccgataaggtccatccatctttccatgttgctcacgatttctgtcgtagaaagcgtgttccgcatcgaaaacttcccccacaagctgttcaaccccttaatatttatttgttttttgaattttatttgtttttctcaccaattttgctatcattcgaagaccagggttagagacaatcttgtcataattcaaggaaatgttgtactttgcattatacatttcgatgaattctctcttttcctcctcacttttcacttctgctggccacccggatgcctaaacctttatcttcaaaaacatccgcacatatcctttgaacagttgactgtcaaattgctcaaagtgatatgcccgatagaagccaacaaccctatatcctaactccaaggccttccgcagttcaatcgaagtgaacgtccccaaaaatgccctctgctctggtcgatggttacattttttcacgtccttcgtcgtaacaaactcgttcttggcctttctcgcacaaataccacaatttgggaagaggagcatttcatcaatgtgcacagggaggagggggtacagcagttccttcggggggatgaccttcacctttagcagtccatcatagggcacatcgtcgggcaccgtccaattcacattaaaattcctgctcaccacaatttttgggacaccaacgggataaggagtgtcttaagtgaatggcaatattaaaaatgcaagcggatttttaccataattcacaaaggggtacaaactgataatatcaaacatcgaaatctaaactgcttccgtagcctttgcatacaagcaaaaaggcattgttcgtcctcctgcgtaagcatccctcggattaatcggtcccttatccggcacactttcaaagaacctcttcatctccttatttttcttcaattccgctttcacctcacattcctaaatttgttcaatcaataatcaataactgttggaaattggcaaacccaaacttcctccaccgagaagtttttacacatttctctcaatacttccatccgcatctctgtccttctgtaattctcttccatgcataaaccattcggtccaacagcccagggcaaaaaacaatttttgcacccatggtatgcacaccccttaaagaactcacattaacggatgacttttatttttgaaaacctgaaactcaattattcttttctgaccaccaatgacgcaatcaactttgaggtcaccgaatttaatctccccaccattttccgcatgtctgacccttatgccttcccggtgcgccaaccattcaaaatacttcacggcaattttgctctgattatcagccctttcatatcctccctccggcatgatcggaatgtgcctgtccttcaagaatttcgtcctgaatatcctcatcacgaccccagcaattgtgacactgtccttcaacacatccatcccgtcagtaatatccaaaaacaattgccggaacttcagaattgcctccatcagtatttccacatcgttttcacagtaaaccttaagctgttctcctaaaaaaatacaaaattttatttaaaacacactttctctaacctagctcaaattcggtctcaaaattctcgttataccatccttcaaacttctcatattcctcctccttcatagcatttggattgtaatcatcaaaaggcggcaggtgtgacaatctcttcccaaaattctcatttttattgtacttatgaggaaagtacaactttgccgggatgctcagccctaaggtctttggaagatccgccaatttgttttggctgagcaaccagaaatcccgaaagtacacaccctttgcctttatctgatagatcttcagatccgccatcatcagttcggtgttaagccccctttctgtcagcacacgaaggacgaaatgtgagtcgaaccgtccagcataatgagcaaaagcaaccgtttcaaattgtttgaagcccataatccaatcgataaatccgccaataggatcctccacatttgctgccgaccaagtcagcatcctcggttcctcacaaatctcacatttccttttctctccaacgcactcactgcatgtcaacgccgcgcaaacgagattcggtgcatggactccgttatacaatgttgtctcaaggtcatatgcaacaattctgtatttcctcgttgaacgaatttttaacttctggatgaaacagccccgctttggatgataaattttacaaattcggcagaatttctccccacatgtgtgtttgttccttgtgttgtgtgtctctccacacttttcgcattttttgtactccctacaagcagtcttcttgtgagactcaaaacattccgtattgtagaagttgcgattacattccgcgcaataaatcccagcacacacatccgcacatggaaacccgaaccccattctacagcacttcttgcatctttccttacattccaatcgatgtctctccggcctttcgcgtgtcacttcacagctgacacaaaagtttcgaacacagaagaattgcgtaaccgatttcattccgtcccagtggtctccatcttttatcacacatacttcatttttacgaattccttctcccttgaaaataggtttgattcccgatctctggaaaattaaatgttttttcaaagtgcgtaatttttttaccatgtcaaatgccactatgcgaaacatttccgggtattccttgtcccaaaagttctggatgagaccgaggtgttgtagaccaaaagttttttcctccccgcttatcccggccttttccatcaatttgacagccatttctctttgttttttctctgttttcatgagataacgaaacttgtcttccgttatctcctttccaatcaatcggtaatttcgtgcgaattcaagggagtaaaataggcctaaacaaaagttaaagatttgcaaatcttgtgctgaatttaaagtgatttcaaactcactaaatttccccttcggagcggaaaggcgtcccaattccttggtttcaacgagagggcagaaacgagacattttcagcaaaaaaaagttgaagaaaagggaataaatagaagacgaaatgtcaggacaaaaaaacagatagagagaagaagaattgaaaaaggacgaattaaattaggaaattgaagacaataaaaaagaaattagctgggcgagaaggttggttgaaaaagctggctgaatttttgagagagtagaagagtgaatgaaaggacgccaattccagcacaaatgcgaaggggcggagtaattagcggaagagtgtgatcgattttcagtggtgtgtgtggtgaaagaagggaaaagaccggcgaaagaagcaatttgaacgccagcagagaaggatggcacgcgagagaacccaaatttgaattttggctggctacgaaaatgtgattgacaggtgagaaggtgatggcacccgagaggngacgttttttggtgcatgactt

SEQ ID NO: 4238 - DNA, 2384 bp, Heterodera glycines
attgacaggtgagaaggtgaatggcaccccgagaggggacgttttttggtgcatgacttccgccagaagggaaaacgaagcgcatagagtcccgaaagattgaaatttgattgacaggtgagagggaaaacggtacgctagagtcaaatttgaatttggtcggcgacgaaatggaaaaggaagccgtcatattatttcactgctgcgtatttttttggctggcaccaatttttttggttggcacgggcgcaaaatgccgcttttgaattttcacctcttttcaacacttatcatgtggtattccacatgttgcatattatttttcacctgttctgccctttttttcaccggctatgacaatatttttcacctgttctgccctttttttcacctgctatgacaatatttttcacctgttctgcccttttttcacctgctatgacaatatttttcaactgttctgcccttttttcacttgctatgacatttttcacatgttctgaccctttttttcacctgctatgacaatatttttcacctgttctgccctttttttcacctgctttgagttttttttttgagttcttatgttttttcacattgacatgttgactttttcacctgttttgacagcattttcacttaatttcattaccttattatcacaattggtaaacataatatcgtttaattatctcattatacaatgatacagatttcacattttttcatccattttcacccataattcctattactatcatgccttttgagcattacacaaattctcattttttcattacctcgagatatattttcgcctctttttcacagctttcaaatattttctttcctgttttattatcacagcctttggatatttttcatccatttctatgaaggactttcaggtaacttgcataaaattacatccattttatgctcaatcgaaaaaataacaactatttgaccgaaaaacctaccagaaatggtgacttttcattatggtaaacaatttaggtagtttaattttgttagtaatcaatgtatgcattttttcgccgaggcgagacctgctgggcgggagggagtgggggctggttaatgacgaatcgattatacggtggagggaaaaggggattgacgaattatacggtggaaattaaacataaaaaattggatctgtatgtggtatttaaatttgagtacgttatactaatgattcgttcatcattaatctctttgcgcaatcattgcgcagcagcgcggaggcgggaggaaatagccaacaaaaacaataataatttatttgaaagataaagccctatcctaacaacgtttatttaaaatttgtgaaattaaataaaaaatagagtacgataggaaaaaataggttcaaataaaattaaaggaaaattatatgaatcttttttttcgttattattttccgtatttccatgcgtcaaaaaatgggaggggaagagtcaaaaatttgaatcgattaaaccccaaagaatggagggcggcgcgggcaagtggtcggatggcaagggatgttcataaaagggagctcggtaataattggacgggtggggggtttgtctaggaagggccggaattttacaccgagatttgtggacatatactactagcccattcgttattttgtattggaaaaattgaaaattaattcaaaattttcaaaatcaataatagtaattcaaaaaaaaattaataccgtctctattttccgagttcattttgtttgtctgttccatttccgccattttgacatgttcaaattcttcatcagaattggtcgaatgttccaattgtgctttaaaaaacagttaaattttaagccccaaaataaaaatttattttcttattttttatattaatttctttgttttcttttacccttatcaattaaagtaaattcatcaaatgatgaatttaatgaaaaagacattattttattgcctaaataaaaaatcaaaatgaaacaagccgaacattatattaattcatttccaaattaataaaacattcatttaaattaatgctcaattaaattcgttggtctaattggtttcaaaaatcgaaaatcataaaaaaataaaatcaatcattaatttccctttttttatagaaaaaagtaaatgaaaaaagaaaaacgaaaaaatgaccttatgccattgctttgggtcacttatattaattaatggtggggacggcataaaataattcacggcaaaacgatgaccaaaaaagagagaatatacagcagaatcattaaattattaaatgtttttttcattataatttcttgcaattttttttgaacaagataaagagacacgtgcaaaggatgtggaatttta

SEQ ID NO: 4239 - DNA, 8733 bp, Heterodera glycines
  unsure (1)..(8733): unsure at all n locations
tccttattattgttgttaaatgttgatattatatcctctcagatagagagnaatatngatatgnaccagggatggctcttaatttcgcttatttccgaaaaaagtttaggcctcggaattccaaaaaaaaactggagcctcgaaatgccgccatctctgataggtgccttgcccttttgtgtttttttctgagaagctttattcctcaatttcatttacgtttccaaataaaatggttgttatattcatcgaatttttttcaaattgttcgtctacaattgaatttttatgaaaaatttgtccatttttaatttgttagagcaaaaaatcggcgaaaatgggccttttgacgttgggcactccgctgagttggcccagaatagttgagcatctccagtacatcaaggtgagcgaacagagaacggccgagttgacagaatgtgttccccatggattgtaatttgttcccgaacctttctgggccatatttccagaattgttaataatttttgtttggtttttggggttgaaatcatgaatgattttggggttattcccacacattcttggcaaaattttcgtgtttattgcatcgttctgacgctttttaggttgtccatttttcggcgttatccccggtaattttggcttttttagttgtttccccgacaatttggggccattttcggggttagactctcaactcttaatgacaccactcttcatggaatattgaattcgctcttaatgaaattttatttttttaaaattttccaggcccacggcatcgaccagttcattgcgttgtatcatcgtgtcaagggacgcgagcgggaccagttgcgatggggtgatgagattgagtacacaatcgtaaaatttgatgacgaacacaaaaaggttggagggaggggggggggggggtacgattttcgaaaaaatggcatcccccaccaattacacaggtctagggatacaaatttttggtggttttttctgtggcttcgtttttatgttcttttacaattagtccttaccctaatccattttcaaaaaacaaaaatgatgtatggaattggaaaaatttttttttttttgcttgcataaataaacgatcaaattgtgtcttccaaatagcaatagtttggcgcatttgttaactttattcaacgcgacatttgcaaaaaaaaaacacaaatntttgccattaaacaaaaaaatctataaaaatttatgaatttttttttggggggggaccttctccccccttcccccctcatttaaaatgattgcttttcattttcctattctaaaatttaacaattgtggttgatgaactgaactccttgccaaggtccgtgtctcgttgcgtgccaaggacttgctggacgcgctgatggccagtgaggacgtgaaccggtcgttgggcgaggagaaccgcagtctgtggcgcccggaatttgccgcttacatggtggagggcacgcccggcacaccgtacggcggtgagtcatcagagtcggtggtggcgggtgtgaggccattacccaaaaatcgggtgtttttccccttccgaggtccctttccccaaagttttcaaaaaaaaaaaactttttaatttttggtgcgaaaacgaactgttcccatccgaaaacatctctctctctccatattgttgtcggtctcaattttatctttattttcaaatttgggacatttgtagattttgtttcaatattttgaaggggatggataccctttccgagggttgctgaattcagattcaggatttcgaggggtttttgagcctccgggtccgagagcagcttgtccccgaattttttaaaattttgaacatcgtttggttgcaaatacttactaattcatcatgaaatattgagataaatcgctagagagatttttctggtttttttttcttgaaattttcataaaaaaatgattatgaaaaattcctatttcgaaaattttcaaaaaatttctggacctaacaagggaaacttgtgtgatgtgtagtaccccgcttattattaggcatttccccatagaaatttggcatatttttttaaattgtcgttccatggcaaattacacgttgtccctccccattttgtcgtcctgtcccatgcccttctttcatcatcattctgtctgtgtcaggtctgatgtcctgcttcaacattgtggagtacaacatgcgcttgcgctacgacgacgtgtccgcactgttgcggcccaacgagtcgctgctgtccatcagtttcccggcacttggcgcgcccgacttcaccgacccgccggcggtgccgcgcccgactcatccggacagtgtgggccattcagtgttctacccggacgaggccatctacagcgggtcattattactgcttggcggggcggtggaggggacttattattagaaatttgaatatttttctgattaattttgcccaataaaatttgaaaaaacggaggcataaaaatttgaataaatttcgattattctgctaatttagttcatcaattgcagaaatttttggcatgacggatacatttttatataaattttacatttcgaatttggatatttttgagtaaattttcaccggttccaaaaagtatcataaacttacattcagttgtaaataatttcttaaaattttcgaaaattatatttgtttttccatgttcggaaaagcttttaattaatgcttattttaaaaaatttcaaataattttggaattttcaggcacccccgttttcgcaaccttgtcaggaacatccggggccgacgtggcgaaaaagtggccataaatgtgccgatttttcgcgaccagaacacgccatcgccatttaccgtatataatattttgaaaatttgaattaaaacatttaattttaaggcaaaaaaataataatcaaaatttatcgaaaaattgcatttttaaggagacctttgaaaacgccgaagcttcacgggctgcacttcccgaccacatttacatggaccacatgggcttcggaatgggtaaatccttttttcaacttaataatggtggagcaggaccaaatatttttcatggaaatttagcagattgtttcagaacacctagttttcaaaaaggctatttgttggcgacgtttcgccgttttactgaaatttcgtaaagcattttctgattttccggggttttattaaattgacacattgaaaaaacgcgttttttaaatttagtaaatttccgaatttttccaggcctttgctgtctgcagatgacctttcaggcggtcaatgtgatggaggcgcgttggctgtacgaccaattgaccccgattacggtagagtactgttttgtagtggatacaagtgtaaacctgcttatttatactggttattgtattacattttaagcccatcatggtggcgctgagcgcgggtaaaatttttttttattattattaaattttgttacaaaaaaagtccatttccatttttaaaaaaagtttgatttgcattttggacgtgcgaaattcccaggattttgtctcggaggagatatcgccccaaggcgaaattcaaattttcgaaaaataaaactcctttcccttttgccaaaaaatgttatttttaatgtctaaattttttccggtttagttgataaatgataatttactaacaattataaatatgcttatttttctgtccgtttgttcagcaacgcccattttccgctcctatttgtccgatgtggactcgcgttggcccatcatttcagcggttcatttcgaaaaaattccaaaaaaaaaaaatttttttgccagagtgtcgacgaccgtacgccgtttgagcgcggtttggtgtccagcgccagcgatgggtacagcaaattccacgccatcccgaagagtcgctatgacagcaccgactgttacatttacccatgctcggcccagtacaacgacatccaactgcagtatgacgagcagttgtaccagcagctgatcgccggtgggtcccagaaaagcgaagtgatcagggagatcactcactggatcagcgagcattattgtgattgggaatttgctctgatcaaacaaactgatcagagtggacaaatgggaatgaccactggggtcctaacaatttttttaattattcaacgaatttaccattgtatttcatatagttttctgcgaaaattttaattttcctcattctattaagacgtttgtttgaaattttaacaaatttactttgtcgagaaaaatttcaaaaaatttggtcggatagcgttaatttctttttttgccatcatcaatttgacccattttatgggattagaaatttatttcatgatctaattaaatgctttttcaggcagtgttgacgaacacctggcacggttggcttcatttttttgatagggcacgggaaactcgagccgctcctaaccggggacaggacaaaacgtcgccgcgaatttttttaattttagaaaaaaatcacgaaaaactgtctaaaattttagtacttacaattagcataataaaaaaatttaaaaanaattcaaaaaaaatatatntaaaaaattcaaggaaataaaaaaattttgcggcgacgtaatgtcccggcaacgttttggggttcactatgctaaccgccacattttttgaatttgatttttcttttttggcgcattgccaccacttttgtctctctcttacattcattttgccccactgttctgttcagtcacattgcgcacatgttcatccgcgacccgttgcaggtgttcgaggaacgcattgagcaggacgaccaaaagtccacggaacacttcgagaccatccagtcctccaactggatgaacatgcgcttcaaaccgccccctccggacgacccaaacattggctggcgcgtcgaattccgacccaccgaagtacgcgttggtgttgttgcaattttcccggcggcgtctatcggcaccgccggaccacccgtcaccccttccccaaaagttttttggaaaacacgccgcaaaaaaaagtgtggctgaatagcaaaaaaaagtcggagaaagaaaagtttggaccttcgtatgaaaaatcggtcccgagacaccccctctggcccaatcgtccgtcgtacagcccttggtctgagacaccccttgtatatgtatgtctgagattatcagtaacagcaattaatctagaaaacatttgttaaatgtgaaatactatggatttgaaaattccgggaacattttttagggacaaaaaaattttcggcttcttcccctctctcccccttcccgtttttttttgtggggcataggcttgggctttttttttggttcttaatataaaaattgcttttaagctgcatttacaattagtaataaaaaaaattgccaaataaatgtgccgtttagaaaaattttccgcaatttttcttccccgaatttccctcccccccccccaatttcacaggttcaactgacgcattttgagaacgcggcctactgctgcttcctcgtgctgctcacccgcgtgatcgtctcatatcgacgtaattattgctcatttttatcattaccactaatgaatcccaaaatcttcgtttatggtcaaaaacccgggtacaaaatggtggactgaaatttaaaaatttccaaattttttttgagggttttcttctgtttcatttaaattttttcaaatatttaaattttagagtcatttataattgtttataattaagctgttcgttcattaaagcgtatgttttatggcattttcaccaaaaaaaaagccaaaattttcgcaaaaacagtgacaaatgccaaaaaaaatcaatgttcctttcccctctccgcttttcagtcacttttctcatcccaatttcgttggtcaccgagaacatgcagcgcgctgtgcgccgtgatgcgatcagcacgcaaaagttgcacttccgcaaaacgctggcccattgttggcacacgccggagggcaaaccgtgccccgaggggcgcccgccggccgagccggagcccgagccgtacgataacaacgtggccgagatgagcattgacgagattgtgaacggtggggtgggcagttgagttcgggaaatcacgccgcataaattttttttgggaatttggcaatttttctttacctcgcccaattcgacaaaaaaaaaatttttttttgaaatttttccagggctttttcgttttttttttgaaatttggcaaattttgttttgaataacacgcctgggtcttcaaaatttccatattttcttttttgcacagggaacaccgattttcccggcctcgtgccgctgatgcttcagtttctgaactcggccgacgtcgacgtggacactcggtgagtgaatcatctgatgcactacagttccacctgcatcgtttttgaaaaattgaaaaattttttgggggtttttctgtaaaaaataaaaaaagaataactgattttttaaaattctctttcaaaagttgtaaaaaatgaaagatttttaaaaaaaatcttttactaggtaaaactaaaaaattagctttgaattttttttcaattgttggctttttgttgttaactaactcatttttagttgcactgtcagccagtacctgtcatttatccaggtatatatatttgtttacaacattgaaatttatttgaaatttttcatttttttcagaagcgcgctcggggagaaatttggacgaccgccaaatggatgcgtgaatgtaaaatacatcaattaacaaacatgcaattagctaatatattcaattacaaatacttgttttcagttgtccaccagcatccgacgtacaaaaaggactcgcacgtgccggacgagtgcatttacgacatgatgaagacggtgagtgaatgagccgattgtgcaggttgcactgggttatttctcgataactttctctgtattttccctttacctctccctccttccctcactcactccatttctcaacctttttttccctcatccctcctctctctctatctctctctctctttacaattttccttctctctctctctctttacaattttccttctctcactctctctctctttactatcttccttctctctttctctctctctctcttacaattttccttctctcactctctctcttattttttctctctattcctctctccctctgacttatcatgtacctactaacaacacattcagatggacaagatttcgcgcggggagcactgcgagaagttgttaggctgtttcaagacgaagacggaacagcgtatcccatccgctgtgaagcgtgccgaggaggagatgaccatgctgatcgcacggcggaaagcggccgaagcggcagccgcgtcggcagcggtgaagaacaacaacggagacaacgcgggtgcggcggcaggcaccgctggcgcaagtggtggtggcgagcgtgacagcaacgccagcgtcgcggacggtcagctgccgcaaggcgctgctgcaagcggtggaggcggcgagcgcgacagcaacgccagcgtcgcggacggtcagctaccgcaacagtcgccgccggcgccgacaaccggccaatgacgaagcgatcgatcgatgggcttcacattttagtgataattttgacaatgaattaattaattggtgaacaaattgatgatgatgctggctgtggatgaattgaatatcaacagaacgaacatacatatttaagtttcaaagcattgttttattatgacttatctttttttgtgtgtttgaattattatgagtttcaataagttaattaatttgttggaaaattttaatgcgttttgatcagcacagataattactccaaaatggtcaatttttgagcatttgggagataagtacctaaaattaaaattaatcagtgatatggacaccggaaatattttttttaattttaataagttagcagtgaaactttcctcaagatttacccatttaaaaatgtatattttatttgctctccgattattagccccgtcagctgagaaaattttgcaattaattaaacaactatttgacactaattagtttttacatccctcgcacaacaaacatatgttatctctataagcaactgaacaacgcattctctccgtccatgtgaccatttaaaaaaatattttaccaatttatttacttcgttttcattttaatctggaactaataaaagataataatggattaattttaattgcacaagtttgttatccgaaaataagtttttatggttaccgtagtcctttcccaaaactgttgttatttatactgttactatagcccaatcccaaaattggaatagtagcctttattccgaaggtgtgcacacctgtctacctcagttcggccccagccgattttttgactataactttttttctttgccaaccaaatccaacatttttgctatctttcgaaagcttaatgtgtttagaagctttttctaagctattgcttggcaattagacaaatatcaaaaaagttaaaacatgaaaactaaaaaaatcaatattttataatttttcatcataaattttccagggttgaaaatttttttgcaccgagattgtcggatttggttgacaaagaaaaaagttatagatcaaaaaactgcgttgggccgaaccgtg

SEQ ID NO: 4240 - DNA, 1580 bp, Heterodera glycines
  unsure (1)..(1580): unsure at all n locations
ctatagaaattttaaataaattaattgaaatgctaaataaaatgttatatgttcgttatattattcaaaaatgcttagtttttattttttgttactcgtgcttaatacaatgaataacaattatttaaatgaaagatgaatttcataaaaatatatcaatgatatcaagatggcaaatttgttttttgatttttctatctggaaaaacaagcaatattattttcatgaataaatttaaaaaatggctgaacgtggaattcctcgccttttcacgtgttttctctttttgtgggtcagggcttaatcatactcatatgcataacaattgtctctaaaatcctcgaaacttctttcagtagcgattattctaagatggcagatgcatccccgccgtcctgccccaataaggtgggttttgaagaattgcaggatcgttagatttggtcgacacagaaaaaagttgtagtccaaaacttgggctggcaccgaaccgtcctgttccgtgaacggaccaggccgttttcgcgccagcgcagtttttgaactataacttttttcattgtcaaccaaatccaactttcttgctatcattcgatagccctatatttcctctattagcttgcaaaattgcgaaaaatttggttaagcttcaaaaaagttatgggcagaaaacttcaaaaaactggttttcgaaacatttttggccggaacttttttgaaccttaatgaaaattttcacaattttgcaggcaaatataggatatttagggctatcgaatgataccaagaaagttggatttggttgacaatgaaaaaagttatagttcaaaaactgcgctggatcgaaaacgaccccgacccttccgtgaaaattcactattttggcgttctgtcactattttttttcattattttggcattttttggaatttctctataaaaatgcaataaaaacgaaaaacacaccccctaagaatcgacttaaaaaatttcagaaaaatacatccataaaaatcgacccagaatttttcttctctcataaaaaatgaaaaaattttctcaaaaattcattttcttggtaagaattttaatttaaaaattaatttttaggttttttgcccttaaaaatcccagccctattcatagtccgatttatgagaaaagaaactcatataaagggtagagaaagttgacaattattgtcatttttgcaataacaacttacgataaaagtgcgcagataactgccataaaatggagcgacaattaaagaaaatgtgaggaattttcggatttaacatttatcatttaattaatgttttcacgcattcagctggatttgccacgatcttttctaaggcgataaaacgcaaaattttcgaacaattcttgtcgaatccattaccacgctctttccacagactctcgtcagtcgaacattttttgttgngttaattttcanaaaaaaataattttttttaaaatcggtggtgcctttcatcaccgcanaagctgctccnaattctananaataaaaaagaaactttgttaatcgtccacaaaaaattggcttgtctttt

SEQ ID NO: 4241 - DNA, 1421 bp, Heterodera glycines
  unsure (1)..(1421): unsure at all n locations
tcaagtaatttaatttatttaacncgggtaattaaaaaaattcgcatagtaaaatagtcaatatattttttccaaattccattcaatacaatggcacttttggcttcattcatcattagggctggcaaaaagtgaaattcgtgaacaacggcccagaaaacccctcaaaaactcgcgaccatttagcaatcccttgcgtaatcctcgacgaagaggcgcagtcgctcgtagagctcctgagcaggttcgtgagtgaagtttttgtgctggttcgtgcaatagttgatgaccgccttcgtgcatggccgttcttctgatgcgtgcattatttgaagaccaatctaaagacagagggaattcgagtaagccaagcgaatacatccgattatctaaaaaccaatttctcataaaacatcttagcagatggaagaagttagagaatgttttacttgatgcacattgtcctcggaatcattcgtaaatttcaaacgacgaatgtttggcgcaaaaaacgcaaattggtgcctcttttgtcccaaatttgcttattggcacggagaaatcgaggccggaatggtcaatgtatctgaaaaaggaaatatatttgtcattaataaaattcttgaatttgaaattacaaaatctggagccgtttaaagcgaattttgttaggcagcggacggttgggcaatggaaattcaactgatgtgggcccaaggcagattgacaatttcaccactttcgtctcaatgtctttgccaattgtaattcgtttccacagcgtcaattctgatttgccgctagggctaacatttttaggctctaaaactgccaaaataggcactaaaaatggaaaatggcactgaaaaacctcatttttagaggtgtaaaatgacaaaacgtattcaaaacgtggttaatattttcgtcagtaagcattttcgtcagtgaacgatttcgtcagtgattttcgtcagcggataatttcgtcagtgaacgttttcgtcagtgtactatttttatttattttgctgttttccgtttttttcgtcagtgttccaattcgtcagtgaacattttcgtcggtggatgcgtaaaattaaaaatttttcatttttatcaacttctttaatacagtatttatcgctttttgcgtatggtaactctagataaaataagtgattatttgtactttaataaatgatttacgtaaaagaaattgtactttaaaactgttgaatattattagtaaatttacttctcaaacttcttatctcgccgtcgttcccgtgcgttctcgagtgcctgcctatttgcgatatttgtttagtccttatctagtttttgcaatgcgtaaaaatgaacgatatgaaaattcgttcgtttactgcaaccagaaaatggctacttgttcgatttga

SEQ ID NO: 4242 - DNA, 3116 bp, Heterodera glycines
gtcgcgcgagtgccctggagggtttgcaaatccgatttttaggccatgtgatcgttgtacggaatatgggagagcaaattatgcccaattgtgaccatctttgctttgtccgaataaggtccacagtagaaaatgagaacaccccaaaattgaaaattgtataaaatcggaaataaaataaatttataaaattttaatggaattaatttatttggttagcatagtaaatatatttatattataatggaaggcttttttgaatagataaaaattgaaggaatagcctcaaaagtgttcaaattaatttaaaaataataaagcaaatttattttcatttgtgccccccgaagtgatcgcacagcaaaaatatgaaaattaaaaaaaaattttttttctgaagtttagaatttcgaagtattgcatttttgcccccacccctccattttgtccgtccattcgctattttttgctacctttctgttgtcgctggcccttgggttgtcgaatgccgttgacactttcatgctcgtgatgccgtccaatttcccttcgctgaatgttttggggttttataaaccacaattaccgttcggataatcgttcaaaatgccgatcaatctatcaatcaatgaatgtccgtgtgttttattattgattgatcaattgatcgcacttccatcgctgccactctttttacttgtacaatcgcttcgccatgtcccaatggtcgtccaattcgcttcctttctcaaaaaacatcatccatttgcccgactcttctgttgcgtaattgtgatgcgcccttatttggttggcattttctgcatacagatatggcatttgcttctcttccgatggccttttgtccgtgtttatgtacggtttcgatcgattgttcggatgagtgatggacgacacgggcacattggtaattaccaccgctacgccgtcggttcccttcagctggcaaattctctgctgccttggcgttttcggcatttttttttcctgctgcggttaaaaaatgtcaatgtgatcaagatttatgtagtaatgggtaaaggagatgttatgtcccccggatttaaagcttttaagccatttctaattaccattttaaagagatgaatttataataaggaaaagcatttacaaaataatatgtattaaataaaaggggggggggaataagtttgttcaataacaacgacctctgttttggtgggatcagtggaatttgttatttggaaaaggattgttgaccaaaggcatagaacagcactgacaaatgagcagactgaccaccgcagaaatctcgcagcccccgagggggaaagtgggaggaattaaatactggggcataatggggagggactttggataggatgagtgggataatgacggcaaaaacacaaagggaatgatggaggaggaatggatgagatatacaagagatcagtgggtataaatggcacgataaatgagagaagaaggattgattggcttgggattggacgaacggatggacaaatttatgaggggattgactcgtgagaaatagagaaatttaaattatgcacaaaattggaaactttgaatgctgcgaataacagcagaaaatttaaaatcacagaaaatccaaaatttttgaccaatttttttttaatggtagtaaaataaaattaaaaaaaaattaacctatatttaggaattggctgcccaaaactccaatcataagatgtgtatttttttaacggaaaacagaaaaaaacggacaaatcttaacgaaaaaagaatacggaaaacggaattccgccaatgccttgcgaagaatggcattcattgtacaaagattggagaacatatggaataaaataaaaaattggtgaaaaatgtgtcaatgcggggtgatggagaacagcagcagccgaatgtataaaagaaaatgcaaataaaaagcgaaaataaatttaaactgattttgtaatttggactcgaaaaactttgcattttttaattaaaaaagtgtttacctatagtcaaatgttgtacagtagaagctcaaattatttttgtgaaaatggataattatttttttttttttgcaaaattcattttatgtgttaatttttttaggatttaaaccaaactttttctcggagatgtggcgcaacgtacacattagacactggcgaacgacttgaactcggactgctgccggaatgagcagaagcaacaacctcagaatatttccgactgaaactgccttctcgagattccattctcgactctccgtccgtcggttggccaatcgcattggccgaagactttagcacggaaaactgatcagctttttgggtttgaatggcttttcctgcattatggcattcttctgctgatatcttctgactcttttaattgtattggtattaattttattttattgcccatttatttttttaaacttatactgatgtaccgattttctcaagtattctgggcgaagattgatgctgctttcgcttttttcggcttcatttatttgtcgaaactttgttttatcgaaaatgttaattatgtatatgttgaaaagaatgactaattattattaataaattttatatgtccaacttgtgttttttggcattgtttcggcattttttagcagaacaaaaacaatgagagcataaattaaataattagtcggtattatcatttttgtataattttttaatagaaaattatttttttatattatagaatattttttagtgtatacaatttaaggcaaaagcaatgccttatgtatataaatgcaataataaaacacgtaaaattattgaatgaatggttttatttcacccggacatgatgcaataatgtcataaaaattaaaaaatatatttgaaatttaatcgaaatattttttctcaagcaatatgtacagtatgtattattgaaagtttgctgttctgctactttcgcaaattcacatttgtctactctgtctcgacgtctcataagtaaattaagatttttttcgttttaagattttttagtttttatttttgatttcgggaaacgtctcgaaaaaggacacagggacatttgcgggg

SEQ ID NO: 4243 - DNA, 2498 bp, Heterodera glycines
tttatcagagagagaagaaagtgccccccccccccttggtctttgagattcagccgctgctgccgatgtattgcgtaaacaaacaaatggatttatttatttatttggcttttttgatggaaaaggacaaaggcaaaaacatggcatggcaaaacattctcattctcttttcccgtttcattttgttgtcttttttttacttgctgctggtacgaagggaatggcggctcgtagtatacagtttaagacccataaatttttgtattttttttttcatttagcaagcaaaaatataccatatataggtttccgaggtagctcgctgatcacgaatccggcattcatttcgaccaaattctgcattaaatcggttttgggtaataaatgaattttggtgaaaagcaaattttcgactttatgttcgaattcggtcaggggttcgaaatcggtcgaaaggatgccgaattcgtgcttagcgtacatgagcctgggatggcacggcatttccatactcaaaaataaattgaaattcttccattttcctatgggcctctctcctctctaaatttaaatttttagaaaattgaacagcttttaccccaacccttcctccacaaatgcagcacattctctccaaatttgtgccctcctcagtttcgttgcgtccccccgtccgatttgccggcatttccctcccttttggcattgcggagcgtccgaagccggccaaaattcagttgccgcccccgggcaacgaaaaaggccattggcactacgagcgcgaatattcgcgagacactcgctacacaaaaccgcttcgagggggagccttcaatttgatagggtaaaatgcaatcaatgtccatttgcactattaatgttacttgattttttaatgaattctgacctaaaaattgtgaattgttagatctgataagaaattttgcacaaaatttttcgtgaccaaaacaataaattcatttgtaaaataatttctttaaaactaatttaattaaagctattttctcgatgggattgtctcttcctcttaatcaattcacttccacttgaattcccccgtagcattctcctcgagcccatcaaacacaaagaattgtatccgatgttcgcgctgcccattttcgccgtcactttgggctccgttgtcctcctcatcagcgccttcaaaatcgaagtttggctcgaccgaaccggcaaaaattcgtacacgcccccgtgggattgggcacgcgttcgcgacaaatattggaagctgcctacacaaatgtggacatttaaccatttttattttaacacttttctagactttggactttcgagagcagaaagacatgggaaatgcccagcggcacttccgtgctcaaagtttcttgacactattgaccagggcttaactaaaaaagcttcttgccctttaagatttgttaggccaattatcgcttgtcaaaattgtcaggttccaattagtgtttttttgttcgctaccacagtgataaatacccaaaataattccccttcagttttatcaatgccaaattctggccaattgccattcttttgtcttgtgtattagtttgagttcctttaccgtcattggattctgttggggttcccccgccgggcatggaaattgccaaatcgatcggtagggctaaaaatgatgaacattttgcccttcccttaacccatttgaagggttactttgcctctcaaatttgctaattaggtatgacccgaccggtgtgacgcacgaacgccttttggtaatggaacagttggaggacgagttggtggaggcggcgcagaagcgcggcacccgcgacgcccgagggtatccattgccattgcatagccgagggaagggccattcggaagcgaaataaggggacaccaatcacacgaacaccaattaatggacactgtgatgatgatgatgacagtgatgatgcaacataatggtggcaccaccgccgcaattgtgtggcgtgccattcatttttgggacgtccccgttattacatggatttcctactgtaacatctggagtacggtgactttagaccttttgtttaaattcgctgtaaagacaattttagggggcactaattatatggttaatgtggattcccatatttaatttatggttttgtttgatttggcgacattcgctatgaaatgttaatgtattaattaaatttcgctttaaaattgttttttaaaaaattaatagcagaaaaataccggtttcatacacattccgagtactgacatggccctcaaatgggatataagcggcaaaaagtcggaaatgatgatgatggttgccagccggcgttaaatcctaatttaatacatagtttagccaaaaagtgctaaaaatgaagatcattttttaagattttttccttggtaaatttgtgagttacagttaaattgccgactcaataccaagaatcgggaaaaatttacgtcacacc

SEQ ID NO: 4244 - DNA, 3190 bp, Heterodera glycines
agcaggtggtagaatgtggaattcggcctggctttttcagagcctaggtcgaaaaagatgaaaccctgagcttggtcatgttttttccaaagatgcttttgtgaaattatcccttctccgcttgcctgaacccttccgagtaaattgtccgtgcgccgtgctcgccgaactgaatgtccgcgtaccaaagaaacctgagcaagcggttgaaagccgcacggattgagcccaagccggacacaatgggcgtgtcggacagactgagccacgcgggcaccacgcggactttgctccggtccaactcaacctgacaatgagaacacaaattccataaatccattttgaaaagtgtggtttaattcataatgagcttcttgtccatttttgaaaaggaaatttttttttataaatttcagcgatatcattaaatacaaaaattcaatttttaaaaagttcggattcaaattttaaagttggaagatgttcaagggtataataccgggcgactacttttaagaatttgaaaaatttgttaatttctggtttctggcgatgaacattttggaattggattggttttaaaccttgctatgattactctggtttttaaataaaatttcgaggggagggggacagttccatttttcaaattgtaccaattttttggagaacactcccttcgcaatggtcgcacaaattcggttcggctcctttctgtgcacatacattcggagcaaaaacagcgaccggacgcgcagcagcaggaaaaaaatgagcaaagcaatggcacaaaagaatttgccaacgatgccaagctaaaaaggggaggggggagaaatgcccagaaaatgccactgattttcctacaaaaataagaagattccaagagttacataacccaaaaaaaatgcaaaattaattattgtttttataccagaaatttatacaactgttcatggaattgtcattttagtaattgttaaaccaaagaatggcacgctaattgtaaggcttaaaatcattaatttaataaatatcaaaaaatttatgagaatttttggaagaatttgaagagaatttgaaccgaatatgggacgaatttttaaagaagtttttattacttacttgttaaaattttataaatttcttttaaaattccctcgcttccctactgtttgacaatgagtggaggaatagtgtccaaaggtccaaccctaatcagttcgttgtgtgtcactctgagcttttggagtgtgaatttgccgctgcccacgcgcacgaaatcatcgacggcaattaaaaatatcacgcagagaagggcaaacgcataacggccgaccgtgaaaagccatgagccgacccggtaattgtagacgagcagccaatcggacggccgaaggcggtccaaacggtagcgacgagcgacgacgtcggcacggaaattgtcggtgatcagctgaacaacgaaagggaagggagtcaacagggaattatggactaaattgggcaaaaaatgaccgggaaggagaatgcagcaatggcccaatgtattagggattagagtgggcccgtaacaaagggaggggagattcccaccctgggaacgtaaaaataaaaaaattttgagaaaattgatggttttgaaaaattgtcaatttgggtagagggacttagggtaatggaaaccacaaaatttgcaggtttagacataaagtcaagatcaaaacatgcggaatattgaagaaaaatgactcaaaatgttgaaatgaaatcaccgatgaaatccgccgcgcctcgcctctgccaagcgacggattttccgtgcccgagatgggcggtataactgacgaagttggaacaacacgaaattccgccgaaggatcggggggagggggacacggagtcgaaacctttgcccgcctttggtggcagaagaaacgccgaaaatgggaaagtagaaattaacattaataaagttgcataataaaaataaaatgacacaatctgattttccgatctccaaaactccctttcctcaattttttgactgttatttttgtagatttatgggttgttttccattgaaaaaagccagaaacccccaaatccatgggacaaattaaaaacctgctggaaatggtcgagcattgaaaacaactagcaaacgaaccacttgaagaaacaattgaaaaacagcgaatgattatcatcacttatgttttgagtttcaactaaaatacatttttcatcaaaactggctcaaacccacataaaggtacaacagtcacaccacagattttgcaataataatgaataaattgaaaagaatcaacaaaattgttttatcagcgcttaaaaagataacaataacaccaccaaatcgcttaatggtttttcgtgattcaacgacgtcctgcgccagtcggcacaggccccttcacctccaagttgagaccaagtccctgaaaatatgaaaatgcactatgcataggttagaaacaaaaaattgcaaattaatatgacaaaagaaggaatgtcctttcgaatcccttcattgttaatgttaattagtaggtttgttttctcaatttcaaaaaaagaaaaatcccgtagaatatcgcacgcattttctcattaactgaccaaatactcgatcatgtccttcgtctcttggtctgtgctgatcgtctggtgattctgtgcgtcaaggtaggaaatttccggcatgtaattgtcccgacgttcccgctcctcctcctgcaatttgatggaaatgccgcggacagggcctcgctcaatccgcttcatcaaatgggtgataaacctgcaaagtcccaagtgttttacttcaaatcattgaatgaccctacaaaataattttttcaacaaaagaattgagtacctctcgtcctatttttttacaatttgtaataggacaaaaaaatgttagaaatccaatttgttttaagacctaaacaaactattgaatcagactgtacatcaccggatttacaagtatatacattttaagtcataacatttttattttttggtcttccttttaaattgtcaaagccatgaattttactacagcttacattaaacgaaacctgaaccactaaagttcggaaacgaaaacaaacaaaatatttgccgtacccggcaattcgattgcgcttctttttgctcg

SEQ ID NO: 4245 - DNA, 2929 bp, Heterodera glycines
attaattactcagtgtgcgtgtggccaaagaattgtgcagaaattgtactcgcaaaactgatgaagtgcaaaaggattaaaatggaaataatttgacaatttcgttttgcccccccccccatttgccgtcgttgaacccaccgtgtgacaatgcggtaatagttgcgggaccaactctccaaacattcgttgtccccgggagggatgtgcgccagaatgtaggccgactgttcaaatgtccaaattagcaattaaatgaattaattaaggaaggcatcgtccaactcctaattgactattttaagcacgtccaaatcgctttgaagagggaatggcatcgaagtgaatgccaaactctgctcacctcatccgctttctctgctgcccataattggtcgaccagccaactcagcgacccgtccgggtccgtctgattgatgtaaatgaacctgggacagaagagaaagcgagggtcagtgatcgaaaccaaactataaaagaataggagagacgcgagagagcgtggcaaaatgagaggacggacagattgagagcgacgagagatgacgacattccccccccccccctccgttaagtgatggtttgttccccgctaatgggatcgctcgttaatctatcataaattgccgatcactgacaatgagcatacgaccactcacatgttcgtcttttcgcagtatccgttgttcagtgagatcagtcgaattccgggcaaaagtggcaccatataagagccacgactgaaaggttagggaagggggaatttggccatttacacccttttaaaatgtataaaaatagttttattatatatgcgatccatttttattttatttttccatttccaatttcattttctttatttatttttactaaagggcactacgctccgcctcttttggcagtcgcgcggcggtccgttgcaccgcgtcaaccattgcgcgatacatccactggggccggaaccgctccggcacgaaatggggtgcgaatgcattcaccggcacaccctcgtggttgccgagggtccaaaagacgggcacagtgtcaaagtgatgacggagcaacgcggacaattgatccaactgggacaaatggcccacacgggaatactctaacaaaaaaggcagaaattcatggatggaattgccgaaagaaagtaaagtctgagaaggagcccgagaatctcgagcagtcctttggcgcatttaccccagtcgcggtggtccatgtaatcgccggaaaggaaaacaaaatcgatctgaaaatgattgtgaattggccggccggtatatgcagacaaagggttcttatgcttaggaatctcgaggaaagtttcgggaaataaattcccggcttttccttttttggactaaaataaaatataaatgtgagtgcctcgtgagagcgttggatgtgttccagcatattctccactgtgcgcagcttaaaatcacgaaaaaacttttcggaaattcagtttttcttaattcattcccttaccggaatgtcacatttggccaatgtgccccatttgcccgcgggaattcgaacttttgtctgccctaaataccaaagcaaatgcaacatgtcaatttcgttggccgatcactccgaggggtgccaacctggcgatgccctctcagtcccattcacacagcacaccggctcagcacagtccgcctccgtcccggacgcgtacttgcggtcaaagtgcaggtcactcaactgcaaaatgcgcaaaggccgtgccggcggaagcaaattgagggtggtggtgtgattttctgccggcggccgagacaactttttgatgccgttgacttttggcggtaacggcactgtcctttggtgttgaggtgattgattgatcagcttcaatggtccctcttcctcctcggcttagagcaaatatttcgcaatgtttttgatcggataccattgataacgaatatgctcaaccgaattgaaagttggtgggatttacagacacttaattaatcctgtcccggtccatttctgaaatcatgaaccgttagtttttaaaattacagcctatggtgctctttccctcaacaattatggttacggtaggttacagtaatggggttatcactacgtttgtgacaacgtgttccgtccgctgtccgaccgactgactgaccaattcgtgccgaatgggtccaacggtgtgccgcaatcggtgaccaacaaagcgcagagttggccgggactgatcacgagacggcccagcacgtagaggaactcttcccggaactgcgtggtgatgccatggcacacgaacgaatccgagtccgcaaagtgacggcacacaaaatcggcaacactcaaaattcggtcggccgtcgcatttgtctacaaaatggtcattcaaacggaccgatcaaaattcgaaggcgtaaatgagccaattgaacggactgatcactgatcagcgaaaaaaccacctcatataaaagtcgaaggagttcgacaccgccgcgacacccatagcatttccacggaaaggctgcgaatgggagacaaaaacaatttaatgtgcaaataaagccatttgagcatagacaacaccatttactgctgctggtggttggagaagaagtgctgaatttgtgaagagaagcaaaaaagtgccaattcgaagagaaatgccatcgaatgagcgacgaaatgccattttttacaaataataagccgagcgatggagctaattatattttaataataatgtgaacatcaaaaataaagtgaaactgaacagcaaacggaaacgagagttcaatgttttgcttatgcaaaggaatttgtaaccaaattcattaatggtaattattaaataattaacccccagataagaacctaattagtgaaattttgataaaaaaaa

SEQ ID NO: 4246 - DNA, 1477 bp, Heterodera glycines
attgatcaaaataattgaaagattcgtgatcggggaccccaaaaaccccagtggataaatttttatgactatcacaaaaaattttcaaaacaaaagggtccccccttttgaaaaaattttcaaaaactgtcacttttcatatagtgccaaaaaaacaaggaaattacaattgacatccatccatttgctggaagggaaacccaatcactctgtcaaattccaacgctcacaaactcccaattccgatcactaattgcgtaattatgggcggacatcgccccttccgcgactaattaacgccctcctttttattaacccctcggggcgctttgctcacatgtcggactgtggcagcagacaaatgggagagagtaacaaaaacaacactaacaactgacgcctgtcgcatcgcaggccttttttgtcgtttgcaccgcatttagccctcgtgttaaaaaatcaattttataaaccgaatattcatacacaaaaacaggagtaaatatagtcatcagcaaaaaccattgaaaaagattttcaaaatatcatttgcgtccatttggatgtttgtggccctaaagagggccgtttgggattgttttttggttgaagttctcttccgtcaccgttctgctcagccaccaaaaccgtacaaagttcggccctgacgtttcagcgcgtaaacgacatccatcgcagtgactgtcttccgcttcgcgtgctcgcagtaagtaacctaagaaaagaaaaattggtaaaatatgtacttaagttagggtttgctccatcccatccctatttttcgagaaatttagtcacaaaaagcatttcatagaatttccgggattcaaccacactcagacacctaattggaccaatccctaacaaaaaaaagatattcaccgcgtcacggatgacattctccaagaacaccttcagcactgagcgagtctcctcgtagatcaggccggaaatgcgcttgacgcccccacgacgagccaaacggcggatggccggcttggtgatgccctggatgttgtcacggagcacctgagaaaatggggagaccaattagaccttgaaaaacacgcctaaacaaagcaatattaaaaaaattattaattaaaatcacaaaattagtcctaattccgcccactcacttttcggtggcgctttgcgcctcccttcccgagtcctttgcctccctttcctcgtccggacatatttagcacagtttagttgaatggaaagcagacagaaaacgaatgaaagaaggaaagtgaagcgaatgcagcgcttggcgtccgttttatgcaagggaaaaacgcgggaagcgaagtgcaggcacacggcgatgacttttcgtgtcgataataaagcatttgaaaaagggcgctccccgctttttctctaactcatcggttctctctccattcctttctctgcgctccttttcaacttgcttagtgtctgcctt

SEQ ID NO: 4247 - DNA, 5830 bp, Heterodera glycines
cttctttcacacaacaaaatgccaccaaaaccatccggcaaaggggcgaagaaagcggtgaagtccaccaaagcggtgcgaacgggcgacaagaagaggcgtaaggctcgcaaggagtcgtactctgtgagttcggaattcgggggaattttcagtgccgagggtttcttttcaacagcgttttcggaaattatagttaaaaatggagaatataatgtaaaaaaggggaaccgaccacttcggcgcggaccatttcggcgccgattcaaataacttctttcattatcaaccaaattaaatatttttattatcattcgatagctcttgagattctctattagcctgcaaaatttcaaaaaatttcatctgttcacaaaaaagttatggccaaaaaactaactttttcttggctttttcggcgccgcgtgccataacttttttattgttgaatcattaatttctattttggcatgtaaatatagagcacacatagagctttcaaatgatgatggagaatataatgtaaaaaaagtacttacggtattcttgtccccttccaaggtgtacatctaccgcgtgctgaagcaggttcacccggacaccggcatctcctccaaggcgatgtccatcatgaactcgtaagacattttcaaaagttaacgatcactcatgaattttgcttgtcaggttcgtcaacgacgttttcgagcgcattgccgcggaagcctctcgtctggcccactacaacaagcgatcgaccatctcttcgcgcgaaatccaaacggccgtccgtctgattctgcctggcgagttggccaagcacgccgtgtcggaggggaccaaggcggtgacgaagtacacctcgtcaaagtgatgatgcgacggtgctggcgatgaaatgaaacccaaaattatcccaaacggccctctttagggccacaagcacccaaatggacggatatgtttttcgaaaaacttgcttttgcattttcttttgtttgaataaatttggaaattattgaaattcttctttgggtattcctcttgcattttttgagttggggtgggggcgaaggttgttcgaattccaaaactggaaagaccaaaacaaatttgcttatctttgtacgtcttaaggtcgacttcggtgtccggcaagggagctcggcgcgtgaacaatcgaaacgtgtcacagaaagacagcacggttcatgtctctaatcattcgacggaaacgttttccgactcagtggtgacggaagagatctttgaggtcgattgaaaccggtgaccgttgtgtataattttttttcgagtggccattcccaaatttttgtgataatattgtttttcttgtttctttttgaaaaaataaaaataattccgtttaaatatttataatcgagattttcgccactaaaatttgcagcggaccgttaattaatggcactgtgatcttttcattttctcctatcatcgccccgttttcactgttttgttggccgttattcatcaaatcacaacttttccacaattttctcctccccctcttcctcattatttggttttggctccgattgtccacttttaatgcgcaaatgttgttgctttgctgccaaatcgccgatgaaactttccactgtttcgtctgaaaattaaaatttatataataaaggttaataacactgtgcaagctttcttcggtttacccattgtcgagttttggtcgtcgttgaactcctccttcatgtcgtgcagtcggagcagtgtcacaatgtcggcatggcaccgttccaccgccaattccaacgccgtccgtccgttcacattttggtgcgttttctctgcatttcgtttcaacaattgatagacaattctgcaaaaatggaaatgggatttaatgtgtttcgcccttctccgcctttccccctctctaatcacattgtatggccacgttcggcggccaaatgcagcggcgtgttcttcccaccgtccaatccgttaattttggcgccgttcagcaatagaaactcgatcattgttgtttggttctgacagagcgatcgaattacaaaagtttttccaactcaaaattggtatttttggtagttttttttattaataaatcacgtaaatttgttcccgttgtaaacaaaacgaacattttcaacagcaatgtgcagtggtaatgttattgttgttgtcattgtcgtcgtccttattgctgcaattactgctccaccatgttgctgctttggtctattttgctgatggcactgttcaatgttggcatttgttgttgctgtagcatcgtttccgcttcctttggagttgcttcccctctcctctccaccatcttcgtgttgttgcttctgctgctgctgttgttgtgtgtttgcgtgcagttgcaattcctcgttgaggttgagaccatcctggatcatcgccctaagcacctaaattaaaaggggtaaagccttttggcccatttcaaaaagaaaaccacctcctccaagcacccggtgcgcaacgcgttcacaaggcggcggtgctgctgcccaacaacgccgcgggcaaaacaggcggacgcccgttgggcaatcgccgcgcgagcgctttgcaccaaattggagtccgagccgaaggaggaggcacgggagaggcgattttccgctgtaggatttaattgatcattagtaatttgaaaaacaatctgactgatcccgatccaaaaaaggatgaaacacgatcaaagaattggaaaagtgagatttgaaaaatataaaattaatttattcatttatttgtaatacgagaatgaataaactgtttgcatttctgagttttaccataaaagttgtcgtcaaccgacaacgcatcggtaacggcggcgtcgtcaagcagtacggtatgcctcagtttgaccgtagtgcttgttgttgctgctgctgatgatgggttcgtttctgttgagtgttgtgctgttgcacccgtttgtcctccatcactgccgccgccttccctttcatttttattcagtgcagtgaccgagcgagaataagctgaaaaagggggagaaatgaagacagttttatcggggggaggttcactgattgtgagtgatgcgatttttaattagccaatcaaatcatgacaatgggcggaaagggcgatagtgtaagtcccaaaggtgattcttcaaaaccatatcaacacttatccaatgtctgatcagttcggggtacaacagtaatacgatcatccactttaggttctgtcattgtcacttttctaggctatatatttgaaattttaaggattttttgagtgggatattttaagacaaattactgatttctgagtgtctcattgttaagccacttaaataaataattgtagcatccaaatgatcatttcatttcattgtatgtgcatttgacacactcacccatttgatacaatggctgcgatgcgaatttcttctccacgtatttggcgacgatccactgttcacggctttctctggaaaacattagatttctcattggtgggctattaaatgtcactttgccatgctttttccttcacctgttcgtgtgccgactgatgcccattttggcattttcctcggcatttggcaaattgcgcaggaaaatggcgttcactttccgattgccgagttgcaacagaatgttacggtgctccgtctccagcgtgtccatcgtaagagaactgacacattttaaaacaaaataaatttaatagtaaaatttgaatttactatagttgtttgaaacgcaccggactttggagaagtgaactccgagactgcgatggacaccgcagcactcaatgcaaatgatggcctaattgtaaatattatgcaaaataagtgatgaacaatttatttaaataaaaagaaatgggggggggcaaaatgatatgacacaaaaaatacacataagtacccaaaaaaacttactataaactacaaattcgttgcaaaaattcgtcccaaaaaagtaaatcctcaggtgtttgacaaactaagcgcgggactaattaactcttaattgggttctgggttgatcatactcatctgatgcggttgacccaattatatgggaaaacccactccgatgtttaagctggtccatttggcgtccgggcagccgcagtcggcgcatctgtcgttgccggggatggccagcaactgcttgaggaactgcttcatctgctgcttggcgttctgctcgtcgtttgctgtgggctgccggtgcctttgcgtggccaacgacgacgacgaggcactgtccaccgaggaaacggagggcgtcgcaaagggcctcactgacatagcggaggcagaggagtgaggttcagcaacggactgaaacaaaacaaaacagtgaaattttaagaaacgaaacagagtgagggggtgggaagggatgggttcaaaatttcccacaaaaatatagagaatttagagtcaaaaatcagtccatctgttacgcattgttagccacccacttctccgtcggctgcttggcactgtcctttgatggccatgtcgtcctttgtccgtcgttgttcgtcttggcccctttcattatgcacggacgaagaagaggaagcagggaccgcctctgttaaacaaatgcaaaacgatgccttattacgccaatgcaactgaccggtggcagatgtgattgaagtggcagagactgtcgggcggaggccgccgatgaaagatttgcgcgattgggaatacgaaccgtggtcgtcctctgcaaaagtgttccataaatcggtaattgcgggttggatgttagcaattagattaatccgcccaaaagtccgtcttggcgcgaacggaaatcggcaaaaaaacgcaccgtgcaaattttggatggtcctttgcagcgcgcggatccatgcgttgcacaacgactcggaatccgcctgcagcaaatgacttctgcggcaaaaacattggcattatgattttaaaacgacatttagatgccatccctcttggacacactttgtgggagtgaccagctcgaaacagcagtcccggtcgacggtggcgggcgcagggcggacgaggcacagtttcaggttctcctccatcactgtgggcaactccggctcaccgtcgttcgttttgtgcgagtacaactgaaaaccaccaaaacttaaaaaacgataacatcgtgaaaacatgttcccaggagtttttggggtcactgaacacgaatcagcaaccgattctgtaaatcccgaatttcgcactgatttcgtcagactccactgattcggcccattggaaagatttaaatttttaatgcaagattgattgactgaccggcggggcgtcaaaaatcatgaaccccgccccttatcgtgcaaagcagctaatttttatttatttttatttgatttgatttaatttaatttaatttgttttccttatttttaattattttatttttattttattttattttggtttattttattttaatttattttattttaatttattttattttattttattttaatttattttattttatttaaatttaatttattttaatttattttattttatttaaatttaatttattttaattaaatttattttattttattttattttaatttattttaatttattttattttattttattttaatttattttaatttattttattttattttattttattttaatttatttaattttattttattctttattttcagtaacaatttttacggtttccagaattttcagaatctgttctggctgtgtttc

SEQ ID NO: 4248 - DNA, 2031 bp, Heterodera glycines
ccccccccccccccctcccctcggcccctccagaacatcatttcgcaaaaaatttggttgaccccccccccccttttcatgtatgagctcaactccatttgactcatttttcaataatttttccatgcctcctaggttcaagcaattttggttaaaagataccatgtaagtggtgtaaaagttgtccacgttttgtcccatttcaggtccatggtcgcgtgtggagggttcgcccacttctccgaatccgaatattccctttgctaaattggacaataaaccgttattcaatgttgacggccgactaaacccttctctgactatcctcggttccgatgttaatgtgcccagggaaacagtgatactgaacacggtaaattaataataattagcccaacaaattttaagattaaatcgttggaaaattaagtcagctaattttaaggttgtgctgccgtataaggaattgtcggctaattacaagaatcaaattattctctgattcgttttggatggacagagacaccaaaatgataatttatttttctttgttttcatattaatttatagctatatcatttatcatttctttgtttttcacttttttatttgtgtattcgttgggataatattaattacgcaaattgtttacaaatttcgttttggtttttgaccaataaatatttgtttcttattcatactttaaatttttggcttgcattttttgttgtcatgcgtttttgtcaaagatcggttttctctctttcgagtaagttttttccgattttctttcccttttttctctttcgtagggcgtttttacgtgtcctacgcgcaacctcagcagaaagtgcaaagtgaggaaaatgcttggaactcattcatttggccatgatttccacaattagcatataaacgggagaagccgcatttgaacgtcggtacaattggccacgtcgaccatgggaagacgacacttagtgcggccattacgaaaggtggcgcatttgctgaccaattccaatcaatgttttgaatttgagaattgtactttgttttagtaatttgttcgttccttaacattcaccgttttaagtgctctcacggcagaaaaaagcgcgctttgtcagttacgaggacatcgacaagggcgcggaggaaagggcacgcggagtcaccataaacatagcgcacattgaatacggtcagtgggagtcatgggaaacgtacaaaaggcgaatgtcgtgatacccttgcccaatggggcgtaaataatctgacgatgagacaacgaaatactgaattttggccacaaaaacgaagtgccaaacttttgcatgtattttgtgccgtttcttttttgtacgattgctatttttgcctgatcaattgcgccgatcactcccacattttgtttctgttaatgccatcttttcactgtttccagaatccgacaatcgtcattatgcgcacacggactgtcccgggcacatcgatttcatgtaatgttcatagttttaaacataatacggaacttatacagaaagaatatgatcaccggcactgcccaaatggactccgccgttttggtcatcgcagcggacgacggagtgatgccgcagacgcgggaacatttactgttggccaaacaaatcggactgcgcgagatcatcgtgttcgtcaacaaaaccgacttggtggacacggatgtaatggaattagttgaagttagtgtgggcaaaagtgtaaatgcaattgcgataagcgaatgcctttgacagatcgaagctcgcgaactgctcaccgcctacggcttcgatggtctttgattttgcgataatatttatttttcatgacagtttaaattcttttgtattatttattttttaggagagaatgccaaaattgtgtttggttctgcccttcgggcactcgctgatgacgacgacaagtgcattttggagttgatcaatgcgctggacggactggaggagcccgtgcgtacagaggtactgcttggacttcgcatgc

SEQ ID NO: 4249 - DNA, 2959 bp, Heterodera glycines
gacattcacgtggttcggcaaaagcacagcgcaggtggacatggaagacaaaactttcaaataaaaaaacggcttaaaaccccaaaaatggcattttgaaaatcttaacaattcacacccaaaacttcaaatttttcccggcgcgcttatcggcaccgccggcttcctgttcccgaaaaatttttcgaaaaagcgcgttgcaaaaaaaagcatgaaaagcaaaaaatattttgtcaggggcgggcccgtgcccttggccctccgcccaaggcaacttaaattatggtcaacatttcctcctttctcatcgattgtcagagttcggccggtgaacacgtcggtctgctgtgtaagaatctatactatgatccaatttcgcgtggtttttggttgacaaagccgggaacagtgacgccaacgaacattttgaaagtttttaattcctttgaaaaattgtagtgtaaaataactgattaggtggaattcttcatgttgagcgaggcggacggcgggcggaggcagggcattcgtaacggattccaggaaacggtgttctgtactacttggaattcctgcgcaaaattatttttcgactcggaattggtcatgccgggcgaacatgccaccggcacattggtgttcttgaacaacgtactgataagtaagtgcgcttttgaggccatggtttaacataaattcacctttcttctagcaatttttcttttttctcccaatttttagaaaaaggtgccaaattcactcttcgagagtctcgtcagcggacggttggctacggcattgtgtccgaattgtacaagccagttttcatcgacactttcaagaagaaagttttcaactttgagaagataatggaaagagcggaagtgatgacagagggaaatgtaacgccatgacttttcattctttattttattttagattgttttaaaaaattatttatttattggttttatcagtttccgactcattgtcagctgaactttttcttttttaagtgtgtttttgtaaattgtcagtggtatttcgtaaattgccgttataaaaatggcaacgaattcggcatttgaacggttggatgattacatttggggtcgcgctgacgagggcgaatttctgcggggagtggtcgcagatgagcgattagacaccgagaaactgttgtcgcgagtgcaaaacattcaacgggaaatgaactcgcgtcttcgccaaggggtgaaaaaaatagaaaaatcattgaaggaaatgccaatttcaggtggaagagaattacccaagtctattggagcaggtcagcaccatcgaacagttggacagtgcccattcgcacgtccaacgcgaaatggacgcggtggtgaggcgggccgacgcattggccaaaacgatggaggaacaggtcaacaacggagaagcggcaattgggtgggaggaggggagcggagagaagggagggattggtgctatgacatcactcaaaaactaatcaaaatagaaatcccttaaatcttcaaacccaaacatttttgtttttatgcacaggtgggtaaaatccgtaaggatgtgcgtgcaatcgcttctctgacccaactgagtcggatgcaaggcgatgcgatcaggtcaagaaatttttaaaaagatgtgattaatttgtttgatttaaaatgtgggattttaaggtgcgaagaattggtggacgcatggcgcgcggagacggatttgatcagacggacggaacacatcacagaagtgaacgcaattgtgaaggccaacgacaaactcagacatgtgcggtggcattccattgcatttaattgcccaaaaaaccctcagaaaagccgaaataatgggtgcaccccaaaatttcgccgccgaaattttgtcccgtccccgaaataattgctcattgtcacatattttatgtacattttcagttgaaatggctccagtaccgttgtctgttcagtctttccgagatgaactcgcgcactcgtcaggatttggtcgttcagttgcgttccgcgctccgttcgctgaacgcgagcggagtgagtgccgttgtgaaggcattgcaacaacttttgggtgagtcgcgagcgcaatttggcgacattttactttattagtaaacgaattgaatgaatttgtaccattttgtgcgttgtttcaaacaaaaaacttttcgccagacggtgtccacgcgtgtcagaaggaactgaatgctgtgatggacgagtccgtctcggagttggacgcgctgttccttcagttggacgctcactcggcaccggagaagacagccaaactgttgccgcagttgggcaacaaattgcacacgcaattggaacagtttcaattgttgggtgaatattttgaattattgagctgaaatttattaattttaaatttactttatttatttttgcttgttaaggaattgaaaacgcgcagcaatttgcacgacatgtgggaaaagtgatcacttcgagggtaatacaatgtttttggggttcccaatggattgacttcaaaggtgccacccaatgctccgtacgcaatgcgacttgttcagaccgtctacaaatgtgtccaagcacacactgattcagtcgccacagtgattaggtgaaggcatcgggtgggggggcggagatggttggccaaccggacggaagacgatgagggaaagaaagggcacgaacgaacattgattgaccggcatatgccatctacatcagaaacgatcaatcgtttatttcattcagagacgcactcaatccgttgaagacgagcattctgagccaatcattcaaaaatcttaccacatttgtcgaccaaacgtttgagcaggacgaacgcagagacacaattgtagtggagcaagttggtagaacattctaattaatctgttcattgttgaaatttctttctcccctggtttctc

SEQ ID NO: 4250 - DNA, 1684 bp, Heterodera glycines
ctcattgtcacatattttatgtccattttcagttgatttggctccagtaccgttgtctgttcagtctttccgagatgtactcgcgcactcgtcaggatttggtcgttcagttgcgttccgcgctccgttcgctgaacgcgagcggattgtttgccgttgtgaaggcattgcaacaacttttgggtgagtcgcgagcgcaatttggcgacattttactttattagtaaacgaattgaatgaatttgtactattttgtgcgttgtttcaaacaaaaaacttttcgccagacggtgtccacgcgtgtcagaaggaactgaatgctgtgatggacgagtccgtctcggagttggacgcgttgttccttcagttggacgctcactcggcaccggagaagacagccaaactgttgccgcagttgggcaacaaattgcacacgcaattggaacagtttcaattgttgggtgaatattttgaattattgagctgaaatttattaattttaaatttactttatttatttttgcttgttaaggaattgaaaacgcgcagcaatttgcacgacatgtgggaaaagtgatcacttcgagggtaatacaatgtttttggggttcccaatggattgacttcaaaggtgccacctaatgctccgtacgcaatgcgacttgttcagaccgtctacaaatgtgtccaagcacacactgattcggtcgccacagtgattaggtgaaggcatcgagtggggggggggcgaagatggttggccaaccggacggaagacgatgagggaaagaaagggcacgaacgaacattgattgaccggcatatgccatctacatcagaaacgatcaatcgtttatttcattcagagatgcactcaatccgttgaagacgagcattctgagccaatcattcaaaaatcttaccacatttgttgaccaaacgtttgagcaggacgaacgcagagacacaattgtagtggagcaagttggtagaacattctaattaatctgttcattgttgaaatttctttctcccctggtttctctttggatgcgtaatcccctcaccttttttacagcttaacgccactttccgtgccgagttggccagcgtggcttgggacatggcattgcagcgcgaaatggagggcaacgtctccaaggcgttgcaatacgtcggggtgaagttggaacagcaaatgacttttggcgacgacgccctccgtttcaccggtcgcatttcacgtgctcaaactcacaattaccagctgctgaacattgcacacgaactggcgaagtacgtgcatcaaaccaaattggacactcaaatttatcatttgaattcttctatttttagatattggcccggcctttgtggccctcttttttcactcatccaaacggccgtcaacacaattttggagcgaatgcgcaccaccgtttcgcttgttttagactcaatgcatgacgagaatttggcggtcgctttggcacccagtgccacctcatcggaatatgtgaaggagctgtgcggacatctcaagtgagttggcacgggtgggtggcctagcaactggttatatccagaaatgagtaaatgactattttactgtccccttttaagagtgttccgtcagcactgtgtccaggtgaagccattgccgattctgtcgaggctatgcccg

SEQ ID NO: 4251 - DNA, 4210 bp, Heterodera glycines
agacgagcattgaccgttttgtgcgtgactttgactatttgtgccgcaacggactcgaggcgggcattccctcactcaccaagtcgccgaatgtttcatctcttccaggcattcaattgtaagtgcgccaagctgctcaactcacaacaacatctcaaacaaatgcttaaacttttgctggacgcttccgacagaatgaatcatttggctgaagtcgtcgtgcgtttctatttcccatgccgttctctctctcttgtatctgtgcttctttcagaatggcacttcgcccctttcttctgtggtgccccaatggttcgtcgcccatttgttgatttgtgtctgtggcacggaattgcgtctcccacacgactcgtaagtttctgtccttttcctttgtctgctgggcttcgttttgcttataattagtgccgggtggaccattccccaatacgttcattggttcaacacgcattccgaggtggagaaatggcgctttctgcgcaatttattggacgcctacaaacattcggtggttgcgcgtggaggggctgaatttgtgcccaactttccgattctctgtcaaattgtcgatgcgaatcttctcaaaactacggcaccgatggcataatcaattttacataataattttatttatttgttttcccttctggcttctcacatcttaatttattaattcggactaatcatctctttctaaaagtgtaagcggcctttgttgttcccttcctctggactttattatttgaataaataaataagatttactttttgtttttccttttggcttctcgtcttgatttattatattacatgtacagacaaagaatgaacaaattaaaaaagcaaagtgagatcgttagactttccaatgggattgaaaatacattggcttttgtccgtttttttccttcaaaattctgtgccgctaagcacttgttcagaatccagcacatgtccaccgtccgttagtaacgcaacttctccgtttgacctatgaaatggtgtgccatccccgccaacatcactcgagatcgccatcgtcgtcaaatggtcaacaacagcggatcggtgcaaagcatcggtggtcgtttcgaccatttctaaccactgggcgttgtgccagcggaaccgcgcctcgcgtatacgttctcgccaatgtgcattcacttcctgaaacatacaaacattgggtccttagtttactcattaaacaacaaaatatgattgtatccctacacaccgccactctctccaacgtttgctcacacaacgcgcgaatttgcgtgtttttgtcgtgcatcaaattgagcaaaagcagcggaacaaccgccgctgtttccaccgctttctcccttttgcttttgcgtagattaatttcctctttctgttgacaaattcgcttggccatttcgccgccatgcgcgagaagagaaagaaaaacgaaaacgcattgcaacacaatttcgtcgtcgtcttggcggtctaatttagacatgggacggaggctacctaggaatattgggggttcaaatcactcactgttcagtgtcgaaatgatcagtggcaacagatgcttctccacccgttctgccatttcaagggaatgtccggcgaccgtgccacacaattggacgaccttaaattgtttcatcctgctggatggttttgtagtgaataaaatgataatgagtgtgtgtttcgtttctatcgtccaaagttcgatcgcttcgactgtcacctgaagcagcacttcgtcggtgatcgttcccttctttcgctctttgcccttctcctcctctgctcctctttcgtggtgttctcgccctttccttctgtccaaagtgttgtgcattgactttttcgtttcgtccctttcgctttgctgcgatcgcttcaaaatttgggctaaaaatgcgactacactgtgactgtcctccaattgggcccaatttgcgttcggaagcagtgcacaaatggccaaacattcgagcgcaaaaatggacgacgcaaaagatgagggtttgagaggactgttgttgttattgctgtcgtctccttgggccttctcgacggcgttctccaacagttggggcacccatttggtgaacatttcccgggtggggccctcgtgggaggcgatgtttcgtgcgacccaaaaaaatatgaaaaagaattattattccatctaaaattgtgtgtttttatcactttcatcgccaaaacgtcgcccccttcgttttccaatgcgaatgccatcagcgagtccaatccttggccctccgacccgcacaacagttgggcattccgcttctccagcacaatgttcaccaacagcgatttgaccagcagagagcgcttccgccgctgtccatccgccgtttctttttttgggcgtccgtcgccgtcggaaggggggcgactgtcggagaagagcaaacggaggagctgaagaagaacagccaaaggaagaaacatccgggaaacgaacagtccaaaaaacatacggtgggaatgcaatccgtaaaagcgatcatcgctttggcatcgtccacaatgctgagctgatacatcagggccaaggcaacatcattttctgaaattaagcaatggcgattttaattggcttgtccaatccgcgcatttgcatttgcttctcacccgaaatgtgcggggccaacagagagacgagccccgcggcgaccatacagcggcgagaagacggctcgaaggaacagttgaacaaaagggagaaaagggggcccagaaaatcggagggcgaggaggaggacagtggcaaagggctgccgacgccaccacaacattcggatacggcacttttcagagacggtgccaaaagtgaaaccaaacggtcgatggaaccggcggtgttctaagcaatagaaaaacaacgaaaaatgaattaaatttactgcgatttgctgctgattctctgaaaattggctcagcttccacagaaacttcacggccactgtcagcagttggggcgacgaacggtggtcgaggcatttgaaaagggtcggcaaaaggcccttgcgcaacattttgtgctccgtccgcaaatcgtcggccaaattcaacagtatgttaaggaccactaaacacaatcggcattaatttaaattgacattccattctttgtagcgacgctcaaaaatggaattttgcgtcgattagtccggaattgctcaatttttcccagtttacccgcgatcagttggtcctgctttctcatcgcatattcccatttgagtcgctctttctcctccttttcgtgcgtttgctctcgccataattcccaacggcccaactcaaaatcgaccgtttgtacactgagcagcccaatctgacgaaacggagaaatagtagaaaattgaaacagaaaattcacttttaaatgcgaaagtgtgggatgaaaaggcgcaaattgggacagccgacggaaaagttgggccaaatgaattgccaattcgaagtttttgcgcgagtcctttaaatggtttggtgaatttcggtgacggggagaggaaaaaggacaacaaaaaggcaaaaaggacaacgagccaattgtgccatcacctcgcgccaaattcgagtcagtgctcccatcagctgctcattctccacaatttgtgccaattgcgatgcctcgacatggcgtaccaattccgcaagcattgccaccccgcgctgcttgggctccccctcctcgtaaagcaattccatgtaactctgaacacagcaaaattggaagcgaaagcggacgtatgggcctagcctatcgactacctccaaatcgtccatttttgcatgaatttccatgctggccagggaatcggaatctaccaaaaaagcaattattaagttttgtcacagggcataactttcgttagggttgtgccgtttttgcaggtaaaagacgagccgttccaattccgaaattcggtcggaagggaccaacggttggcattggtccaaaacgagtcgcgcgaccgcagccgtgtcactgcgctcgttgagaccattcagttggacgcttaaccaaccaaatgtttaccaggtaatagtagggtttgccccccccccataacaaaaaaaataatttttttgtttgaaattcatcaaaaggaattgcgctggggttttaggggtcgctgatcacgaatagaca

SEQ ID NO: 4252 - DNA, 4166 bp, Heterodera glycines
  unsure (1)..(4166): unsure at all n locations
tccttgagagaacggtaccaaaaattaggccggacaaataantcggtggccaaaaattggagaacttgtccttgttcatcatccaactgaaccccgttcactatggaaaacggccattattttaagaataatcagaaatgagtctaacattcgcgacacggccgaaattaaactcccttccggccacatttcaatacggtccattaatcacttgtacccgctggaaacagcggaggaagcaatgtaccgtatccaccaccgtaattgggccacccaacctccgcttccggcaaaaattacctctgatcgcaatacacttccgaacgctgactttcccagaacattacagcaaaccaatcagcaaaaaccgcaaacagaaattccatccaagattttcccaggcaaggcttgggccccgctccctcctcaaatcaacccccgcccgtgaagggacttccgttacaacaattgtacaaagaccatttcccccccccctcttttttcctttttttttttgttattcattttccttggccaatgttccgtggcgggaaggcggactgatcgcagtgatcagccgatttatgttccacttatcctatttaaacacacaactcccttttttcattaattttttaaaattttactccccacctttttttagcaatgggcaacattttttctcttgaaattttttcgtttaatatcgtccttccttggtggagcccctctcccgaccccaccaacaattgtggcttcttcatttcccttctgattgccattctcatcctcattttcctcctctgcatttgttttttgttttgccgtcggatcaaaacttctgctgcacgttcctctgctggtcggcacccaaatcgtacccggacccaaatcaccaccgtgacaattttggtcatgctcttggtcagcctattccaccacgcttcattggcctcatattttgaggagcagcctgagctttccgccctttttctcactgttttcggctgcttttcccttctcattcttctcattttccttaagcttttttaccttttttgtcccaattgtttccctcgttgtcctcttaacgcctccaccccccacactgatcatgtctcacctatcacctctattgaattagccgaaattcgaaatgccattagcgaattgacccagcaaatcgacccccctcgccaaacttcccattaatgttatacgcaaatttttaatttttctctaattcagaatgagccatatccctaagtccaccccaaaaattgcccccttaatttctcaaatcatttcacacttgaaattgacacccgacaattcccaaattggccccaattccattttggaatccattaatgaccatgacagcgtttccttggcgtccgacacaaacaacaccgaaccctgtcccccgtctcctaaggatgttgaattggcaccggcaccccaggaagaagcacaaacggccgagcctttgactgtcagttcggataaacctgctcagatcccatccaacgacactcctgagttgccccagccgattaaggtcatgatcggaaacaggggaaaagggggtgggccggtcaaaaccatttacattcgcaatgacgacatttggcgttcttcggcccccgggtcccatccccctattttccaacagccgcgccgtctgacgaaacgctccttttactcacgcacattccacgtacctcacacaccacacaaacgaaaacgctatggagtcagcccgatcaagcactatcagaatggtcctcgggtggtacgcaaattcaaccccgaacgtgtgactttcgtggaaaaagaaggaatgaagcggtccaccgcagtgccgattccgttaaatcagatcaagtttccaaatggccctccctgttccccaattttccccaaatcacctttcgcacatgtgccattttttatggcggcgggagtgtcgcgttttacgaaataattaagccttctttccacccctccccccccctacactttacaacgcctcctcgcccggtcaatgatgcctttgcttatccaccctctcccccttcccccacataaagcctttaaaagggattgttccctgctcctttttacttattccctttctgttccctattcgtgcaatttccgctttttccattgcgtcccatcgcttttcaccgttgcatttcttagccaatttaaagagtgatcgagaaatagtgatttgttgaattttcgtgtgaacaatttttgagtcctattcaagagtctggaaaggttaaaatcgcattgggcaaatccccgccaatcgcgacacaacggccgggaaaatacccctaattcccactattttccccttcctttttttgtctattttccgtaaatttgttttcccctaatttgtcttttttttattttgtttttcacgttttccaatgtccgctcatttccgagcccaactgaaattggcgtacaatgactccgaagaattcctcaccgatcaagagtcctttcctgttccccagcaaaatggtcaacccgacatactgtatgccaaatcaattcgttcccaactccaatccctggatgatcataattccgatgtcaaatctgtcttaacgcaactcgaagataattccgatcggtggatgaccctcaggactaatatgactggggctgaaaggacccaagacaatccattatacgatgcatttgtgttagataccccttttcccaaagcaatttctgaccttaaaaaataccttcgtaccctacgtaccgaacggcgagccctggaagctgcactccccgtagctaatgtccaaaatgcatctgccccttccttagtccatttacccaaaacatccctcccaaccttttctggcgattgtaccaattatacgagtttttggaacacatttaaggcaggtgttcatgacctgaacattcccaattccctcaaatttacctatctaaagcaatgtctctctggtcctccccttactttaattaattctctcccgatttccgacgactcttatgattctgctgtttcccttttgtctcaacattatgaaaatcccgaggaggtagcccgagccctccacaattccttgcgcaaacttccccgaattcgacccggtgattatttttgtgaagacctccgggctctccttgaccagttggagtgtatctgtattcaaatgtcccaacaaaatcattcatatgatactgttgctgtccaaatggaggtcgaggaacgactccctcgttttgttctcgatgaaatatttatgtcaaaagaaaatgacgataattggtcatccgacaaattgaaatcacgactttgggccatactcaaacgtaaggaacagattcagaaccttctcccaaaggtgtcctcttcccctaggcctaaatttccaatgtcacctcattcaaaaatgccccctcaattccagccaagtgatccacccttgcccgcactcactttccattcaaaaaagcatacacaatccaacccaaatgcatccggcaaattccatcctaagccaaaattgccatgccttttttgcgaggatcccaaccatttctccaccctttgtaccatttacaatgacccaaagtcccgattggatcgtttaaaagtccttaaacgctgttttaaatgcctgaaatccggccatttctctcgccaatgcccttcccccgcaacctgttcaaattgtaaaggcccccatccccgagctttgtgccaaattccaggtgcattcaatcgttctacgaattatgcccattttcaaacaacttcatccgctcttccgagcccgacccaacctaatccttctcaattttattccccaccaattaacccatctgaatttccgtctgaattacttagtccacgggaagacgccgatgacgcctttcccaagtcccaaaccaataccgcaatttcggtgttccatcgtaagtctcccctcccaatcctactcaagtgtgtcagagttacccttttccacccccaaaaccgaaaaatgacccgtcaaggcatcggattattggatgatgccagcacccattcatatattgatttgcacgaagctcggacattggatttgagtctaaccccaacctcagttaaattgggt

SEQ ID NO: 4253 - DNA, 2247 bp, Heterodera glycines
  unsure (1)..(2247): unsure at all n locations
tttgtaatgatttttgggtactttcgggcaattctgtctcggcatttatggggatgatcaaatgtgaaagagggttttggttgggattaagagggcgcaggaaatcgattggccttaggggttaggatccatgggattcgcggaatgaaaagtgatgggacgtgagttgacaatcatttcaatttccgagagggaggtcattaactgagctaagggaactgctcgaggacgaaatgaggtaaatgcccttcgtagatgatgtttgaccagtgagatcaaacgctcataatgcccaccacgccacggtgcgtgtggaacacgaaaattccattgagttggaaattggacagtcaaaaattttgagaggggacaaaagttggggcaattttggtcttcagttaatgaacggacgttctctcataatttcagcaagtgccgttaatacccttactcaacccacttcctacttgcccttctccccgaatttactttcaaatgtcgaattggtcaatgaaatccattctgcttgccccattgtccttctgggggctgacttttattatgaatttgaacccactcctgtccaacgtctcccctccgggtaccatctcattgacacattgttgggccccattgtggcagggggaccccgccgtaaccacccaactctcccagtacaaatcattaatttctcatcccaaaatacggataccgaatcaatggccccaccctcagactttttcactctggaagggataggaattagagacgacctacaacccatttccgttgatgaaattgttcttaaacaattcgatcaatcgatcgaatttgtcaaaaatcgctaccaagttaagttgccctttcgttccgaccccaaaacccttcccctcccttgaaattttggactttgttttggccgattgcgttctgtttttaacacactttcagctaaacccgacctcctccaaaagtacgactctattatacaggaacagaaaaaaatgggtattgttgaaattgtcaaaaatcccttcgaattttcgcctccattacattatttggcacatcacccggttatttcaccccttaaaagcaaagtgcgtattgtctacgacggttccgcacacgtcggaaaagaactatccctaaatgagtgtctttttcccggtcccataatcctgcctgatcttatcggtctcttattacgttttcggattcccccaattgtcattacaactgacattgaaaaagccttcctccaagtcaatgtgcacccggcacatcgtgattgtacccgcttcctgtggctgaaaaatacctctcttcccccatcaaaagcaaatactcaaatcctccgatttacccgtgtttcttttgggctcacatgctccccctttttgcttgcggccacaattctccaccatttatcagcttttccctccaatttgtccacggaaatttcccaaaatatttatgttgacaatatccttatttctgcctcaaattctaccgagggacagaagaaatcaacctccgccatttccttatttcaaaaggccggaatgccattacgtgaattcgccagcaattgtcaggaagccatttcccatcttccaaggcaattaaaactccccggaaccgaacaaaagtttcttggacttaaatggaacactgaaaaggattttttaattgtggaactttcggtccctccgcctgattttgtcccaaccaaacgctctgtcctttcctttattgcatcacattttgaccctcttggcctaatttcccctcttatcctccccttaaaattatttttacagtccctttttgaacttaaactcaattgggatgaacgatttcccacagaaataatcacaaattggcaaaaatcaattgaatcctggaaaaggacggacaaggtaaccatcccacgttcccccatttcgtctcctttatctgctcgtgaataccaattacattgctttacggacgcaagcaccttggcaatgtgcgcagccgttttcctccgagtttcacaccccaaattttcccaggcggaaacctttttaattttctcaaaaacaaaagttaaaccaattcacaaaggcgtcccattaaccatccccaaactcgaactaattgctgtagaaatgggaactcgtgctctgaaatttacccaagcccaatttccctctctaaatttagacccanaatttaaatctttggacagattctgcaatcgtc

SEQ ID NO: 4254 - DNA, 2924 bp, Heterodera glycines
  unsure (1)..(2924): unsure at all n locations
cccccaattgtcattacaactgacattgaaaaagccttccttaagtcaatgtgcacccggcacatcgtgattgtacccgcttcctgtggctgaaaaatacctctcttcccccatcaaaagcaaatactcaaatcctccgatttacccgtgtttcttttgggctcacatgctccccctttttgcttgcggccacaattctccaccatttatcagcttttccctccaatttgtccacggaaatttcccaaaatatttatgttgacaatatccttatttctgcctcaaattctaccgagggacagaagaaatcaacctccgccatttccttatttcaaaaggccggaatgccattacgtgaattcgccagcaattatcaggaagccatttcccatcttccaaggcaattaaaactccccggaaccgaacaaaagtttcttggacttaaatggaacactgaaaaggattttttaattgtggaactttcggtccctccgcctgattttgtcccaaccaaacgctctgtcctttcctttattgcatcacattttgacccttggcctaaccaattcacaaaggctcccattaaccatccccaaactcgaactaattgctgtagaaatgggaactcgtgctctgaaatttacccaagcccaatttccctctctaaatttagacccaaatttaaatctttggacagattctgcaatcgtcctttcatggcttaattgtcacaaattgcccacggaaatttttgtacaaaaccgacttaagncattaaatccgttgatcatttaactgtccgacatttgcctggcccggaaaaccccgcagacattggtactcgaggaatttcttccgcacctaccctttccgctctctctgcctggtggtcaggccctcaatggctttctctcccggccaaccattggccaaataacccacaaataaaagagtattcatacggaaaatcagaacctataaacgccccttttcaagcaaaccctccccctttgttcacgttttttaccgaacagacacccgaattaacacatttaattgatttggcacgtttttctaggctaccaaaagccctcagggtgttaagttatgtgtttcgtttctcaaatggcacccgaaaaaattcccaatgtaaagcaccgaatccgatttcctttaatgagcaaagaaaggctctacaggaattaattttacgagagcaaaccctaaatccaccctctgatcaggtcacgaaaattttgggcctttactcagacccacagaaaattattcgcgcaaaaggtcgtctcggaaaaagccagctcccaccgtcggcaaaaaaacccaattttcctccctcccaaatcgccattaaccaatttaattgtttacgaaatacacttaaataatgtccatttcgagcccattgttgaccctttcgcgattgcgcagaatttattggattccaaagggacgacaaattgtaaaatcgatcatttcgagatactgtctaacctgtcgacgttttaacacccgaccatttgaccttcccccctttcccccccttccggaagacagggtaaaaccttcgccccccttttcgaaagttggcttagactttactggtcccatttatgttgtcacaaacccccacgtaccaaaaaagcgtaaaatgtcgaaaaaacattggatagtcatttgggtttgccttccgacgcgtgccatttctcttgatttagtcgaagaccagtcggcgcccgtctttaccctcgcttttcgccgtttttcctcaaaatacggcatcccttcgacgatttactgtgataatgcacctacttttgtcgctctttcaaaatttttggcggtccaatttccaaccctatggaattttcgtgttccacacgcaccgtggcgtggcgggcattatgagcgtttgatctcactggtcaaacatcatctacgaagggcatttacctcatttcgtcctcgagcagttcccttagctcagttaatgacctccctctcggaaattgaaatgattgtcaactcacgtcccatcacttttcattccgcgaatcccatggatcctaaccccctaaggccaatcgatttcctgcgccctcttaatcccaaccaaaaccctctttcacatttgatcatccccataaatgccgagacagaattgcccgaaagtacccaaaaatcattacaaaatctatgggaaactgcttcccaacagacagaacgtttttggcaacaatggttcactgattatttaccgtccttgagagaacggtaccaaaaattaggcccgacaaataatcgatggccaaaaattggagaacttgtccttgttcatcatccaactgaaccccgttcactatggaaaacggccattattttaagaataatcagaaatgagtctaacattcccgacacggccgaaattaaactcccttccggccacatttcaatacggtccattaatcacttgtacccgctggaaacagcggaggaaacaatgtaccgtatcccccaccgtaattgggccacccaacctccgcttccggcaaaaattacctctgatcgcaatacacttccgaacgctgactttcccagaacattacagcaaaccaatcagcaaaaaccgcaaacagaaattccatccaagattttcccaggcaaggcctgggccccgctccctcctcaaatcaacccccgcccgtgaagggacttccgttacaacaattgtacaaagaccatttccccccctcttttttcctttttttttgttattcattttccttggccaatgttccgtcgcggggaaggcggactgatcgcagtgatcagccgatttatgttccacttatcctatttaaacacacaactccctnnttttttcattaanttttttttaaatttta

SEQ ID NO: 4255 - DNA, 4423 bp, Heterodera glycines
tcagtttttatgtccacccctcagattggtcacttcattctcccgttgattttctgggggggggcgaccctctccgccctcagatagcttttcctgtgcttcgccgccacttaccatggccaaattctgcgctttcattttggcctcctccgccacttccgccgcttcttttgcattttgactcgcgtctccgaccgcatcttcggcttcctttgtcgtcgcctgcgcctcttcgatttccttttcgatatccgccaaattggtcatttcctcggtagcttctgcgcggctttgttcgattttactatgaaagtctgcaaataaatttttatttgtttgccttttgcaacaattaaaccggaaagcgcgtcgtgcgaatccttcgcatcgttccacgtcttcgtggccaattcgaaagccgtttgggtgcgcgcattaaaagactcggcttcgtcaaaggaattgtccacactctttgggaagagaaggcaataaaaagcattatgcttttcccaccatttgcttctgttgcgcatttcgcaactgttcgcacgcttcctccactaatttatccactttttctaccaattccgcttgcttttccgcctccgaccgtgttttagacagcgcttccaaaccctcttcctgtgcccttttgactttctccatcaactcatcagaaaaaacgttcggcagacggatactgtccactccgctcagaatgaaggcggccccgtcgtgtgtttggtttgtctcgagggactgttccgtcgccatttgttggatggctttcagtcgctgttccaactcgtggacctcggtcaacaaagcagaaatttgcagactggtgcttgaagctgcaataattcgtaagtgattttgaacaatgagctccgatgagtcgctcacctccaaaaattgcttcgttggcgtcgctgagcgattgccgcgactccttccgaatttgctcagccaacgaaaggatctcccggcgacgctgctcctgcgtatcagacaactgcttggattcgccagcgatctccgacaattgctgactcttttccccgtaacggtcgaacgcctcctgcgcttttgccaagtgctgttctccttgtgtttgcacataattcactccaacagacagctctttatgggtggtttctgtaaatgatacggtagggaattgacgcgagaagagaaacaatacgggaggggaaaggtagtgtatccccccgcccccgtgaatacgtcgctggttgtttatttattacccttgtccgtgctaaactgtcccaattgctgttcaatcaccgcagcattcgtgtcgatttgctggagtctgtcgcgaagtcccagcaccaaagtgtccgcttctgcaagttgcgccctcatggaaattgcctggtcgcgaatgtgcgagtcgtccccttctgctggtcgatgtgtaattactctctcattagggacgtagaacttacccatttttttcagtgctctttcatgcagtgactcgacctccactcgcactttttgcacatgcgcgtcaaattcgcgatcgtccactttgatctaaacaaccaaatgaaggttttttcactcacaatcaccgggttattgatgatctcgtccaggttttcgcgcaattcactcatagttccgttgagctcatttttgcgcgattggatcagtgcgtaacagtcgtcacatgcgggacaaccaccgcgcaaattgaaacgattttcggaacattggtcacagcgacggccttccacgttctgtcggcacaaacactgcccactggaaacgtcgcattccaaagtctcagagctaaacaccaaagggtaaaccgataggtttggaatattcctagtcagtctcacccggtcggatcgcagccacattccaagcacccttccgggccgaagccgaaatgccgcgttgcgcactgatcacagcgtctgccggtcaccccctttttgcattggcattggccggtaatcaaatcgcacacgcccccatccaaactgcccaaagggtcacaaccacactgatggcacccatttccggaggaaatattaaagaagccgggggcacattgatcacaacgaaggccaatcacttaacggaccgagtattcagaacattctgccagcgaccccccccccccctccttttttgaccgaccgtttggttggcacgaacactgcccatccgtctgacgacattctcaaagagaagcgttaaaaagccacgaaaatcttaatctgggacagtcgaagaatttcaaccttaccaagcgcctcaaagtcctgacccggcctcaaagtgccttgggtatagcagttacacgacctgcagtctcctgcaacatctcaaaatgaccattataaaacctgtcatcgccacctttcacttccgatagcgcgtccccccaaaatccggccatgcatttgtcacatcgccaccccgtcgtgtgatatatgcaccgtttgcactctccactgatcgtgtcgcactttccaatcgcatttgggtcggtattgctgttgcagtcgcatttctgacagggaatgccctcggccggattcccgaatgactcttccgcacaaatgtcgcatctgtccaaacagaccgccgggttaatccgagccgaatccatctctcccgtctcccggacactcactttcgtcctgcgtatccctctggacattccgtgcataacgtatccccatcgcccatcaaaatacacgggccgttctcaggacagtcgcatctgttaaattctgtgtcaaaactcatccacaaaaatgtagtcgagataaaacatccattgcattttaacaacacactttttgcagtcatcagctgtccccgtcagcgcatcgccataaaaccctcgcgcacatcgttcgcatgtttcgccggcggtgttgtgttggcaaatgcacgagccttaaaaagggagtcccattgaatcaattgagaaaaggtggaaaatgacctgattcggaatcgcagctgtcggaatggccgtgacattcgcagggaatgcatttggctagcggaccgccaaaatgaagcgtgcgcttatagccgggggcacacgattcgcaaaattggccgacgaatgcgtcggggcatttgcactgctcaacccaattggcaggctcggccaagtcgacgttgggcacagaagcagccgaattgacggtgaaattatacaggtaaccgacatctgttcaaaaatggaaagaaagcacataatccattctccgctgctggaaactaaccgcctttggagaaagtgccacgaattttaaaggcgctcacattggagaggacggcgatgaaatctaccaaaatggcattagaagattggcaaggacaaaggctgacccgtctcgcggagagatggactccactgaagcgaaggatggaaatgcacgcggaaacgaaagcgttgctcgcgaacggcaggcaacggattgccctgggcgaagattggcaacaccaactcttgtccattggcaccgacaatgacaatgtccctttagcatttgtaaagcaaaatgaatgcaacatttttttactttttgcttgggccggggtttggaagctgaacgcggagatgaaagtcaatgaaattgttataaatgtgtcgctgatctcccaaaaattgtgacggggcaaaaaaatacaccttaagattggcaattttacacattaagcatttttatttacaggataatcgtctaattgagaaacagcggccgcgcgatcgactgaaaaaaggaaaaacagcaattagagaaagaagcatcgttaaattccatgcccctccacttttctttccctcccccctttttccctctccgcgtttccgcctcttctctgaccttgggcccattggacgtcctccaattgtcgttctgatccgcccgaccagtcttcagtgcctaaaaacgtgcaagttatcgcccataaagtcgtctattaaaacagactatcaaaaaactgtgaagacacattcacagcaaaatatccttcggccgccgaacaaacggacgaatggccgaaacagaaacacggagaacagccgaaagggttggaggaggacaacaggaagaagctgggcttgcacttatcacagcgctgaccctcaacattctaaaaacgaaaaaaggccatgagaaaacagaaaagaagaacaaatggaacaacctctttgcaaacacacgatccggaggaggaggaacaagtcggggtgttgttgaaggagccatttgcatcacaacgacaatctctgagggcagtggggaaaaactaagaaaaatgtcagtgaaacaggtttgagcaactgtgagtagaaagcatgcctttcactgctccctacccccaaatggcgggagcaggtcgtttcccc

SEQ ID NO: 4256 - DNA, 2538 bp, Heterodera glycines
  unsure (1)..(2538): unsure at all n locations
agcacagaagtgggtgcagaatgaaancggaaaaacaaatgaatcaaatttgccgtcagaattctcaacccaaaccgacggaggcattcgttggcttccatggaggtggcgggtcgccacggtctatccacgaagaagggggcgcactgctgacagtccacgccggcggtgttgtgctgacagtcgcacaccaattgttccttgatggcacacgcattgtctttcccttctttgtcctaccatcccatccctaaacctctccccgtcctgtggacttcacgcattggttggcgtgaccattgcatttgcatcgtccgccaaccgcaaagtcggaaattccgtaataatacgagcgaagcacacgactgtctccgaatatttcgtcaccaaatgtgttcattcgaaccaatgaaatgcgtatttgttctgcagccacccattcctaagggatggtaaatacgtgaattattttttgatagggctcgaccctgacatttatgacccagactccgacaaggccgttgtcaaaaatatttcggagggaatccgaagacgtttttcaaaactaagtaaggtaaaatgggggtccggcggtgccgggaaaaatttgaagattttaatatataagaaaattgtgcaaaaaaaatttgagtgtcggggtcgaagttgagaacgtttggacaggaaataaccaacccaaaaaggacaataaaaatcaaaggcattgcctggagcacttcgctctcctcaaaattctcagcagaagggcgtccgtcgagcgtggagaaggcaatatcgcctccagtcagtggagaaatgtcagagaactcacgtgtgcattgcgcaaccgcttcatttcccggcagaatcggcgctttgtcttgcaatttgaaagtggaacggcaggacccgctaaagagcaataaacggaacaattgaaatgctaaaacgcaaactggtcaaaaccacctataatattgccagggaatccagtcgtcttcggctctgttctttttgtaaacgacgaaactctcaggacgaggactggcaaatttcaaccgaatatacgtaatatcgtaacgtttgtgcatgtgcaatgtgagattgactgtctgtggatattgaataccttcctaaaattaaacttcatgcccatatcacccctaaaacagaccgccattgtttcagattgccacctgaagaaaaggtgcattagcgtataataagcgagtttcaattaccatgtttcattgtctttgatgttgaaatcggtcaggtacgaagccgggtgagcaaaagccttaaaagttgtaaggtatgcgccaaattagaaaactgaccggcacgcgcgcatcgcatacatcacacactttcgacgtttggccctttccgatgtgtccagtctgtacacaaaaacgagttggctggcggactccgcaagtattggtaacctaaagaaaatactggcaaatcaagcacaatcgaagtcgacaattttaaaagtggcgaagtccaacctcgacttccaaattgaaggcaacgttaataaagtcaggcacacaccgctggggctgagtacgttcatcgtagcaggaactctgactaggcttataatggtgaggatcaacactgggagttttttcggcaggttgggccgcaaattctgaaggatagtcgaagaaaaacgatgcaaaaaggaggaggatcaagaaatgttgccggaatgggcacctcctgctgtgcgcagtgaacatttcactgtgttaagcagtcaaatttacactcaagccttagcgaaaaggcaaaaaagccaattatataaaatcagtttaaggttaaactttaaagagataaagtaggtttatttatttgaattcaataatagcgctttctggcaaaatattttggctcttttcgatgctcggcttttcacatcaaaagaacgtaaattaaaatggaagaacttttcacattgcatttttacaatgatttggaagaagcgccaatttagatttgattcacgccatttttattaaagtaagaaaagggggttggacaattataaaagtggaagtggaagaatataaaacaggtggtgaagctcttcttcacattttccacatcctcgcataaaagcaaagaaccaatcgcaaaaataaagccgaagaaaaggcattagtttggtagaaataaagggagaaaagcattttggatgatatatattttaactatggaatgaattgaaatgttgtaaaggaaacaaatgtgtaattaatagggctgcaaaaaatatgtacaaaaagtgatccaaatatgtacataaatatgtaagaaaaattccaaaatatgtacaaaaaaaccccaaatatgtaaattttaatggtattttttggcaaagaaattccccgtaaagtatgaaatagccacaaaatgacataaaaattactttttttggtatttttaggcaacattttcaaacttattttttctttataaattttcaaaatatgtaaaataaatgaaaatatgtacaaatat

SEQ ID NO: 4257 - DNA, 2454 bp, Heterodera glycines
taatcaaacacaacatcctcaaattcgtaccaatgcttcttaggcctataacaaaaaatgttttaatgtcaattttttgaatatatttttttaaattttgcctgtattcgcgtaacagccgtttgttacgtaagcctagcactttgccaccttcgccaggaaatgcagttattcctgaaacgtaatttatatatcaaaatagcaaatcctgtatacacaatattcgaatgattaaattcggattttgaattaaatgaatgagaacacaagtgctgcaactcgcctccatgtggtgctgttttgtcgttgggatgaaaacggcgttggtgttctaaaaagttcgaattaggtggctgaatttcgatgtaaaaaaaagaaaatttcaaaattaatccagggcgttttatttcccggtaaaagtcgggaacattggtcccacaaaaaaagtaacaaaaatgctcgttttgagcgattgtgccatgcactcaagggttttcggggtagctgatcacgaatctgacattcatttgcaccaatttcgaaccccgaacccgaattcgaacaagtactgccaatggtcaccccgtttttgggagaaaagttttgttcgaaaaagtcatgaaacatgttttgggggttttatgggtcgctgatcactaatctgacattcattttggaaaatttctatcccggaaccgaactcgaataaaaagtctaaagttgaaatttcaaatttcagttttatgttcgtatctgtacagaatgatcatgttttggttttgcaatggtttctgactaaatttagattgtttctggattagtcagctggggcaactcagctgacagacaaatcagctgatggacaacccagccgtacaataaaaaattatacaataaagcctaggcctaggcccaagcaagcctaagcctaggtctagcctaaagcttagtcctaagcctaagacttaggcctaacctagccattgtacgagttgctcttgtacggttgtctgtgtataagttatcatgactagggctcggatttttaagcgcgaaaaagtccaaaataagtgtttaaataagggcgaaaaaagcgcgaaataagtgcgaaaataagcatgaaaaaattccaaatgtagaggtgaaatttgttaaaattgctgttttctctatgtaaattagttaaaattaagtcaaacaattttatttactaattgcagttagaaatgaagtacatttagaaattttcaggatttaagggtcgattctcaggggcgtatttttccgaaattttttttgtcgattcttaggggtgtatttttcgtttttattacatttttttaataaatttcccaaaaatcgcgagaacgaaaataagcataaaacgctaaaataagtacaaaaacttatttaaagggcgaacctctaaaacatgcatttttaagcacgaaacacaaaataagcatttctaagctcgaataagtgcgttaaaacgcaaaattttcgaacaaaaaatgtgtttttcgtgcatttctcgtcgagttaaaggcgcagaaaaaataagcaaaaacttataaatcccagccctaggcatgacacacgaaagacatgttaaattaaaaaatttaatggtttttcttaactaaaattcattttttgtaaattgtcgtaaagctgagttgtcccttcagccgaattgtcccatcagctgagttttcctcagctgactctagtccttgcgcgtacctattttttctatcgatatgtaaaatttgaagcggatttaacatcaagaaaaaaggttaaaaatatgaagtgaattcggttttctctattaacggagataaaaaaaatagtacgccaaaatggagatgttttgtgctttgcattctctgtttattggtcacctctcattttcttccttgatttgaagcttccagctggataggttctttatcaatattttccaactttcgtgaatacagtatgtccatattgtaacacaaatttatacccgatcattttaaaacgaaaagcacgttttaaaaagattgtttcactcagttggcaaaaaagggcgttgcttttctcgccgttcgtttgtttttctttttccttccttttgcttatccttcccccgcttcgttcgctttgccttcgcttccctttgcccttttttctcccattgctcctcttcgttcacattcatccacattaatcggtgtttgtgaacgggagtggaaatgggggtggggtcatcagcgaaagacgccatccccccactgtttggtatggcgttgtgctcctctgctgctgtgggggcggggtgccccctcctcctcccctctcccgcctccctctctgcctgggcgtaccatccgcggcggtaccatcccccccccccctccgatgacccttatgttatgtctgccgagtcctccccctcctcttccc

SEQ ID NO: 4258 - DNA, 1053 bp, Heterodera glycines
aaagaagtaaattaatattttataattatatattaaattacattaaataaaatgcaaaatttattttttgaaacaaattgatgagttctgcggcacgtgttttcactttttgttccaccaggagatcctattttggtctttttaacatttcttcatattcatttatgtatctattataaatattaaatttagattctatattgtatttttgttattatttatatttattaaacattctaacataactttgtgtatttattctattgctctattctgctcgaagcgcaattgtatttcggaaaaaatttcaccacatctattttatgccatggcttcatctttttttaatatttcaattttctttaataaaaaaattcttattgaaatatttatattttatttataaataatgcatgattttttgtttcaacatcactcaaaactaaaatttctaaccaacttaattatgtattattttaaaaataagttatttatgtccattttaacaatttcaataaaaatttaattttcgtcatttatattatatctttttatcatcatcattatttaatacattggtgtaatataaattatatacaaccacgtaattttataagtttatttaattcaaataatttgttgatttttaaaattatttataacagattatattgaaataaaactgtactcatactaataatttaatggctcaaatttgcatcgccatattataaattacacctttatatatttaagaactcatttattttgtttatttacatttaatttacccattttaaagtgcttggccaagcacaaatttttaactaaactttattaaatattatataaataaatatgaattttcatttaatacttaattcttcgatttcatcaattatttatatttaacttcaaaatgtttaatagtttacaaaatataaatttatctactttcctaaatgtttttgtaaataatcgagtacattggaagatctaacttaatttattcgaccatggttttttatgttttcattaactaaaataattttt

SEQ ID NO: 4259 - DNA, 3535 bp, Heterodera glycines
  unsure (1)..(3535): unsure at all n locations
acagtttgtgtgaggaattgtacgtctgtcaatttctgacactttttgaaggaatagttcggcatggcattcttattccattaagcaactgtaagttattggcgtcaaaatcagtgtccggcttgccggtcgagctattcacagaagtggtgaattgcatgaagggtggtcagaaggattgagatttagtctgcttgatagtggcattattcttggtttttgtttgttatatcttttggcacttgttctggagtttcgtatttatatttatattttatttattttaattgaaagtacggtggtggactttttcacatgttatatctgaaaaaaatggaaatattttaagatttatgaacagacaaattaataatatttatgacttgacgattatattataaaagtccaaaagagatcagtatcgggtcattattgttaattgtgatgatcagagattgtctagcagtcagatcatatatcatatagttgaacaataacggaatgaaacaattatatgcccccccccccctccttacgcatttgcaatacattaataaatagtaaaggaatgaatgcctggattttaaaattgattatagtttttcgttaaattcataaatacaaagtgccagaatgatagaagaatcgataagcttttacaaggatgtaaaaacattgaaagaaagcttaagaaatcataaaaattatgaaaatttcttttagaatatagtaatgcttataaattagatatcaaaaagttaaaaggcaaaatttaattcaagattcaaatgaacaaataaagaaaaaaatgcattaaaatttattccttcctattctcgtaaacaaacatgatccccaatgaacgagttttataacataatgctattaacatttccataaatttttttcttaaataataatataatctctgtcttatttcgtcgtccatagcaaaaacaaaaatttacatcaaaattattattaaattacaataaagccaaataaaatatgtattaattattgagtgatggccactgttttcacatctatagaaaatagaaatttaaatagattatcacaaaaaaatcatatccgcaattaaggaataccgtatttcctcgattatacgcccccccccctcgaatggaagccccccctcgaatataagcctcccttggaggggggttgaaaaatagaagccccccctcgagtagaagcccccttcgaatataagccccactcaaaaaaattttttttcaaaacttttgaagtcagaaacgtgcaaaaactattgaacaatttgttttaataaaacattaacaaaacaaatattaggaaacttctgcatcaatttcttcgtcgctttttatggataattttataatatttatttgttattttaaatacttttaaaacacaaaaattttctgaaaaaaatagtatttttttaaaattcataaaatattttagaaagactgtacaaacgggacccacgcgtttcggcactcgcgtttcggcgccagctctttttccacgatagcttttttctttgacatccaaatacaacattgttggtatcactcgaaagctcttaacatgctctattagccttaccaaaagcgaaaagattttcaagcctggaaaaaattttattttattacaaaaaaacttcaaaaatttcgacttttcgcaattttcatgtataacttttttggaaattgtctaatagcgaagcaatagcttagaaaaaatttctgttaataaattgcactggaaaagattttgatgaaaatcactaaaaaattttcaagcaaatatagaaatattatacccaatatattttttgttttgttaaaaatgggtttttgggccatgggttcaaatccacatgcctgcaacattttaaaaaaattacttttggggtttcgagttcggatcaaggctttggaattgggcaaaatggatgccaagttcttgattagtggtcccaaaaaccctaaaaaacatttttacatgcaagtggatctgaacccatggcccaaaaaatcgctttgcttccatctatgatcccgaattccaaaatcagtttatttttgtactttttttcaaaagtcttataaaaatatagaataaacagaagcttatagaggaagaatttcgtgttgttcaaaaaaccttttcagaacagcgctattaatttttttttctcaaaaaacgaatttttccaaaatttatgtaataacttcttcattttgaagatagaaaattctaaaaaagtataaaatgctccagatttttctctatttttaatgcttttttgcactttaattgattcatttagaagtgaattatgaattttcaaacattcgcctaaatttccaagggccaaaaaatgaaaaatcttttcaattcaaaaatttagattaagatttaaattgtaccattatgcagaaagcaaaaaattttaagaatttatatagggaaaggggttgaacaataaaagcccccccccctcgattggaagccccccctcgaatataagccccctttggaggggggttgaacaatagaagccccggggcttataatcgaggaaatacggtagacagatttgatgaaaattaaacatttagggaagacgattttttattcaaacattaatacatttacaaactgcttcatgcaaatccttaacaaaaataatttccaaagaatccaacccaaatgtaagattatcaacatcgtctcggtttccttcaggcaaaatcaactatttcatatttcccaaaatggcagcgatcactttctgggggatgccggtgacgaatccaacagcaccacaatcagaaatccgaccagtcacagccacaaatttttttacaggcttttgaagagcgagagacataaaagcgatggccgacccaagtccgccgcacggtccgcctttgttggccggtcccttcaaataaaacaagaagtaatttatttcaagtcctaattataaatgagcagaaataggtactagggtgacattttttagacaaataaaactcaggaagtttgaaaatcctgctctttctgttcggtttgtgttgtctgaatattttaaattcggaggaatagcataatatagggctttctatctgtaaaattcaaaatggtttcacacattcaaaactttttacataaattcaaacattttttaaaatatgaacaggaaaaataagcattctgaaacttggtaatttttatttccataaaatgcattgagattcagaaccatgtgaatttgaacaatttttcaaaattttttattttttcattattacagttcaaaataagactaaaaagatgcaataatcgttattatttcatagaatctaataaattcaagcccccctcctttcccagcaagaaccgaccacagatttgatgtccatattaagaaatntagatagntnattttttttggggggataatttttttgaaggtaaagaactgacggggggtggttaagttgaaatgatgatttgg

SEQ ID NO: 4260 - DNA, 3215 bp, Heterodera glycines
ggttggttaagcaatttgggcagccataaaaaaaatttcttcgcctcccccggtgtccgaatcgctgccagttgttttcgataagccaacacaagctccgtaatttgtccgactgtagaggtcagctgctgcggtttcgctttccaattgggcgatctaaatcccgcctttgttatagccttattccatttcttctttaagacattagactaataattgcattctaacaatggtatcatgaattgagcaaaatttcttccatttccccctccccgtccgaaattaaaaatcaaaattttttaaaaatcaatttttaaaatttgaataaaatttaaaaaattcaagcgctttttccaaaataataactactaaaatcttcaaaaaattactcaaaaaattaattgacacaaattcacaaacataaaatttactcataaatttctatgttttttatcaggttgcgaaggggtgccgtggctttgtcggtgccagactgcacaagttgaagttgtgcactcttgcggcagtggaaagatttggcaaaagcactgatttggtcaacctgagtacgggcagcatggacgttggaaaattggcagagctaacggtcacagcggaagactttgaggtaaccttgatatgattatcctcaataaattttggtggaatgagccccttgaaatgaatagagccatttttcaaaaattgtatggtttctccatagcagcattgatcagtggcttggtcccgtaatttcgactttgtgggtcagcgttcctcgcctttaccagtggattaattttttttcttcagttccaaaccaattttaattcatttttcaaaaaatttcggcgcaaaggaatttttcggcggtgccgacagccaccacctgtggctttttcggtgaggaaaaccttggagaagtgctcttcattccccctctccgccctttcctcaccccttccggtcaatttccccctgtcgtttctcccctatttttttattaaatcgaaaagaaattattaagaaaaatttttataaacgttttcataaaaaatttcaagaaaaaattttttggaaaatttatgaatttaaaaaaattcctgaggtgaatgaagtgcacagcggcgtgggtagtggaatgaagtgactacttcaagactttcttcatccaaattttatgaaaatgccatagaagttggttgtcagcaacgtcgagtcattcctttccctgaactttttttttgaaaaacgcaaaaatttttttttaggctgaaaaaggtggaaacgacctgctctggtcttggaggagacaaaaaaagtgaaagctcaacaaaaaaattttccccgaatttagctttaatggaatatgcaacatgtatggaaaaaaggggaggggggtcaaccgatttgcgaaggggtccagccatgcaaattgcttaatttcctttcttgaatgaatttataattttgtaaaaaaaattttgtgcatcggaattgagttaaatggatgtcagattgtggtcaatggtctcaaaaaaaaccccaaaaaataattttaaaaaatttcacaggcaagtggattcgaacccttgacccgaaaacccattttttaccaatcgtgcaactcatttccctgattcccttttgtcgggaatgtgcaattcccgacttttgaggcccttgttaatggaaataattgttctattttaagtcccgcctgtcgtcaatgctagcagcagacaacgaacgaactcacaaggagcatggaccctacgacgaagtaaaatcactttaaaatttgctttctcaattacactatgaaaactccctctccataaatgcaaaatttttcaaaactgaaaaacacaaaaaaattgacgaaattggtgataaaattttgttttttttgagcactttagttcacggacgcagctcgtccccccatcgtatcagtctctcccgattagttttcagaaaaaaaaatttctaagaaaattacaagaaaaagtttagtagttaattttttgaagattttagtagttattattttggaaaaagcgcttgaattttttaaattttattcaaattttaaaaattgattttttaaaaattttgatttttaatttcggacggggagggggaaatggaagaaattttgctcaattcatgataccattgttagaatgcaattattagtctaatgtcttaaagaagaaatggaataaggctataacaaaggcgggatttagatcgcccaattggaaagcgaaaccgcagcagctgacctctacagtcggacaaattacggagcttgtgttggcttatcgaaaacaactggcagcgatttggacaccgggggtggcggcttaatttttttatggctgccaaattgcttaaccaaccaactaagcttcgtgttactgctggaggtggatcgctcgactttcctgccaaatcatcagttcagcttggacacaccgcggcagttctgtaccttcaagaaaattatccgggcaaggaggaggagctgtctggatttcttaatatggacatcaaatctgtggtcggttcttgctgggaaaggaggggggcttgaatttattagattctatgaaataataacgattattgcatctttttagtcttattttgaactgtaataatgaaaaaataaaaaattttgaaaaattgttcaaattcacatggttctgaatctcgatgcattttatggaaataaaaattaccaagtttcagaatgcttatttttcctgttcatattttaaaaaatgtttgaatttatgtaaaaagttttgaatgtgtgaaaccattttgaattttacagatagaaagccctatattatgctattcctccgaatttaaaatattcagacaacacaaaccgaacagaaagagcaggattttcaaacttcctgagttttatttgtctaaaaaatgtcaccctagtacctatttctgctcatttataattaggacttgaaataaattacttcttgttttatttgaagggaccggccaacaaaggcggaccgtgcggcggacttgggtcggccatcgcttttgtgtctctcgctcttcaaaagcctgtaaaaaaatttgtggctgtgactggtcggatttctgattgtggcgctgttgaatacgtcaccggcattccccagaaagtgatcgctgccatttgggaaatatgaaat

SEQ ID NO: 4261 - DNA, 5530 bp, Heterodera glycines
atcagcaactccgaaaaccccaaaaaaagtgtttcttatgacttttgaaaacataaaaaaatttggaaaagggggggggggggacaatctgaactattaccaaaaaaacaaccgccattgctatttttagtatcatatttcgccagagtcatatttttaactttaattggctaatcataatgatgtatttgtatgtacaattgtcactggaacataaaatgaattttgttacatgcatacataggatattggttaaaaacaaatggaagaaaatgcaaaaattaactttgtatagtgccagaaaaaacatatttatgcaccttcataaaatcctaaatgatgaaatcctttaagaatgtgcgcttttatagacgaaaaaatctgacattggaggcaaaagagaaaaaccatttgtcagtgtaaaaatgtgttataaatagcgactgtttccttgttttgcatcattcatttattctcttggccaacaatcaaagcatcgaacacaacaaccaacaactacaacaacaacaatgtcatcagacgacgcggacaaagcggcggcaaaagacggaccggcaccggacactccgagcgatgccaaagtgacggacggcggaccaccaacggcaactgaggacaaaccgaaggaacaaacggaagcgaaagtgcctgatgagccaaccgcgacgaaggaggagccgaaagtgcccgatgagccatcaacgacgaaggaaccaacggcgccagtgacagacggaccgccatcagaggcaaagggagacaaatcggacgagccaaaagtttcggatgagcccgcaaccaaagtgccagatgaaccgcccgcaacggagccaccaaaggattcagcgacgacggaaggatcggatgagccatcaacggacactccaaaggactcggcgacgacggaaggatcggaggacgaagcgcctgcgccggaagaccaaccaaagaaggcggacgagaagaagtcggaggaagcagcgtcagagccaccgaaagcgccggaagaccaaccaaagaaggcggacaagaagaaatcagaggaagccccagcaaaggagccgaagaagaaagcggacaagaaaaagaagtcgaagtcggaagaatcagtggcctccgtcagcgtgcgtcttcagcctcgaaaggtgcccgtcaacagcttcaaggacgtgcgccccaccgtgcagaagagcctcgccgggctcaaatacccgttcatcaagaagctggagaagcaggcggggatggaccgcgagaaggtaaaaacattgtcatcctttcattttttaaacattttctttccattttcagctgttctactctgcactggccgtcctgtccgtctacctgatggtcggccccggcaacactttcctcagcgctttgatcggttggtttggctggggtgggtccaaatgtcacccctttctaatgttcttcattttagtcaaagcctggcccgtctaccaaaccatcctggccgtccacactcagaacagaagtgagtaattgcatttccttttgaaatgaacattctaattttcataattttcagaggatgacacccaatggctcgccttctggtgcgccttcgccgccttctccgtgctcgaccacttcttcgcccccctcgagctgctcttcgggctgtacctgctcttcaagacggctgcgctgctctacctgggtcttccgcaaacgtacggcgcgcacaatctctacgtgaagcacgtgcacccgctggtggaccgtctgggcaagatcaaagtgaaatgaagcgcaggcaacgacaactgatgtgagaagcggccaatcgatcgatcatcccccacccccccccctgtattatatgatatcaatattgtatgtatttgtaaccccggccaatcgttaatgatgcctgatttgttgtcaaatcccgagccctttatgtgacagtgatattgtatgtgctgtgattattgttcgcaatatgattccggaaatgtataagttatattgtattatgcatctgcgagataaacaatttacagtgaataaatttggatctgaggctgaatttcttatttttctcgttataattctttttgaggcaaatatttgctcttttcttgtttttataaattcttgagcctattgggcccataaaagttgaagctaaattggcctttttgacgcctatagactggaaatttagccatttttgaatagctcagaaattttttggaccgcacaaattttgatcacacattttcaaaaatcgtatagcggttgaaggcaaataaatttgggtaattttggaagctcggggaaagggttaaatgtgtgaagaaaattttcgattttgtcattcgtctcgatgaggcaagtcgaatgggagtaaaaatgcactggtaagaattgatttttttggtaaaaataatgatttttcattgaaaaagatttttttatttcaaatttctcctttataaatttttctatatatttttaatttaataaattgattgtcctttaaatttgtgcattaaaaatatttttgtgagtttttaattaaattttcgaattactcccgcccgggactcccgttaaaattggacgggattttaacgggagcgggatttttacgggaataccgttcgtgactcccgtcccggaaaattttgaactcccgatcccgctcccggaaaattttgaactcccgatcccgatcccgctcgtgttaagcattttcctgaaatttgtaacgaattggagaacgacgaatcgctgttctcaaaattgccaacagaaaagaatttttgccaaattaaactataatcggatttatatttttgcataaaatataaatatttcactcattcagttcaataaaaattattcaaattcttcaattcaaaaatctgagggaaaagcgaaagaagcgttttaatcgtgaaaatcaaaatttataaatttcccagcacagagagaatattattcaactaataataacagacagaaaatatgaaaaaacataaaaggctttgtcgaacactcataaaatattaaattttctggaattatcatttcgaacagtcattttttgctgtgatttgtgaatgagcatctaaaaggacatcacaaatgataacgatcttcacatataaacagtttcattgtatacattaaacttttcttatgaaatttttattaattttacacaaaaaaatttttgccgttcttttggcgcataaaataatgatgatacatcatcagtatgtaatgtgttaaaatagtgaattgttttgctcatttggtgggctttgtcatgatgccaaaagcatttgcgtgccgccgcccccgaacccgcggttgtccccgccgttgcacttgtcgattttctcgcgcctcttctgctgctcctgcgcctgttgcttttcctggtcttccatcgccagcagttctgctttgatctgttccgtctgttgctcctcctgcgcgactttgatgaaattgtccacaataattgtgatcggaagggctgaaagagaaaaagcgatgcacattttcatttgctaattgcctattaattggatttaaccaatattaattgattaaaattttcaataaaattccatcgttcgtacccaacacgagaaccccgcacattatggccgcggatgcgatcactttacccacttaatagcgtatttgaacaatcaattggacaatttgtttgttataaatggacccacttgttgttgcaggcacaacgtcgccataacccacctgaatttgacaaatttctttttttgaaaatcaattttcggtttaccgttgtcattgtcacaatgcaccacctgagaaaaagataaataaattaggcaaaaaaaataataatggggcaattagtgagtgaccagtaagccgccggtatgctgacgaacggcgtgctgagctcatccttttccagaaaatagatcattgtggagaagaacacctgcaaaaggtggaatcattttcaaattaaaaatgtgaattaatttaattaaatttaattattggaaaaaaattaattgcaaatgctgaccactccggtcagcaaaacgatggccatcatttgcaattgcttctgactccgctgcaaagtcatgccgaaggtttgcagaccgctggagaagcgacccaactgcgaaggaaaaggaaatgattggacaaaagacaattagcaaatagcgcactttaataatccgaatgacccgcaaaacacggagaattcggacgacgagaaaactgaaaagttaaattatcatttgaaaaattgagacgaaatcaaagcgagaaaaacgaacgcccatcgcaagtcgcgcagctttttgtcatcgacgccgagcaaagtgagcatcagttcaaggtaaaaggggagaatggccaaaatatcgacctgaaacgggggaaaaaggaattaaaaggcatgcaatgccacttcaaattgaattaattcattttcattttcaccaaattgagcggtttcagcgcgaaacggagtttccgtggagccgcgaaaagcctcaggcaatactcgatggtgaagaaggcgatgcaaatgcgttccgtgaacacaaaggcggggtgttccacgcgcaccgcttcgaattcctcgcgctcaatcgaagtgccattcgaagtgatcacacttcgattgcccgtcggaatatattctgtcacctgaaaaatattatgaaagcagaaaaagtaaacaaaggaatagtgtgtgccgtattcgttgtccgttttgagcccaaaggattgattgattaatttatttattttacctgaaagtcgggaatggtgccgaaactgagtccgagcacggagaccatcacgaacagtgttgagcacaattcgaaactaataaggaagagcagaggaagttaagcatggttggatgggacttttaaattattcataaaaataatggtctcaaatttctatattaaattgttattttattaaatatatatttatttttgacaaattctaaacccgggctgaccgttttcgaaaaaagaattctatgggaaaatttttattttttttaagtcttggcttgcagcgaggagcccggtctctccagaaaggtccacattcggcgccgcaatcggccgcaacacaatttgtcgaagctgatttcgtccaccttttcctctttgctcgtctccaacaatcgctccagcggagacaccgactcgtcgcaacacgctccttaaaaacagcacaaaaagattttacaaatatttaatattaaaatagtaatgcccaatcccgtcattttttgcaagtccattaaaatacatttaattaccaatataactggtggaaatgcgccagaattccagttcagccttaatgaaggacaaaattaagcaattattttatccccataatcaacaattacattcaacgccgatggacattcctcgggcggtttgtgcacaacgccggtggcataatatgcaaaacgggttca

SEQ ID NO: 4262 - DNA, 3247 bp, Heterodera glycines
  unsure (1)..(3247): unsure at all n locations
ctccagaaaggttacattcggcgccgcaatcggccgctcacacagggtcgaagntgttttngtnnatntttgggtcttccttcgaatggaanaatngntgnagnggagaaanagantnggnanaanangnannttaaaaanagnanaaaaagattaatnatttacaaatatttaatattaaaatagtaatgcccaatcccgtcattttttgcaagtccattaaaatacatttaattaccaatataactggtggaaatgcgccagaattccagctcagccttaatgaaggacaaaattaagcaattattttatacccataaacaacaattaccattgaacgccgatggacattcctcgggcggtttgtgcacaacgccggtggcataatattgcaaaacgggttcaaatgctaatggagaccgcttaaaagaaatcaatttaatttataattattgaaaaaaaatttatttggtacctgaaaataataggcacattcggactgcaaataagcatcggctaccttaacaatgcacaaattaattaatttgattaaattttttcaaaattttggatacaaatcccattgataaaatttataggcaaatcgccttttttgtattcggtgatcaaaaattggcaaaattcgcacttttagcctcgtctggtggttaagctgtacaaatctggccaaaaaagtagttgggtcagcccgcagaatggcctcgacaagaatgagaaaggtcgagccgccgatgtttagcctgagcagctcctcgtccacgtcgtccgtcgcgttgtcctcctcctcctcctcctcgtcgtcgtcgtcatcgtcgtgctccattttggccaaaagtccgtcctcctcttcaggcaccttaattaattatatttgttagccttctgctggtgaagctaaagtctaactacctcattgatgtttatgctaatttttatattattttaaatttttattaatcatttataatattttttggaaattttcacaattttttgttataaattttttcaaaactttcaccaacttgctcaagcagagacggaattaaagtggtcgaagatgggaccatcagtaaattttcggcagagtcctttttagaacttgcgcatgagcttctgtgaccgcttgcgaaggtggcgtgacagctgaccaccgaagctttggaacgaattgtctgaacaaaggcaaaggtttttgttgatcgccaaggaattttattttgtttgttaaatcatttaaagcaaaaacaattaaataatgcttatttattttaaatatttctcaattaaattaattattttgccaatttatggcaatttcctcggtcattttccccatttgtcttgccttgctgaatgactgctcgtccccctcgcaccaaatcaggtccaaaatgcgtccgttgtgccgttccgccaaattcattgagtccgtctttcggatggccatctgacggcgctttcggtgctgttgctgggcagcggcgatcatgtttccggacacccttaataacaataacaccaatttgattgatatatatatgtatatatataattgtttttaaagcctattttttattttacctattttttttatttttcgctttttctcttttctctcctcccaaaaaaatttccatttttccaatgcttctccttctcacaattataagctactctctttaattcattcacttatttgcctacggcgaaattatacgctttcggcaaaagctgagcttttttcaattatcagtttgaaagactcaaaaaacgtaaaaaagtgaagaaattgtgaagtaaagaaaacaacaattagcatggttaataaataaattaaaataatgaaaaatagttaataaaagagtcacttaattattttgaaattatttgccatgggccaaacattctgagaatattcgtttgaatgacttacggcctaagcattgaagtggcactgacgccgctcacacagctcattattattttaagtgttatttttaatgaacggaatattagggaattgttaaaactgagaaaaagataacttatcaatttataaagggtaaatttaaaaaatgaaaaattattttaaaaataaattgcactaaatgggaaaaggaaagccgaattgtaaaaatgcattttctcaaaaaggcacaaaaatttgggggaagggggaattatcatttttaaatgtttcagacagaaaaaaatgcgaaaaataaatcattaggaaagaatgtggtgggaaaatttttgacacgggcggcggaataatttttaacgcctcgggggcatttgacaagagaaacaaaaaattccaaagtgccatcaatcatcgattaaaagggataaaagagggagataaagtgagattatccgctgatcagttgaagagagaaaaatgatagtaattgaggcaattaaaagggaaattataaatattcaattaaaatgataaaagccgctaaaattaagcctttataacattgcatttgtttgttttttaacattgcttaattattattaataagtttaaatccaaaaattgacatttgtaattgtacatgaattagaagtaaggcaaaacggggaaattgattaaatgtttttccgtttttgtctatctgtttaatattcctgatgggtttgggaagtccattaatgtgaaaacattgccaaggattggcggcggagagcaaagcggggcaatgaatgccaaggatggcgccgggaattggcacgtaattggcggaataaaagttggtctaatgcactcgctgaattttgcccattttaaaatttcaaaaaatgtccgtcttttaacaatggaaaattttggcggaacttcgcggcgaaaagggcaccggacggtgccaaaattacgccttttctcgcacactttttttgttctgttaaatcgaacaaaaagtgaaggcacacaatagaaaaaagagcaaattgaatgtttaaaatgcacgaaaaatgggaaaaataaattaattaaaaaggaaataattatttaattttttggattaaaaatgcattgggcgacaaatgcaaaaaactgaaaaataatcaacaaattccaaatcaatgcgagcggagaataaattccatgaaatttacttacatttgttaaactctaatgaacgcattgttaaaagaatggaagacaatttcctcatgctttaaattttccttanaaacaagccgaaaatca

SEQ ID NO: 4263 - DNA, 2252 bp, Heterodera glycines
attatgcaaaataatagagcatcagaagggctctcgaatgatactaacaatgttagatttggtgttaaatgaaaaaagttatagtccaaaaactgggctggcgccgaaacgagcggcgccgaaacgagggtgtccctccggcggcgcacgacggcgccgataggcgactccgaggaaattttgcagtttttaatggggtttgttaacagatttttgtccaaaaattaccaattttgcgcaaaaattatattttcatgagtatttttaagaaatcagaataaattgagttccgtttggttgtgcgcgagtaaacggtcgaggaaatggcacaaaaagcgctctcttacggaacacactttttgccactgatcagaagcagttaatagattgattgatcagtagggattccatttaaagcacagctaagaagcacaaaaaaattccccataaaaatttgattctttgaaaacaaaaactggttgggtattggcttttaaaaattttattaaggtttttgccttttttcggtactaatttgcgataattggtgcctgaaaatgagatcaattcaacaaacaaacaaaaaagatacagagaatagtgaatggctgaatggcttgccaacatgatcacgtcatctttcttttgtcgacaatcggccttggcggtacacgacgctaaaattttgaattttttttttactgccttggcatactatcggacacaaaaggcacactttaatctcaaaaattgcacaaaatttatttattttgcgttaaattcgccttcagtttaatacctattagcaaataaagcatatcgaaaaaagcagaattgcgaaacaattcttatagtttgcccgaaatcgggcagtacaacagcgccacgcaccctcttaaatacaaaatgcaatttaaatacaacaaatttattttaagaacaaagcagacatgaaaaaaagaggggcacgggttttagctaacggaagaggcaaaaagtttctgaacacttgactacacaccgtccgaaaaaacgagatgtgtaccaataaatagagagtgccagagaaaaacattatctttttttctctaattttttgtctccttttggcgtactatctaatatttttattattaggaaaaacaacattcacttcgctctatagaactttttttccgccttacagaatttcttcatatttttcatatcgatagagaaaaaaatataggatttttcaatcgcttttttaatgaaaataatcgcttttattttagtctaaaatttaaaacaaaatttagaaagctcatatcatttttccaatgcatccaattgtttagcatttgcttagaaaaagcttctactttccaagagctttcgaatgataccaagatttaccaatttggttggcaaaaagcttcaaaaataattcccaaaattcgtcattttttaatattttggacaaaaataaataaaaatgtacaggagctcatttcccggacgctgtgactaatttttggtgtttgaaaaagagacgactctccaaaaagtagtacaaagtacggaaatgccctccttaatttgataatggcgcggatcattacaagaatgcaatgcatatttaaaattttaacccacggcccttataatccacggaatactcttaactaaggggtcaaggcagttcgtacaatggtgttgcaaataatgccaaccttaggataccagcggctatttacaaggaaatcagaacggaagcactagccatagacaaatcgataaagaatgcggtaagaagcctagcgtgaagcgccacgcatgctaggtgccacgagaatgctacatcccgcaccgtctaaagattaaaaatgaacagcgcatcatctacttccattttgaatgcactacggactccgaacccgaccctgaactcctgcgcttgaggaatcaggtaaataagacacaaaatataccaaaatcaggcatttctttcaggtgaacttctgctacgcgcacgactcttgcacggaatgcattgcaaagggtatctggaaccatccagctggaccaaagctgtgccaatctgtggactgacgaggaacttcgcatgggcaccgctcgagctctacaacaccgaagtggagaccgcctacaatgtggacgaccccctgacgtacttcaccaagcggctcctgccctctgaagcttgatgccctcgcacttgaccctgtcgagaagcgcccctaacggaagcg

SEQ ID NO: 4264 - DNA, 2160 bp, Heterodera glycines
tcaacacattcaacggaaagtagttccgaaccatattcagaattcgtctatctgctgccaaatatttgcaccgttttttctcaggtgacaatccagcgatcgaagaattgtatttgtgatcggcgattttctgttcacgtcgaagaacatcaatgaaatgccacaacgatggatgacgacaattgaacgcgccttgcaaacggtggtgctcagcttctgcgttgttgttcgtcctcgcatctccatccaatgtccgttggtagacgttccactattccggacggaacaacggttgcgaccatgtgccattgggacgaggacgcccaacataattgtccaaaagcctaaaaaattattctaaaattgaaaattttattttctgaccaatcaatgagaggtcgaaaagccgccaaatttccaaattccatgtcaagtgctgtcactgcattcctgacatcacaaagtggaacgaaagcgactgatgtgagcatccgaacactcaaagcaaataccggatcagcacaataacgcttaaattttgaaaaatttaaaaaaattttaaataaggaaaattacctgccataagccttgctgtttcacttttttttgtaagttccgtacaaaatgaaaaaagcaaaaccgaatctggcatccgggaaaaattgtcgtaatgtcatttgacataaccatttcaaaatccacagaaaaagaaatgggagcaaaattttgccacgctgcacgcaaaagtgtgaacattttttcgtacgatgtttgcgattggaagtcatcaaggcatggcacaccgggaaaatccatttttcacgcctaaatatttaatttacaattttaaaaatcgaattaagaccaacagactttgccaagattgtataaatctgagaaaattgcccaggtgctaatgagaaagttccgtcaccgaaacactcattcattctgtccgcaaaacgtcaaatgattcgcgcccaaacaataaaattctgagaaaacatttttttgccatatttttaaaattttgtgcaaaaaccagggttgctcttcattgattttaaaatttatttcctcatttagcaatccattttactataataaatgtttgtgattatacggtatttactagtgaccaatttattctgatttcttaaaaatactcatgaaaatataatttttgcgcaaaattggtactttttggacaaaaatctgttaacaaaccccattaaaaactgcaaaatttcctcggagtcgcctatcggcgccgctcgtttcggcgccagcccagtttttggactataacttttttctttgtcaaccaaatctaacattattggtatcattcgaaagctctaagtgttctctattagcttgctaagtttcaaaaaatttcgttaatgctcaaaaaaattatgactagaagaattcaaaaaaccaggccacatgtgtacttttggccataactttgttcaaaattgatcaaattttttggaattatgcaaaataatagagcatcagaagggctctcgaatgataccaacaatgttagatttggtggaaaaagaaaaaagttatagtccaaaaactgggcgggcgccgaaacgagcggcgccgaaacgaggtggacccccagttcgggggttggggggaggggggtagaggaaatgtgttgaagttcgaatatgatattgctacgtgtcttattcgctgatggtatatcttctcttttacagttttccccgtcttctctcttctcaattgagccgatttttggtgattaccatgacgcttctctgcttgccctgcgctgctttgcttctttacatttcattcacggttcttctccgactcctcggcggtcgcgacatgtcttgctgtcgtgtcgtccgcgggctcctcctgttgttggtgataaagaaattgagcctgcaaaaactgcaacaccatctcgagcacggcggtgccggtcaacaacgggtcgcagtcgccctgaacgccgatgtaacgggcgatacgggcaggtacccatgaagccaaagtcgctgaacgattggtgcacaatgtccctgcgaaaggaaacaaaaatattgttgaaatatgagcgagcaattcgcggaattaaattttcgaatataatgaattttggttaggaaa

SEQ ID NO: 4265 - DNA, 2615 bp, Heterodera glycines
attttagtggctaacttccgaaatagttttttttagtggcgaagctccaaaatagtgattcctagtgatgaatagtggcactaaaaacgaaaaattttcgaaaaagaatgtgtttttcgtgcatttctcgtcgagttaaagccgcagaaaaaatagttaaaaaactaagaatccgatccctactggtgatgccgatgcaaatttacataatttaatattttctattgtttctttggaattttataaatttttagtttccgtgtacctttaggttaaatttaaattatcattataaaaaatactaaaataaatcaatttaaaaattaatttagaatataatattctaatgaaattcgttgtccaaatatctttttttgggtttgtaggcgaaatgaatgattttggttagtaggcgaaatgtatgtacaccagggatgtgccgagccagacaaaatccgattccgattacgttccgatttttttaaaataattttttcccaaaaattttattcataatcaaaatcataaattttaagattgtgatgcaaaaataaaagtttgtccacattctcaggcaataaacgttttctcagatctgtcacaatcaacccagcggtggagaatattcccagatatttgacatttttgctaaataacaaaaaacttgattatatcggggagaattaatccggcactgctttgtgagaaaaatttaatttcagtcattatgttaaaataagattaaaacattcgtttcagaaaacatttttttcaaaattcattggtattctcgctaaaaaaattccttcaaaaggtcaattcttaggggtgtaataatcggatttcaaggcaaaatccgattacgattatccgattccgattcggcacatccctggtacccacctgaaaaccatacttacataataactgtattgtctgtcagaaattttaaatgtgtccatcatttgattgtttgatccgccttaggaaattctgggtcgggcggtgccgttaggcatcgctgagaaaaaaatttttttttttttggaatttttcattaatttgtaatgcgaaattaactaaattttttttttaattaatccctatcttttccgtgagctaagaccacttccgcccggtagggctcaactgcgtctgagacaacgccataatttttttctttgttcgccaaatcaaataacctttatatgtttcgaaagctctctatgtttttagatatatttataagcattttctaagcgaaaaccaaactacacataaaaaagttaaatttcaaaatcttaaaaatccaagttttttgtattttttatttttaactttttaatccttaaatgaatcattacgaattttggttagctgaatagagcttgattttagtattgaatttttaattttttttcactagtaaataccgtataatcacaaactcgagaattttttggctataacttttttaaaagtcaatgaaatttttccaaaatttttaaattgagaaatcttagggctatggaatgatattaattaagtttggctcaattgcattttatgactagaaaattttagaattttttgtccagaccttttttgaaactgaatgaaatttttgaaattttaaagaataatagactaaatagattacttgaaattctaaaaaatttaatctaattgctttttaaaaattataaagcattgaacagcctatgctttttgcaattttttgaaattttggcaccataacttttttataatttcattataaaaattttctaaattaatattcttatagacaacatttaaagctatcttggcagtttttaagaaacgacctagcaccctttggatcgaccgtttttgagataaaaattgtaaatttggatgagctatgttctggtgctcaatgtttggcgctcaatcggcgttttgtccgccaaaattccccaaattttggcttcattttttggtttcgttctcttgcccatcatccgttcgtttcttaaccttatctccaaaatttcaatgttttttttctttgtttaccttgtgacagttaagttttatgcacaaaaatagagaaatatttacaataaacaacaatgaaaaaaagcagttaaatgtgagtaaagtacgaattttgaggtggccgaaatgaggaaaattttgaaaaacattatgtatttattctttggaatggactatcaaaagctttcaaaagataaagcgtaacaataaaaataaaaaacaattttaattaaaaaaaagtaacacgcccatcgtccgttcatttgttcaccattaattaactccaattttccatcccatgtctcaatcaaactaagtatatcgtgaccgtattgatacagtacattgtggaataatctttttatattaattgaccccgtttagaaagtaaaactttttctcacgctcataatcagattcaattcggaagttttggtcagcaaaagttaatgtgagacaaaattcaattcaaataaaaccacggtgaaaagggtgtttaataatccaaaattgctcaattaatgtcattttgattaaagggggatcatcatactgctcatcattcagtgcaaata

SEQ ID NO: 4266 - DNA, 1822 bp, Heterodera glycines
  unsure (1)..(1822): unsure at all n locations
gcgtatttttntgggaaattttactataatttagaagcgatggaattatttataggaatttgttcaaatgagtaccaaatccggtgcagaaagccattttgagaatgcgccactccatggtcagttcgaggcgatagatatcctttggaaaaaatgaaaattgaatgtattttcctgtcatagctaaaaaaatttaaaaaatttgccccaaaaatttcttcggcggtgcctaatcacaccgctggattccaaatttcgtatatttttgccaaaatttggtttcataatgactaaaattttccgctttttcccatggcggcataattcagcaaaattatactggacagaaaatttttgagccggaagcggaaaaaaactccctcccctttggggcccctcccaaaacattttttggttacgggcctggtgggactacgcccttgaaatttctatctgaaaaactaacaatggaaattagtcaccttcacccgctcccaacccgcgtcccatttggccagccgcgcttcgccaaacacgggcacagcaatggaacggaaggaaatttgctggaaataaaatttaaaaaatttacaaaaaatccaaatttttgggggttcaaaaatgaaatacaaattgaatcaacgaattgcaagggaatggaaaatttgggcaatcatcaagaattggtgtcccgacgaaaaaaaatattaaaaattttgcaggtattttttctaggcttgaaaaatgcgcagatcacgaatctgagctcagattttgaaaatcattgatttttatctaagatttttcgtcgactacttgattttttccaaaattttaagaaatttagtcgggcgtaaaaactcatgcgcaggatgagaaggagaccttgggttcgagtccgtttggctgcggtttatttttttatgacacttgatgaaaaatcatagacaaaatgaaggttcatgcataatcagagctcagattcgtgatcagaatattttttaagccaaaattcattgctaaaaattttttaaaaataatttaaaaaattgaaaataatcaagtagttgacgaaaaatcttagataaaaatcaatgattttcaaaatctgagctcagattcgtgatcggcgcattttttaagcctagaaaaaatacctgccaaaattttaacattttttttcgtcgggacaccaattcttgatgattgccaataaatttgagtagaataaatgggttaatgcattaaggcacttagagtggatcaggcattcgataggcaattgccctcaaatattggaggggatgacgatcggcacgcgttgcaaatatttcccgaagattttcatcttgctcaatataaagctgtttgcgtttcattcctttccctctaacgtgacgattgatcaatgggccaaaaaatgcaccagaaatgagtaataaaacttatttctttatgaatgatatgatgtttttcttctcctgaagttacaaaaataataacaaattcatttccatattatttacgcttataaacaacatatggcagattaagataaagatcttttaggccaaaccaaaatttttgtttagtaatttattttgtttattttcatttttatttacaacagtgtccaattttctggtgtccatttttccattggtgtccaattttctagtgtccaattttcggtgtccaattttctggtgtccaatttaccgggagccgaacgagatgctccccatccctcacacattcccaaatagttttttggaaaaatacggcaaaaaaattgttaaaaatctgatttttgattctgaat

SEQ ID NO: 4267 - DNA, 1849 bp, Heterodera glycines
  unsure (1)..(1849): unsure at all n locations
tttgccagcgtcaacaaaaaaatttgaggattgatcggcctgttcacttttcgctgtttttattttgtttcttcagcgatcactgcgccgccgatcgttgatcagatgagaatctcaaagtcgcgcagctcttcctccgccggcagagccgcctccacccggctgcgttcgatcagatccgggctgatcagcggcagtccggcacgctcccggcggacgagttcaaagtgcgcctcgcgcagtgcccactctttcgcgctgggccttaacgccgggggaaaggtttagaagggaccgaatttagcattaaattacaaaaatgagacattttgatacaagactctaaccaaaaagtatgggcaaaaatccataacttaaaattgaaaagttaaatggtaaggcattttttgaaattttgagactcatcaaaaactgatgacattttaatatatgcattcattgatcacacatttgtgggtgtaaaaaaccaaaagattaaaaatggcattgtgttgtgccaccatagtcgagttatctaattgttttttaacaatgttttaaatcagaaaatatgaccatggaaaatgaaggcagtgatatccattttgtgcaaaaaaccacgagatcttccgcccatagcccacccctcccccggtgtgatggcagttcgtacaatggagtttcgtacagtttttctcaagaaaaaccaaaaacctaagatattatatgttcaaaaaatttaattaaacttgaaaaatttagtagaaaccttggcaaaaaattttttagaggtttggttttttgaaaaaaattccaagttttaaccgaaaattaaaaaaaataaatacaaaattccattgtacgaactgcccattgagccccccgtcatctgctggtgctcgctgtgctcaccagtcggaattgcagtattgccacacaaaggtcaacatgacaaaacatccggtgccgaagatgggcattgtgccgtgccacttcttccagtctttgtgctcgtcgcgagggatgcatttgaaatagatccattggcgacgctaaacccaatttttttaaaaaggggggaaacgacggatttcagcacaaaaacccgaccatgtgagcgccttggtcagccgcgagtggtcgacgccaaccgtcgttgaaaagccttcaaataaaagcaaaataaaaatggtgtataatccgggaaagcctagtatttcggtggttgctttacgtagcaccttttttgcggtacactttcttcaaaaaatttatggggaattgagaggggtccgactgtgccgaaaaacgctgccagggagagtttttttggaattttaataatttgttagaaatttaggcaaaaaatttaaaatttttttgctgcgaagtgaatggctaccgaaaaaatcccaattctattagtttttttggtgcgtttgtgccagtcaacatttgtcggaaatgtttaaaaatggaagaattgcttattaggaagacggggaaggcacgcagcccttttgctaggccatttgaatggtccagttcaattccggtccaaaaatggatggatgagattaaaaaggagtaaaactgaccaatcaagacggcccttgttcagcattggccatggattttcataagcaaacgaatcggaaccagggctaaaaatagtatcaattagtggaccaaatgaatggctacgaaaaaccaaaagggtaaaaaagaccccaaaagataaaaagtcgtgaaaactatagttgtttggagattttcgggatcactatcacgaatctaacatcgatttattccattttcgaatcactaacctanatttgagcaaaaacgt

SEQ ID NO: 4268 - DNA, 2704 bp, Heterodera glycines
tttgtcattttatggcttaatcttctgatgttccgttttttcttagtcaaaagagccattctctttttcccaattattatgcaatggctgaaaaaacaaatgcccgcgcaaaatgtttctccgttttacacggaatattcacattccgcggttttaaactggatgaaatttgggtcgaaaaaaaggtagaaaacaattattgaaatggttttataaggtttgcagtcagtcgttcacctaatgaggagaaggctaaaggctaacaattcacttttttgtacatccatttagaaattccaaatggacttatcgggagatgcgttttctcctgctaattggcgcattgggacgcaaggacatttgcctcaaagtcgacaaatggaaggacgacgactctcaccgcgtactgccgaatattgcaaatcgaatgggcgggaaagggcaacggatttttccacgacgtttgagagacgagccggaattggaattccattctttgggtattcgttattttgtatataaaagctaaaaaacccggactaaaattcttgttcaacataaatccctggtttcaagaaataacggacccggaacctgagaaaattatttgtaattcgttttaagtcgatcccatttcgtacaaaccaagcaattccgcaccggcatttggcgatgttgtttgtgaggattatcggttcgatataagaacgaaatatcctcaatgcgccgaaataatgtaagataaatgaataaaataaatttaattaatttgccttatgttttcagaagcgaagtccgcgaccaatcggactgccattgctgctatgctgttgccgccgcttctgttctttcggatcgtttttgcattgcaatggcgaaacgaagttggccggtcccaaccgctcgactcggcacatccttcttttctgcggccgatctgatgcaatgcgcacgagatgaaaggacagatgcgtaagagaaacaaaaaacggaaaacccaagtttaagcgggtcaaacaacattctgaatttaaacacatttttccaataaaaagttatccaaatagaaaaaagctctgctttaaggtgtcgtggtggtttctcacacaatgtttggagatttgttcacgacgtcggtgttgtatccggccaccacttcgatcaaggtttttttaaacaattgaatagtgtctgcacctttttgggacgtcttcccggatttacacaagggataaaattaagaaaatttggtgtgattcgttaacacattttattcaaaaatgactatttcgattttgggtcaaatttttgaggaaattccgggtaaaacttaggggtttaatttacatttttcgccgtttcccttcgctacgacccgccccattgcacagctattaggcattcgtcgtaacattttcatagcagaggcagtccttttctcgttttaaggcggttgcaaaccgttcccttttccgccaatgtctttttcgaggcgtttgcctttcgtttaccgcggtaagtgcgaggaaaaatgcgtaggatcacagcacaacggggaagaagaatatagcagtcaaaaaatgaaaagtaaaacactcggggacaatctgtctacaaaatcctttttgtcagcgatcgactggcacactctttcacgaaacgtctgctgggagcaagtgatcaaggaagaactgttctacaacggatcaattcccgtcgatttcattgtgtacaatcatttatttgtctatgatggtggaattctcctacagagaagagtatgttttttaataggggtccaattttgaatttggttgggggtttgggttacaatagattgaatactttcattacgttttcaatttttaggaagacggtgttcaaagaggtgcgcacgtcgttcgactgatcggttacggacgcgtgaactgtacggacggacggcgtgtcaagtactggttgggagtgaattcctggaacacatcttggggagaaaatggcggcttcttccgtatcaaacggggcgaaaatgtgtttggcattgaatcgcgtgacatcagttttgggcgagtcgagttgccatgagacgaagacgaagaggagagagacaaaatacggcacaaatttctagcaaatcccaggctttacgaaaagggaataaaacgggctttttaaaatggggcaaggaattaacgaaaaaataccattaggtggtaaataaactatatttgacaattcctggccctgttaaagcatttaccatctgactaattttccattcccagtcaaatgtttactaaacatgtaaaattcatcgccttcatttttttgtccattacttttgacaaggaaataaacgattttctgtaaaatcagtttttaatattctttttttgtcttctttgtttagtttccactcaaataaacaaaagacggtaatactgtgctttgtcccccccccccctttttcgaatatttttttatgatttcaaaagttattaaaacatttttccgagggttttcggggtctctgatcacgaattcggcacccatttcgactaattcggaatcccggccccgaattcgaacaaaaagacgaaaactcaaatttatcgaatttccgttttaagtctaaaaatggtttaaatgatcttttattgaagcattaattactttaacttccctctcaatgtattcaaacaaa

SEQ ID NO: 4269 - DNA, 3631 bp, Heterodera glycines
ggattccgaattagtcgaaatggattctgaattcgtgatcagagaccccgaaaacccttggaaaaatgttttaatgacttttgaaatcataaaaaaatcttcgaaaaagggggggggcaaagcacagtattacccaaaagacagttttttatataaatttttcaatataaatttctttttccgggagtttgccatttccccgtaagccgatggcctgaaatattttagggcagtcgattaacctaacctggctcattaaaaaggcattttgtattgaattttaaactctctggcagtcattatctttttcggaaaattttccaactcaatagaatttttttttttactgtgtataagtatttaaagttatgtatagcaaaaaactaattgtaataaaaagaaataaatatacaaaagcatccaaccaacaaaaaagcaatgaaaaaggcgattcaattgtgtagcttcaagtggccagtgacttcgtcaatttcttcacgcggtccgaaaatgccgagcactgtgcacgagccggccgggatttgtgtgtgcccggcgtcgtggatgagctgcgcaatcaatccatgctggtgggcctgtttgcataactccgacagttggctggcactgtcggcacggagaacaatctgagtgagaaaaaatgtgtaaaaacaaaaaactgccattcataaaaactaaatcttagcgggactcaaaatgtgacatcgatgatattcatgaccaaagccaagccaccccaaaaaattctgttttagtcgctctgaacagaaaatgatgcttgcaaaaatttgagagcgagatttccgaatcttccagggccgcgctgacattttcaaaggcaatggtttcctggcgcgctctcccaaaaaccggcctttccaaaatgattgatcccggtaaaagccggtctcggctcgctctagtaaaaaaaaaaaaacctaaaagatgaattttgagtgtctcggctgcatttgactgattaaggaaaggttatttttgctgtatctcttcgtactttcatctccccatgctgtgcccaatagtccaacgcgtttcgtccctcctccgacttgagggccgacctgtacagggccaccgcggcgtgtccaaccttaacaaggaaaattcaaaaaaaaattttttgaacaatttttcacgacctgcgccgccattttgccaggccccatcctaagcgaagtattgatgacaaacaccatcttatgaggaacgccacctcccccaatgaatttgaagctggacgtcagcgctgctcccatttgaaatcaatcaacaatcgaatggaaatgtttaaaaaagaaaaaaaagagtaattagaatgccaatgccgcgaaaattatattggaactttggaaaacaattggcaaattccaagaaaataaggtaaaaaacacaaaagagcgcattgattttattcatttttgagacttagaaagcatgagaaactcaacagtagcaaaagcgcaacaattcatgaaaatgatcggaaacaaaaataactaacaaacaaataagaaaacatttatttaaattaaaataggtaactaaataaacaattctacaattgatgaatgactgattgattgtgtttgttcatttgttgtgctttgggccgctttttgaactgaatgacgaggagagaaatgcttggaaaaaagcgacggagagtgaaccgtacattaggcaatcgtttaattttgaaaatggaaaatatttaaatttcagaaaaaaacaaaatccgtctttccgtcgctctccgaaaaacgcaacattgccaaaaaacgaagggagcaaaaagacaattataattataacatattaatttcatcggctgatgatgatgaaagaggacaacaacgaacgaatagacaataataattagaagaatccgtgcagtttttggttgttttttgtcgatctgttctttcatcaaccacacacactctgtttggttgttgtactgctccataactacggcccgtccgtcgtcgtccgttgctccaacgcgtcacagtaccgccacgagtcggacggtgaaccgtcgccgatgcggacaaagaagcgcggttgccactggtgaccgagccgctcacgccccaccttttcgtcccgttggcgttgctcaatgcatcgctttgctgaaaagggaccaaattgtaaattttttaaatttaaatgatgtaattttaaatacataaatatttgctttaagcccacattgggatgcgatttcgatgttgttgctgaacagtgctgcagtgacgtgacgccacaatttgcgactttctctgtcctcctgttccctgaccggcacacattcctataaaaaaaagacatggttgtttgttttttcaagaaatatggtactcatacttcaaaaaataatcaactaactcttaaatatttgagtgtccacgaaattttgtcatagtgatcaacaatttatttaaaaatctcataaaaattcaattaatatagcaattttattaaaaagaggttttttcagattttttccacttgtggcaaacattttttgaaatttcggtataggtgaaaaaatcagcaaatagcggttacaatatgcataataagttttttgcttttgttggatctcgatgcaagtgaacgagtatttgtttgagcgacttttaaagaattatcccgcatcatttacctttcgaacatccggcttttgccgaacatcggtgaacagttggtagtcggtggctccgtcccgcttcaagtaaatttccccgttccattctcccttcagctgcatcaacgcagtctttcgactggtgtgaaagatttggccatggatttggtgggctttgccgcggaagaacggcttggccaggaagtcaatttcggcccgatagcccgtcttctcgcaacggagttcgacctttgaaaaaattgaataattttgttacagacatccaaaaatgaacaatttttgtacctttcccgccagttcaaaccacggcgttgccattattgcgcgtccgtaaccgttggggaaggtggcaatgtatgtttcgtggtgctacaatttaagtgataatatttaaaacaaaaaataaataaatgaaaacgcatttaaattttacgaacaaaatggcatcggcttttgaaaacaaaaaagtttattcacagaacccagcagaccaacaaccttgtgaattcggacggtcgccttgccgaccatttggacgccaatggccaggccgaggaaggacgatttggtgtaaatgtgtgtggtgcatgaaacgccggcctcaggatgttcgacatagaaggcggagacgggcggatggtggctgacctgttcagcgatgaatgacacctgaacagcgcaattcacacatttatggcaaagaaattcgggaatgttagtcgagacgagtattattattattttttagtgcattcgaatttgagcgtggaaaacaattacttatttcaattagaataaatttaattagaaaaccatattattccctccgatttgacctggttggtggccgacccggggaacggaccgcccttcgtacgactgctcggagatggctcagtgccgggcagtgtccaa

SEQ ID NO: 4270 - DNA, 1316 bp, Heterodera glycines
taaagtttgaaatgttgataatttttttagagagcgacggcgaaaatacggatcaggatcaggactacggactaggcatccatacggactacagacttacggactaaacacccggaaaacccttactccgtataagtccgtatgcaggaaaaatacggacccgtatacggatcagggttttttgaaaagttttttaatcaataaaaaccatatttttttactaaaatactaatatagattcattctaaattttattacgaacattaaacaagatttttggagtccggcggtgccgataggcgccggcgggaaattttttaaaatttgattgcaaattcttaacagatttatcgaacaaatttgcgctttttaaccgattatatgaatttttctaacgatttttcataaaaattaggtatctataattttgaaaaaatttacaaatccatcgtaaaaaaagttaagaaatttaaaacgaaattcatttcaaatgaaatttacgaattggaaattaaatagaatttcataaaaaattgaacgaaatgctattcaaaatcgtaaaaattttgagtttttatcacaaaaaacatttttttccaatttcgtaaaatttttcaataattttttgtccttgatgttcttattttgaaaatttttcggtcatacccctgtcctagagccacatccgcttttccacctactaggatcttaattccctcagttagaggatacaattttaaagttcttaattaaaattgaatatattttaaaattttcggttttttcgtttcgtttcgtacgaaaatggttattttttcgttttcgtgtttcgttttcgtccgtcaaaattttttcgtttcgtgtttcgttttcggttttcaaaatttcttttttcgtttcgtgtttcgttttcgtgtcgaatgccctttttcgtttcgttttcgtatacgaaaatttttttttgtgattttcgcacatccctgatcggggatgattagaaagaaatcagcggaaatggaggttcgtaaaccgtggaccctcttacggggaatttattaatctcctctcactccacaacagttttaacggcacccccacaaagtgtccaagccacgaaatgtccaaaagagtaaaaacccacgaaatgtccaaaatttttcaaaatttataaaaacaaaatgagtctaatttaggatttttagggttttcggggtcgctgaatacgaatataccctttatattacaccttgcctaaccttaggcccatctgaataataaaaaaactcaaattggagacttggacattttgtgggtca

SEQ ID NO: 4271 - DNA, 995 bp, Heterodera glycines
ggatatactatagtcaaccccccggaaaaatggcataatggtataccaatcgattcgtcttgatgaggtatgcacgaaaatgtaggtctccagttgcggaaatgccaaaaaaccggtttttgaactggctaaaactcgaaaaattgagtgaaaaggggggcccctgaccctttaaaacggtcaaattcggacaaatttggatcattcgaaagctcttgatcagctaaggctaaaaaacaaggtataaattcgaaccgatgtcatctaggcactgggacaactgtgtcccagtgaaaatggacacttcagtaccaaaaaataaagttttcttatataattagggctgggatttttatatgctaaaaatcctgaaatatgtaataaaatatgtgctaaaaaacccaaaatatgtgctaaaaaccaaaaaaaaagcctaaatatgtgttaaaaatgcaaaaatatgtgctaaaaattggaaaaaccaagtgtatttacgcaaaaaaatcatatttaatatcagtctttatcaattttcgcccgacctccaatgaaaattttggcgatatcaatcaatttgtaaagtcccgaattaatttttccatcagttgaataagttccttccaggaactttgaaatccagtgacgatttaacacagcgtttgatttggctgctttaggcatttaaatatataaagaaattttctaaatgcttaagaaacgtaaagtaatcaatttttagggtgcattttcagattttcttgtatttttcttacgatttttctcaaaaatgcccaaatatgtgctaaaaaatccaaaatagcccaaatatgtgcgatatgtttttatgtgccaaaacgccaaaatatgtgtttttatgtttttataagtcgctctaaatcaaaaattgttcggagaaaatgctatttttgggcttctctcgccataactaagcagcaaaaaaaatgttaaaacataaatatcacagccctatatat

SEQ ID NO: 4272 - DNA, 3311 bp, Heterodera glycines
  unsure (1)..(3311): unsure at all n locations
aggcaaaggctggcacaagtgacaaggcaaaacatagcagcaaaagggtcgcaagcgtcaagaacgcactcattattgccaggcctgaaaaatttgatgatttttcgaacggaggtttgattttggcattcggaagatgcaacgccatntntatgataaaagcattttntaagcaaaaaatatccttttataaaatacctttanttggttattctaaatttaaaaattttaatttagttttttggattaattgtaggaaatggatattaaactccgaattcaggaaaacaaattaaatacattaatttaaatgactaaattccaaattcttttggtaattttttcatattttataggcccctttttgtttggaatattttgtctatatttagcatgcagaattgagcaaaatttacaaggatattaaaaagtgtagaaaatgcttaacaaaaatttaacacacttatttatctattttaaaaaattatgagagattaaaagttattaaaatacacgaataaaaattgttgtgaattaataaatttaaatgcatttttttctgtgtaccgtaccgagtcgtgtggaaatggtaagtgaaacggccaatgccggcaacaaaatcaggcgcccttcaaacagttctaggcgcgcagaagattctgaggaggcagtgaagaagggtgactgctcaacgaggcttaattcgaaaaaaattaaattcaaaaaataattagaaagttttggaataatttctaattttttaaattgttattaaaactggcaagtaaaaatttagaggaattttttggttcattatatgcggccaattaaaaaataattgcacaatttagaaaatattttatttgttaaaatagattaccaaaaaatttcttaccgtatggaccaaacgaggaaaaggctaaaatgttttttgtttattaatttttaaattaaataaaaatgtccaaattacatacgtctcaattgtgccgagaacaattaatgcactggcaaaaaagcgccaaaatggacaaccggagtgcggaaaaacgttcaaaacaccgcccacaatgcatgggattgcgtaaatccaccagtcaggcacggccgaaaattttgaattaatttaaatgaatttttcaaattaaaaattaggtgaattaattggatatttaaaaatttcataccaaataaaggtataaagcactgatgagcagcactgaactaagaagcaattgcaaagaacgtgcaatgccaatttccattttaaaataattgtttaacttaaaatataattaaaaatttaattttaatttttttataaattttttgttgcttaataaaaaaaaattcaataattttcggaatgttaaatggttttttttttgaaaaaatatttccattaattgacaaaaatttacagcaattttatgtatgaagaggagagcattgtgatgggtgaacataacaccacaacaaattttctgctctctatcctccgtttctttcttcgtccttaactatctctccaaattttatttctctgccacgactttttggcacactattttttcgtggttttcggcttatctatgcccccgattcattttttataatgattattgactctggcgccgccgcctccgccgcaggtgtcccccctattagagagataacgagagaggaacaaaatatgtgggggaaatgtaaaatgtgaatttgtttatgccttattgtaatttaatttgctgcgttaatgaggttcatttgaaaatttttcgagttcaaaaccggcaattggtccagcaaaacagaggagttgctaatagacaaaaattaattagcctcattagaagaccatcattaatgttaaggataatttggtgttaatagacaacaattaattaggcgcctcattataagattatcaattagtgccaagaataattgggtgttaatagacgtaaaattaattaggcttcattaaaagaccatcaattagggccacgcataattggaccatatcaatagcagattaatttaaacaaaaaaattttcctggctgcgcccattggcaccgccggacattggtaattatgaaaaatgtttatttgtaaacccgctggtactaattaatgattatccttttgattataacagagacgctcgaatcgaaaattcttagactcctaaaaattgaaaaaaaccgaatctttctctacgttgaaacgagacgagaatttgtttagttcttatttttacggaaaaatgatcggaccggaacttttaaaatttataaaataaatcgttttcctttaaattaaaaaaagaaaaaaatttaattgtttttatttttggttttattttttatggtaggaaattttcgtaataaaattttaagaataattgtactttttacttactttaagtattctatactgtgtggcgtcgaacaaagcagaaattaaataatttttttggaaattttgacacagtttgctaaaaaaattaaattgaaaattttaatttttagaaaacaaaaaaattggatttctcaacccttataaaattattgattttgtaatttattttttattcaatacataatcattattttacaaaacaaatttttattaaaaaaaaaatttcttattttatattataatacgaaaaatattaaaagcatgttttatttttcacatttgttgttgtttatttgtcggcttcacaggaaatacagttttttaaatcaatttttccacgtattttcgttgggaaatcttataaaaattatttaaaaagataattttatgttttatttaaaaaaaaaagatttttttacaaaatgaacaacattgcattcattgcatttgcattttcagcgcttttcgaattcggtaaaaatttcagtaaaatattttttttttttttaatttaggcctcgctcaaccgaagccgacgcctgaaaatggtttaaataatttttaaatatcttgttttaatttaaacatgattatttattttataaattaaacggactttacgaattttttgtgcactattttcgagttaccaaaagttgagaatccttgaaaaatgtgaattaaattttcctataaagggctttgaaggacgtttaaatcgcaattagtaggccgaccataaagtttgaaatgttagagaagaaatcgaaaatcccgtttctcgaggatataaatttttaattgcttttttcaagaacaaaattttcgcttatgcaatatattgaagaaaaatagaaaaatgttttcatttaatttatacatattcag

SEQ ID NO: 4273 - DNA, 2007 bp, Heterodera glycines
  unsure (1)..(2007): unsure at all n locations
cataaagaagcaatcgcttcaccgaagaaaccgagtccaaaaggcgactgggaaagtgcattaagccaaaattttgctaaattttatcaatctccgaaacgaaaaaccgcaatttcgcctgtggcaaaaggtttatagctcaaataaattttcgttttttaaaatgaatttttttagtgaaaaatgttgaaaatacccaatcaccaatggatcagacatctgagattcatcgagaattggccaaaggtgtttaagcaattaaggataaatagccacaataaaaattaatttattaataaattattcaaaaatttaataaaaattaaattaaaatttatttaaaattttagagaaaaataaagaaaatgcacaaacatcaaaggaccagccgacatcggcgggtggtcaaaatgaagcaatcccttcaccaaaaaagccaagccccaaggggaagttgaaaagcgattttcggcctaaacttggccaagagcttttccacggccggttccgaaaggttacaacagtcatagggattaatttataaggatattcatcgagatcctcattctcggttctcgagttaagaaatttcttaggtttttcgtttctctgatccttgccttggctaggctgtcctaacaatttaaccatccctggtattaccagggaatgggttttttggatctagaaaactgtcaaaatatgcaggatttaggactcaaaaagcccttaaaaagaatttaaaaaatcccaattttatgggagggtattaaattggtcagaaaatttttttggcctttatatattattttgtttatttggtacatcatttttcattgaaaatggaatattttagcaaactttctgacgtacgccataataggacaaaattaacgcttcttaaatatttttcgaacctaaaaaactcaaaggtaaaattccaaaaatcctggtcctatttattcattcatccatttgatttaacagaattttattttcaaaacacagtatcattgacgcatttccttatccttatcattcatacgatttaggaaaaaaagttgaaaatacactatcatcaaaggactcggcatctgaagctcacaaagaattggccaaaggtgttcaagcaattaagaataactgtcccaaaaaatgttgttgataaaattatcccaaaaatataaattaattatttttaaaaaattttagagaaaaatgaagaaaatgcacagacctcaaaggtcccgacatcgatggaagggcaaaatgaaccaatcccttcaccaaaaaagccaagccccaaggggaagtccaaaagcgatttcgtcctaaacttggccaaagcttttccacgaccggtgccgaaaggttgcacagtcatgggcattaatttatatgcctctgggtccttttcttgattctcaagtgtagtaatttttctcaggttttttttttctgggtccccgttataggacaaaaaaaattctttaaaatatattttttggacctaaaaagctcaggaataaaagataaaaaggacttaaaattcaggccctatttattcattcatccatttgatttaagagaattttgtttttaaaacacagtatcattgacgcatttccttatccatatcattcatacgataattttagtcattttttgttacttttctttcactattatcaattttaaattaacattttatagcaaaaatgggagaagaagctcagtcttcaaaagatccgacaatgaatggccaaatttgtgcaatttgtttggatgcatcgcttatcactgaccttgaattgagcaaatgccatgtcataaaatgaattatttaaattggtagtatattttttcaaatctttttttagcatcgctttcaccgcgaatgcgttgatgngtggtaattattaactaattaatatttgcgtttaaataattgattgcaaggtttaaaacaatgacacgtgcccttattgtcgtgctgtagttgcaagc

SEQ ID NO: 4274 - DNA, 8092 bp, Heterodera glycines
attttaattatgtcaaccgaaattttgatactgatcaaaaaatcatttacatcaactttgtaaattatgtcataaattttggagaccattatttcgatttgctatttacataagtaaattgttcctattttgcatgtttatgcaaatttttagaactatcaaattttagggtggctttatatattggacacctatagtgtattctttattaaacttaaaaattatatgcattgatatttaataataataatttccatttaaatttaattaattttacattattacacaatttggttttcactttcatgatgtcggatacgcgatttttacatcacatcatgcagattgaattgaaacagaattacatcatattcacgatttttcatcgtatttacgatttttctcccatcttctaaaagatgatcctaaatacgatgagacgtcgtgaaatgatgggaattgaaacaaaattttacacgatatgacgtcatatcggagatatgacgcgaattgaaataggccccaggccgatcagccgaattaaaatgactttgactttttcatttcgtgtaaaataaattcaactttcttcactatattaaatttactcaattcgtttgggaaaatccaatacccgaacgcggtcagccctaaaacaaaatatgatcagctgatttttgaggtgccatgaatttaggccgaaactctcgagcaaaaattgtaaggcaaagaaagtgatcgtaaaatgtctctctaattaattgaccgcatttctgaatcatcggaataattattttcccggacatcacaaaataatcagaccgatttaaaaatgcaatttttgggaaccgttgaaaaacttgggcccggccaaccctaataaaaaaatgatcagttgaatttgcagtgccatgaattcttattgattgatcttctctgaatgatcggaagaattaatttcacggacatcacaaaataatcagaccgatttaaaatggacttcttcttgcgaaaggcttagccttgcttgggttgggcttagtccaaacttaggcttaaatttcccaaaatttttgtttggtacgttttaccgtttatctggtttataaacataacatatttaatatttatttaaattacaaccaaaattccatcccaatgaatcatccatcgttttgtccgatcacttttttcagtttccaaccacagcaaattgctgattatgtaaatatgagttggcattggaatgggctttcgctgggttggttggtacatattccatccccacccttctcatttcatttttccattcattttacattttttccaaaaattttcaaaccattcaaaaactctgaacaatccaatggagtttgcccgtcgtcgtcccatgctttccgcgccgttcggtgcactgctcggcgccgtcgtcgccgtcgccgttttgctgccgtcccattgcaatggtaaggcaaacaaaaactgttaatgtttgagggtggatggttcatggttcagttgaggagggcattcggacatttcagtcccaagccgtaactctttgttcatccatatttctccatttcagaccgaaaaagagtcggtccgggttcaacaccataagtttggtgtgttgcacaaaaaattaaactgcaccaattggtctgatcacacacaccaagggcgtagccagactcttggcttcggagggcgggaggagggggatcttcggcctcatgttttttcgccacgattttccaaaattttcaaattttgaaaattgtatggagattttgggtccggtggggctgataggcgctgccgggggaaattttgagatttttatgagatttcttaaaaattccattttttggatttcgggggggggagtgaaaagtgattgatgggcgacggggaaggaacgacggacgcggcgatgttatcgcattttgagtgttgcgagagactggcggtcgaagactgatgagcatttgctatttgagatggatgttggggaaagattagaaagaattgtgggcagattgccagcagcaaaatacagtggcaccaaaattaatttttaaatttgtgttccttggacaatttcagaaagggcgcggcattggcataatcttaaactttaaagtagatttaacccaatttttggttcaaccaattcaaatctctagagcagtttggttaaagaaacactttcatgattttcaaaattttagaaataactttctacaaaataaatatacattttttatattttctacgagaactagtacactccgagttccttttcggacttttgtttttttaggtgtccgacccattcggtccccatgcaaatgcaatttccttggcccattccgtggcccatttgctcggcattgaccatgacactttggagtgcacttgcgatgagagacatgacagtgtgggaatgtcttcttccccaacaattcgcaacagacaatgcataatgacagaacaacgacaacaacagaggtagccgatcgtaaaactgtgaaattatggtctttttgctgtttacagttccgccgtcgatgttctccctctgcacttttctgcctgttcaatcgctcgtctccactcgctgctgcaccaatcgctttccgatcagttgcaatgtctctttgtccgaccctttcaaacgtcgcgtctttaccagtgcgggaacggagtgttggacggggacgagcagtgcgactgcggacggagagaccaatgcggtgaggtgacgaactgaagggatggaggaagatgaccgtttatttactttccattctgtttcgttttttttacggcgtccgagagtcttgagttggacaactttcaattttcagtctcggaaattgtcactcgaaacaattttaaagttatggcaatggacctcaaactttcttttacagatgatccttgctgtgatccgttgagctgtcagctgaaggcccatgcccaatgtgcatgtaattcctctttttcccactcaaaatgatcgtttcatttctccccagcccatcaaccatgctgcgaacattgccaactccgttcttccggttatgtctgtcgccagtcgaagtccgtttgcgatattgcggaaaagtgcgacggaaaaaacggcgattgctctgccgatggtaatggattcatttaacgggtggtggtaatgaccgaatcaatccatcagagcatttggtggatggcgtcctttgcggactgagcggactttgctggaagggcgaatgtgtagacgcggaaaggcaatgccaggagttgtggggacaaggtgaacagaggggggggggggaagacgttcagttaaaatttgaaagagagggacggaacgaattgcgaaatttgtccctctcccaagcggatttgacagtgaaaaccgaaaatgtccgactattttgaaggtgcaaaacctgcggacgaacagtgctttctgcacaactctcgtggcttggaatacgggcactgtgggagggacgtggagggacggtttgtggagtgtgcgcgggaaaacgcgcggtgcggcgttttgcactgtcgcgggggcggcgcgagtccgctggggacgaacgcgagctcattcaacttgcaatttgctaaggagcaacggcatttgcaatgcaagtgagccaaaaggcggggaggtagaggtaattaccactaattgcaatacaatagtgctatacccaaaggggaagatgactgctcaccatttggcaattgcttgacacacattggccttgcccacctcaaaaagccttttccccttagggtggttgtcaattcagccaacggaatggtcaaagatggcaccagctgcggttcgggtcgcatttgcgtacgttctgtttgtgtaccgttaacgcaagtgtcgccgccagtgccatgtccgagcagtaatttggcactttcttgcagtggtcacggggtatgaaatggacgggaactttttcgccgggttttgtggttccgtcttccttccccaatacggggcctgtactcccccggccttaggactgcaccaccggtgcgcattgcgtgtgttttgacggatggacaggtccctcctgcgccctgcgaattccgtctaccgtttacaataaaaagattggcttgacatccgctgaagacggcagagaatccatcgaatttgtggtgccgccatcaattcgaggtgtttttcaatggctccaaaaaccttcaaaatcccccccccccccggattcagtgaatggtcgtgcgttggacactgccacactgctcggcattctgttgctggtcggcttcctcctcctcttgctgctcatttgtctgctcctcttttacaggtaaaagggaaagaccgagcctggcccggtatctggtttttgccgggcccgtaagccggctcggcaatttttgaaaaaatccggtttgaccggggttttaagaagctggaaccggtcattttttaaaatgacagccgggcccggcagattcggaaatctcggtttataatattttcatggtttttaggcgcaaaagttcggtcagagcgtacggaagagaacagaacggacaggcgaaagtggcagatgaggaggactgtgggaaggacgaagggactgcggggagagcgatcaaatttggacaaatgccgagctatcgggaggagaaaatgaagcggaaagcgaacaaaagtgaggagcaaagcgcgacccttggaataatttggcacagagtgccaaaactgttgttaagcatttaccaattcagaaatatatggtgccttgcagagaattacggaagcgaatgaggtgagaagaagccaaggaagcaaaaaactcagaaattttcaagaaaaaatcttagaaaaatttaaaacagtaattcatcataaaatttaaaaaaaacgtgaaaatttaagattttgtcccatccccggaaaagggggaccttaccatcttccatcataggccgactcactttcactcaaatcgcgcgagtcctcctgcgccggtgccgttctctccgtggacggacgaattcagacagcaaacggacagagcattttggcggaggtgccgtctttgtccccgcaccaaccgatggaacgaaggttaaattcggcaccgccttccattgtgccgaatggagaaataggcacgggttgcagaagtcggccgatcagtgacgacgaaatggggaaaaatgccacagaaatggtcagaagaatgcttaacattgagtcgaacattggcaaatattaccgctctttccaggcacatttcggtgcttttgcccaccacttgagaatgaacaatacatccccttcgtttggccctctcccttctcattttgagggagttggcacttttgctgcaccgcctccccggttgccacacattcaaatgctaatgcgacgattggagggatctatgggcgaagaatttgacgtggatgaggagggacacatttcgtcgaggacaccgtcggtgggcggcaacattccatgccccgcggcatccaccgactcgggccatcctggcagcaactttgacgtgagcggaatggaaagggtcccctaacaatgatgaaactcggtgcttctcgttaagatccgtgccgagtccccgtcactgttctcggacccgtacaaattggacagattggacgcgcccggatgatcggacgaactcaacagtcattccatccccgcctcctctcattcacttgcaatgcgtgattcacattcctcatcacttttaattaatttatttttgtatgtgaagaatctcagcgtctctttccttttttcccgcctcatttattttatattcttttctttttcgttcgtctaattcttttctaataataaaattgccaattaacaattctcctttccgactttttcaccgcccatcgctttttcggttaccggggaaactttgacagttgtgtgttcggccatgccatgggtatcccacccgtcaaatagcgcctcatttttgtttttcactgtcccattgtgttacactccattttcaccctctagctatatttccttctaaatgactgacgaaaaatacgtgcccaatcttgacaaagttgacgcggattcagtgccgccaacagaacgggtaaaagggataccaaaactaaaaatgggggcaattttctgcttgcgtttgtcttcccgtgaaatttcggattcaaatgaaaccaaaacagatcatccatttcaattgtttgtcatttggccaacacatcagaataaaaatgccgttgtaggagatcaaacacaacaatcccggacgccccgacaaagactatgacgaaacaccagtgggaccagcggaaggatatgtgaaggaaaaggagcaggagaagggcggagatggaaaatgatggaacggatagaaaatcggaaaattaaacgaaaaacaattagtgtattttcaggttttttcttgtgatctcgtctcgttctatcgaataattacagtagtacaatacatggcacatgcaataagtgatgcaaatctcaagctgcgggttcatataagtagacttgccactcatttttgctaagacttatttttacgaataaataaataaatcaacggggcacccccacaaagtgtccaagccacgaaatgtccaaaagagtaaaaacccacgaaatgtccaaaatttttcaaaatttataaaaacaaaatgagtctaatttaggatttttagggttttcggggtcgctgaatacgagcgtcaaaaaataaataaataaaaggccaacaattaatagaatgggtgttttttgcaggtgagatcgggtgcagagtttttggcatgcgcttcccatttcgggatcacaataataggataagaacaacagaaacactcactgatacactcatatttagtggtaaaaatttgagtgtgtcataaacagacattagcgcataaatccaaaacgggttcaaactatgttttggttatgttgctggagcagtgccaacatggccggtcaaacgccgctgctccgtacagttccattccgtcaatttgtgcattacagcatttttgcgtcattaaaatgtcatattaatgaggatatgtaccaggcatgacacagaaattccgatctccgactttttgggttcggaaagtggttttccgaaattttcggaatgccaatcttggtgtgtgcaaaagacaatttgcactcaatgacagtacattacagtacattttggctagcatcggttgatggtctcgctactgtaccctgcaattggttgatcagcaaagtcggatggtttgccagaagtgcgttggacactgaacgcgtaatgggaatgatgtgcggttggggcacaaaaatgccataaatgaaaagaaacgttatcacgcacaaaaaaggtgtgtgaatttgtaggaaaacgagggcaaagatcagcgtacgaacatattcataccactggcggcccaattcccgtcctccgcaaccccaaacttctcggtgtcaaattcctcccaccacttacaaagccatttcccgcagcctcctcaactatgccgctccgatttggactgcacaactcgccgactcacattggacaaccctacaacgttgccaaaattccgcccttcgcaccaccacgggttgcgtctccatcaccccggctgatcatctccatgccgaaacttccatcctctgttaaggaccacaacggtctactctcccgtcaatttctactggccacgcacgcgtcaaccagaacatccattctacacaactaccctccaccgcactcaacgtcaaatgaacatacccttgaggaacggttcatcgactctgtccttcgccaatgccgtggcaaagcatccaccgaaaacaaattactccacacacgcgccgttacaaacgccatccgcaacacccaagcaaagcgtgtcctcggctttcctccagcttccattgccatcaacaataattgccttcctcgcgaagttcttcgcacttggttggctcagcttcgctcgggtttctctctccccgcctcaacaa

SEQ ID NO: 4275 - DNA, 1620 bp, Heterodera glycines
  unsure (1)..(1620): unsure at all n locations
gtcaaagagagagtgttnttcttccccaatttttgttcaatgttttgctattatgacaaaacncaaagaaaaaagtgtgtttttggtgtactttgtttcgtaactatggttcggatgaattactttctttcctccgtttttctccaagccctcacaaaatacatttactcaaacattcattcgctgtgtcaagatttgttcgtttttagcccgaaaatgttcaaaacgtacgggccaaggcccgagtcgttcacgcttgacgatggggagcgttattatgtcggtaagtgtgtgtttgaagcggttttatgcgttcggtactctgtttcaattggtttacgagtgttaaattggtctgtgttcaggtgccgacgttggccaatacttgaaataccatcgtggtacgctgtacaaacgctatcctcaactgtggaagcgaatggcatcggtggaggagaagaagaagatccaggagttgggctgtgccacctcctacatcaactcgaacattatgctggtcaaagcgaacgaggtgatgatgatgcgaatttggtttcattttttgaagtgggaaatgaaaattgtatttttaaggaagccttttttaaaacaaatgcctttccaggtggaggacatttttgacgggcaagaggagaaatatcgcgcgtcggtcagcggcggcagtgcgtacggacgcgcggagggtgcgcaaacgctgcgaagtcggggcagtgctccgtggctgaaccagcaggtggcccaaaaaacaaatgtttgtcagggagaatgccaacgcttttttgcactgattttggaaaatctacgcattccaaaaaaaatacagactccttcaattaagcgtattcatatttgaaatcccagttttttttattattcatcccagggacggtcccagggtttttccttggaggtggtaccgccgcactaggcgacgaccttctttttttacttttaaatttgcatgaggaaggtcttggagggcgtaccaataaggaaaatcggaaagttttggtcagaagccgttttgttctttcttaggtgaccagcggttcccaccacctcgagtccgtgccctgctccaccccttcggcgcacgggcgaggccatttcaaaaatcgcgactaccccaaagtgtgatgagtacggcgaaataaagactggatgtgcattcgatctgtagtactgacgcaggtctggttcgtagatgtctgaaaagacggtttctgtggttcaactgcggtgtcgctgtataagctgaaagttgcttaacaatcttaattgttgactagaaggtcatatttcactacatattcaatggtgtcggcgaccaaccgagcaaagtacgaattggagtaacagatcgtgaccttctgtacggcggaagagtaggatactcggacgcctcttctggtgcaattgacttggtttcctatgcaatggaatgtaggtggtggatcgtgatgttctgaggtgattggacaaattccttgtgttgtggaggtttgaacgcccaggaaagtgacgaggatggccatgatcgtggtagtggtgcgaggaatcgcgataagccgagattttcgccgcgcaagaatgccgctg

SEQ ID NO: 4276 - DNA, 2136 bp, Heterodera glycines
catgtgggaccaatgcctggacaacgcggtccgattggagcagcgactgctgccccacgtgatctatgacgacgcagagcacgaagcgcatcataatgacctgtgagtgtggctttttatgagcggaattaatttacgaatatttggactcggaggagtgatacttttaaatccataaaattcctaactagcccgttttcagttaagggtccaaggctgtacgcaatcggattttgaattcgcttaaaccatattgctaaaccaattaatttaattatgaagttggtaaattttccgttaagactttgctggttttcctattcaaatctatattttccagagtttgctcgtgcgatgcatttttgcattatctaatttttttttcattacaaataggattttgtcattaaatgctaaagcgcaattcccaactcagaattgacgtcatccaacacgttgagcccgtccgaatcaccaacagcggactggagccattgaatggcaaactgaccgaattcatcaacaacccattgaacagctcggacaacgaagtcccggtgctgcctcgtgcaatcaccggcattaatcacgtgtaaactaatgttcaggctttattatttttttaatgaaaatgaaaactaagaattttctggagataaaatttcagcacgccttccttcgaccaaatcaaacaaatgattgaggcgatcagaacccagggcgactgtccagcggtggacattttggcaccggccgacaatttgactgtttacggtttgttttggacatcattaacgggggggggggtgcgctaactttggcattttgccattaatttgcctccctttaagacgcctttgtgtgcaaagtgttggcggatgtgctcgacattctgaagcgtcaacgtttctacaccaatttggaactgattgagcgcgacgcgcgtgcccggggggaggcgaaatggcaaaatgccgccgaagccgcaggggcggttgatgcatctgccaccggaagttcagcgacaactactgatggcaaagggacagcagcagccaagggggaggacgacccgttgatgttggctgggccgtcttcattgtccgtcgaacaacataaccttgtggcccatgtgacatccactcatgaaaaggcgggtgtacttcgtttttggaaaaaaatataaaacaataactttgtttgtccctcgtccatttctcattgtgcttttgttttaagtttttggaggccattcaaaagggcgaaatccaagcggagggtgaggacgctgtggcggacggcgaagacttggacgacgaggacgagtcgcattccgaggcgtgcagcgaagactatgtgagacaaatggagtgacaaaaatgagttgatgccatgccattggggacatttttgaatttttttttactgacagggtcaaaaatattttggtaccaccaaaaaaccaaggttcgctcatgagcatagggtgcgaaagggttgaaaatttaaaaaatcctcaaaatttgcattttggccacccaaattatctaaaatattaccattctttgtcaaaccagattgatttggcgtattcgtccagcactgatgcagttactgcttgcgatgcttcggttcagcaacaacatgaacaaatgaaaaaaacgaataatgccgacgaaaatgaggaacgaatggagacggatgaggacggcgtcaactcatcagcacaacaacagcaacagaaacaattggaaccgccgcaaacgacggcattgaccaactccaataatgatgacaacaaccaaaacaacgccagttcgtccgtttccagcgccacagcgatgaaagtacgccttcagcagcatcagttaaacaagctgttctccagcgcggcacgtctccgctcatcgccacgtaaatttttaaaatattttaatttcaaatttaattatgcccctatcaaattttgtagtttcattttaattggggggggggaggctctcggcaaaatttcttaaactttcatccgtttttttattatgatcgtttagcgatgccaccgccatcgccgtcgtcaatgatcaaatcggagaaaatagacctgacattggacgacgacgacagcagccatgagga

SEQ ID NO: 4277 - DNA, 900 bp, Heterodera glycines
ccgatgatgaagattcgatcatttgtctgtcggacggttccccaaaagcgtgcacaatttaatggtgttgttgatcttttacgctgatattccacactttccgccctccctccccccggccaacaaaaaccacacaatttcctgagctctctctctgtacctgtaatttttatgtgcgattgattcgcttttgacctcctctcattgtcagccttttttctgcccccccccccgtttttttgtcttccaatcagtccgcagaatattatactatttttctcatcagatatgtcacacagccaagctttttttgtcactaattcactgaattttatttgagtttctataaaaaaaaataccgaggaatgctgtctaaattattcatttggacattgattaattaattgttatttaatttaattaataaaattttgtgttttcatcatttcatttggtttcacttttgacgccttgccaaaaagcagatgaagatgaaaatttcggacgacaatgtcacgtcgatggtttgtgcaaaaaacttcaccgagaacagtgatcagatcaaccacatcaactacacaccggacgggtgggacccatttttaagttcttaagtgggatgaataatggtcgtgagcggtgggggacatccacttttttttgggtataactccttacattgttgtccgatttggaccaaattataattattcggtagccctgtgtgttctatattagcctgaaaaattcacaaaaatttcgttaggtttcaagtaaattgtgaccataaatgtttggaaatttgaaacctaacgaaatttttgtaattttgcctgctaatagaggacatttagagctatcgaataaattataatttcgtcccaatcgaacaacatgaaa

SEQ ID NO: 4278 - DNA, 1863 bp, Heterodera glycines
aatgacttggttgtctattccgaatttgctctctttctcatgaatctttctaaaaaaaattagaattcgactgggcctgtgtccaggcctgatttttttgtccggaaatacaggtcaaggccaaattgcaaacccagatacactttacctgtccctatttgtttgaaaacaacaatggtttttgaaggagtaacataaatttgggaccgaattccatttcgtgttttatttttcagacacaattcgctacctgtccctgtacgacaacaaatacttgcgctattttggagggcacagcaaaaagtggggccgccatttaaatgccttttattcatatgtttgtttgttcgtccatctgttgttctccagggtggtcactctgtgcatgtctccgttggacgacctgttcctgtccggctccatggacaaaaccattaggctatgggacctgaagagctccaattgtcagggcctcatgcaactcgtgtcccgtcccatcgccgcatttggtcagttttttttttggacggtcggtgaggaatactttgtctcctaattttatttaaatttaaatgtaatttaaaaaagtttttaatgctttttgattttcgaatttttaaaaattctctaattaccttcgtcgaccattgtccacttccccgctgggtttttcttattacgaaaattggattatgtcttacaaattgtggttttacagatccggaaggtctgattttcggcgctggcattggcaacgacgtcatcaaattgtacgacttgcgctcttttgacaaagtgactaacaatggaataataaatatggggattttgaaatttaaatttgtaatttaatatttggaaatttccaggggcctttcaacacattcaaaatcaacgacaccggactgaattgcaattggacaggcatgaaattctcgcccgacggaaagtctattttgatcatgacggacggtggtatgctgcgacttgtggacgcctattacggcaatgtgacgcacacgctgtcccacgaaaacccaaaggtagcgagcggttcaaaaaatgaaaaataacgggagaatctgatcaaattatcattccctctcccccgtttcaaaattggaatattaaatcgaaaaagggactggatttttgcggtagtcacccgcctaactccccaaaaggcgtaaaattattgttttttcgaatttagatttttttaaatttcagttagactaaataccttctaaaaatactcctacttgcactcaagttttcgaaaaaaaattccaattccagtccatgaatttgaccaaaaataacaaatagaagaatgctatgaaaattttccccccctttctctcgaaaacagaatgtgaatttcgtggccactttttcgcccgacgccaaatacattttctgcggctcgagcaacgggaagatcatttgctggtcgacggtgggtgttttgtccgacacaaatttaattatttatttttgttttgaaggaatctggtcgaaaaatccgcgaaattcccacaagtcactccggcaacatcgagcaggtggcgttcaaccccaagtacttcatgttggcatccgcctgcacgcaattggtgagcagaattgggggggggggggcaactgggccccaggctggtttttggggtataactcctttcatagttgtcctaattgaattaatttgatagccctaacaaataagtgttttctactggggcccagtcgtgcccgtccgatgtttggcataccttattcgtttttccaattaacattatgtaatgatgacctgaaatcggatttttattgggtcagaaattcgacgactcgtagatttatgtc

SEQ ID NO: 4279 - DNA, 1229 bp, Heterodera glycines
acgtgcccagcgcaatgcaatacgcgtggaggggaaatatgttgcaaaaattaaaaaaaaaagtggcaaatgttttgagttccctccccctcccaatttgtttttagagttagggccccagaacagaaaaaaccatattgggaaaggcgaaaaacatttttttaaatttatataaacagaaatttttctaactcataagactttttctcataagaaaatttcgttttcttgcgtttttttaattttctaaaaaatttttcaaaatgtaatgcacccccataacacatatgtttttctgtgattgagaagcattcatttctaatagacaaaaaaagagaggcaaacttttgagggaattggaaaacccttgaggggaaattaggtaaaaatgtggggaataaaattatgtgtttatatttgtcatatttaaaacagcaaaaaatgcgcacgtcgcatttcaaagcgtggccccaattcgttcagttccaccgcccctcccttttcgctgtcgattttccaactgtgctggcggaacgaaacgaagtcgtcggtgttggcaaaagtgaccacccgacgcgcgtcccgcttcggcaccgggaaaaggaacttcagaatgttggcgatctgcacaatgggaaaagggaaagaaaagaatgcaaaaactttaattggaaaacgattaaaaaaatttttttttaactttttttgggcgggtttggtggggatttttaatgcaataaatttcaaaaaccaacaaaagtatgttcaatatccccataattgcagtgcattttaatttttatggagcagttagttcccggtcccctttgattattttttaaaaattttcaaacttagaaatttcttaaaaaattgtagaaaatctttttataagaaaatttttaggggtgagaaatgaagtgcacccatttaatccgaaagtggtttcgtcgctttgcttacgcgttgtccgaccggcgacgtcatttgatgaattatcagatgggggtactgctccgtcatgtgctccttctttgttttgctgtcgtgtcgcatcaaaacattgtgcaaacttaaaaattattacctttatttctcttgaatttgataaatggacaattaaattgggcattttattgttcaaaaatggaacattagggccagcaatgtttataaactttgaaaatttgcagggttttacagtaatattatatctcgttccaatccct

SEQ ID NO: 4280 - DNA, 964 bp, Heterodera glycines
  unsure (1)..(964): unsure at all n locations
gggtacggggttcggcattgatcgaaatggatgtcggattcgtgatcagcgaccccgaaaaccccctaaaacctattttaaacacttttaaaaatttttttttttggaaaaaaggaggtggggataaagtatactattaccgtcaaaacatacatttcaatattttaatgataattttctaattggactacaattagttttgtaaggttttttaaattttgtatttttatcgcaaaatttcaagcaaggagttatgaattgtccgattttagtaaagaattgaaaattcattctcctttgtaccatttccgcggcatccctgcgcagatcggtgggcagcgcactgctcgcctccaacgaatgtttgatgcggtcgcgtctctcctgcgtcgcgctttgtcgcgcctccaaacttttccggtagagaaactcgcgcctttcacgcacttgctttcgcagcattttttaagcttaaaaaggcaggatttaaaagaatttttctgtgagttagggatttttcaaaattattgaattgaaatgaatttttcgaaaaaaaaactaaattttgttttaaattatgtatttggtataacgatttggcgtaatattttaaaatttaaatacaatatttcaaaattttttagaatttttgcaaagaattttacacaaatttattcataaattgatcatggatttgtatctgtacatatttcacataattatatgctcatttaaacatagtaaaactgcacccatttaacatgaaaatcacggcgctagtctaaaagcggtactttttgaaatttttttctacttttttttggtcgaattttttttaaattttttataaataataatgaatattaaacattaacaacataattatggcgagtaaaagtatattcacgaattttttaattagcgtcaaacttcttttaaaaattatttatgcgtaccantatat

SEQ ID NO: 4281 - DNA, 1694 bp, Heterodera glycines
  unsure (1)..(1694): unsure at all n locations
ctaaaatgggagaagaactcttaaagctaaaatgttactttctttagagttttcgctctctgctcaggattcaaaagcataccgtccgaattgatcagagaagacaaagccgccgacccattttcccaggaaagactgtaagtggccaacacaaggccaatgacacggaaaatacgggtgacagaagggaaaaactaaacgaatagcataaatggcaaaaggctaacgaaaaagtcaaataggcgcagtcggaaaattttttttgaaaattgctaaatgcaaaaatattcttcggaaagtgatacctgaaagccgagaggcctcccgtaaaaacacgacccgtcaagactctcgatgcctttgaaaagaatattgtattgttggtaatccccttccagcggagggaataacgagccaccatccagccggttgaacaacaaaactacctgaaacacaaagatttaaatttgagggattgtttaggacacgaaaaataattaattcgagttaagatttttgcaatcctttatttatatgcagcgtcccgaaatgataatgatatgccacctgttgatatgccaaaacgagaaaacgaagaattgccgaatatgcctcaatttctttgcaataatacgccaaacgaaacattaaaattccgcgactttcggaacatatgcgaagaactgaaacaagatgaagaaggacaatgtcagtgatacacaccaatgaactgaaaaaagccgtaagtttaatttttaaaatgaattagacgaccgaaaaccatttccaggagtgttttcgtcgtaatcgcatttctgagaagcaaattggagtttgcgaataatttctgaaaggaaatggacgtcactttacattaaaaactaaaaaaatgaaaagagtgaaactgaaatgggaccatcagaattattatttgtattgaaacaggcaatgaaaatcctttggccaacctcgcatgagatcagccgaagcagaaagatcgtcacagcactcggacatgcgcttgccatagacggatgagctgcagttttggcgaaagtatgtgaaattgtcagtggccagcttaaaataaaataaaacatcaaatacatatttacaagtaattatttattacctgcttcaaaagatcaaaaacggcattccgttggacagataatttggaaaccgaagaccgtttagtcgaaggagtgcaattagtgaatttgttgtttattggggttttcatagcaaacagtcaaaataattcccaatctgagtgtaaaaatgaataaaaccaaccgaagcactttcatatgggacaacagacaattttaatgttagggctgtgaagcgactgccttttcatatgaatgaaaaataaacaaataaacggaaggaatgtttctttgaaaacacccttatcttaggtagtcacaaattatcctttttattcactttttgtccttttaaataaatagtggtgattagtagggatcggatttttagtgataaaaatcccaaaataattaactaaatagtgagaaaaaaattccaaaatagtggcaaaaatagtggcgaaaaagttccaaatttaggggtgtaatcttatataataaagttgattgtttgtccggatgtgtccatgttttgaattagtgtggcgttttgttttgagtttgcgttaaaaatganttgaa

SEQ ID NO: 4282 - DNA, 3212 bp, Heterodera glycines
  unsure (1)..(3212): unsure at all n locations
ctttttaattttctgtgcttaccaattcaaaaatgtcggacaatccgaaagaagcggagaaagaaatggaaaaagcaatgtaaataattttatttcaatttaatttaatgacaatcattttgcttttcctctttcagcttcatcgctgccgactgttggttggaggtgttcgatttgcttccgccatctcaacttggccttggcattgcgatgattagccgccgttttgactatttcatcgacgaacatttcaaaacgcgcaaatggaaattgggcaaaatgaaaattcgacgcaaaattggacagaatggcgcaaatgaaatgaaaattgtcaattccaatggaaaagcattgcaaatccctcaaaatccgttgccgaaaaaagtcatggcattcaaaagcattgagatcgagtaaaaaagaatttggaaatgatgtaccaatcaaattttctgattttcagcttcatcgaccaaaatgtgatcacttttcttggccattttcaccgttttttcgccgcatgctcaacaacattgtctatcgatactgaaaatgttcgcgtttcggagttcgttgttcgcaccatttggccaatgttcaaggacactatctatgacaccatgttgatccccatcgcttttcgtcgaatgcgccaattggtcccgtcaatgctcaatgattgtcagtctcttcaatttgtgtctttcgatggcgccatttccctcgaatttccgcccgacgacagtgccaatgcgacggatggccaaacggttgccaaatggctgttcacgcctcgtcacgataattttccgaagaagctcatatgctatatgaattcaaccatggaagtggaacaatcaaagcggtgatttgtctaatttaattcgtttttctaaatatttgttttttagccattttccgctgcttcttctcctgtttctttcgacatttatatagacttttcgctgccctcttcactttccttcgttgtgccatttgaattgaccaacgaattcaccgcgggaaaattttaaattgtccaaagaagaggaagaagaatattttgaagatgaagaaaaatattacagtcttttttcccttagtcgttgtccaattgggtccgatgataagaaacagcagaagttcgagaaattggacgaattgtacgaccgttggaaccgaattgacttttacattggagacgacggagtcggcgatgggtgattaacaatttttgttaggcttaaccaatattttgtaacgtaaaaacgcaaaggaaatgactgtgctaacttataacactgggatggatggattaattggtccaaagctgaagaaatagcatcagatttgttgacaccccaaaaatagcaaaaattattaattttcgcatggaaaccccatggcctcgcattttgaggagactcaacgaaggcagaaccagcaaccaaaagctatttggtaccgaattttaatataattccttatacaaatgaactggacaccagagccgttgggcccccgtttttgggccccggggcaaattaagaattcgttcatctgtcgccaaaaactttcgcttttttggtggtggctcctctccggcaatgaatgacgcgtatttgtctgctcacgacgtagcacgtcaatgaagtgaaaaatcgacgggtgtcggcaattgaaggcgccctgtagacgatgatgctcctgttcatcgatcccgtccgtcggtgtgtacgtctgatacgccgggctgattataagctgctcaagatttgcaggaacgacggggggcgcattcacttctcggccaagtggcgagggatccctcaggcttagtttttagaatcttaatttttaaaaaagcacatttttcgatttttgggttggggcccaaacgaccccggggcccaaaaacgggggcccaaacgcgggggcccaaaaacgggggcccaaacgctctggtccctgatttttttatggtcggagatcgaatggtataaaaatacttttttttttttttgctttttccgccaatagatgaaaacagatatttgtgcaaaaaatttaaaacaaaaatggttaatctttatgttattctttttaaatttttatttaaatttaatcgtataatttgattcattgaaccgtttcttcctctaattgtacgggcgcccggaaaatgcgtcagtagaaaatgcgtcagtgaaaattttattgtcataaaaacaagttccttgcgttttcagggacactgaccacgaatccggtatccatttcggccaattccgaaccctgggcccgaactcgaacaaaaagtcgaaaagtcaaaattttcgaaattaggttttttcttaaaaatcggtttaaatacacggaaacaaactgaaagccatctatccttcattaagagatcatttatgccgtttttgaaccaaaaatgctaattttgaaaattttgactttcgtctttttgtttgagttcgcgtccggggtcgaaattgagaacgattttcttatagaagtttacttctatattacaatattaatgccatagaacttcattttaaaatatttgtatcactgacgcattttctactgaccgatttccggtcacgattgtacgtccgcaagtgttccactgcaatttttccatttatttgttctttttaggcggccacattcaggcccttttgataattagtaaaaatacatttaaattaatttaaatttcgaagcaattgcatgtaaaaataaagcacttttaatttcttggcttcaaatatttcggcttcaactattttctttcaaatatgagaatattatttggctggacagatgcttcaacaacttttgcaagcccatggaaaagagaaagttgctgccaattctttggaccagctaaatttacgattagagaagttggaaggtttggtggcatcccttgtcgcacaaacggcaacaaatcctcaaaaaattaatggacacaacaacagcactcccacagttgcaccaaaaattccgtggggctgtcctccgcaatttggtccatcccaaatcgcgcgaatgctcaacaatgccatcgtcgactcggaactgatcaaagaaaagtcgaagcgagcagttgttgaacgcctgccggggcacctcaatgaaaaagacgntgtcaaacaaattgctgaagaatgtggtctgctggacgaaattgacct

SEQ ID NO: 4283 - DNA, 5342 bp, Heterodera glycines
tgagctacgggcgcctcttttagaggttctctcaggtcctttatcccactttctcccacactccgttccttctggcatcacagtttagaaaaaccttttatttattttaaaaattattttttggtattattcaactttttggcattttaagaaaatttctttaaaaaatctatgccaaatacagtgtaaatttcttatttttcttacatatttgctcaaatttcggaatttttttttttgtaagtaatttatcaattatttcgatattttttaataaatctaagtcccagtcctaatcatgattaataattattaacagaaaattaacatttttttttgtatattttgatgatttatttgattttttacttcttcaaaatgaataatgttttgcttatttttaactaatattttttaataaatctttatttgtgtatatttttttcattttatatctaaatcgatagtttgttcaataatacctaatcgaagcgcttgtccacactctaattaatctatttaaatattttttctaatcataaaattatataataaattttaagttaaattaccatttttctcatttttgttttttgtttaagaaaagaagcccagagataactttgtgaattttattaatttctaataaataatttatttatcaaaagccttttctttagaaaattagtgatttattttcatgttttgtatattttaagttaataattttctttaaacctaatacaatcgataaacccttttctctcctccaaaaaatcccaaaaatgcccaaatctaaaagacgacacgacgacgacttggcgaacacttcggcaagttcgtctgagcagcaattcgcggcattctctcaccgaattgacaaccttgaaaagttgcttcaacaacttttgcaagcccatggaaaagagaaagttgctgccaattctttggatcagctaaatttacgcttagaaaagttagaaggtttggtggcaacccttgtcgcacaatcggcaacaaatccccaaattaatggatacaacaacagtactcccacagttacgccaaaaatcccatggggctgtcctccgcaatttggtccatcccaaatcgcccgaatgctcaacagtgccatagtcgactcggaactgatcaaagaaaagtcaaagcgagcagttgttgaacgcctgccggaacacctcaatgagaaggacgttgtcaaacaaattgctgaagaatgtggtctgctgggcgaaattgacctcgacaatgttcacagacatccgcggacggcacgtgaggaaaatgcaaaagagaattgttaaaattcccttttcctcccaaaaatcccgcaatttgttcctttataaattccgctccacacttctcaaaatgcctgtgattcctcataatttgaccgctagacgtgatatgaccataaattaactacaaatattgtatgacctccgaaaaaaggcttttgaggcaaaccaggccgctggcgtgtataaatacatcgtcattgacctggaactcaaaaccttgtccaacccaaaaccactcaggactagggtttcgtaggggtgcgcgagcaaaccgcaaaaaattataaatgaaataaaaggtttgcttttcaatgctcgctcactctctaacaagatcccagacttaaattttgtaattgaaaataagcaaccaaaaattctaatcatttccgagacctggttaaataccagaaattcgatttcatcagatttatctataggtggcaaatatatacccattttagcaaatcgggtaagtaaaagaggtggagggtgtgcaatactaataagtactgatattcctatgcttgaaattttttctgggacaaaatttcaatgtgaaattattcacattaaactttgtttagcaaaagtgattcacatttttgctttgtataagccgcctcaatgttctacaccaaattttaaaaaattattagattatattatggaatttaattataataatattcttatctgtggtgatctgaatttaccgggaattgattggattaattaccgaatagagaacaataatcattcgaaattatttattgattttatagcacaaaaacaattggttcaacatgtaaaacaaataacacgtggtaacaacattttagatttagtgctctcaaatcctaagcaattagtttatgacacgaatgttacagaaagtttttcaacatcagatcaccacatgattgaatttaaaattaatgggagcttttcgatcaccaaaaaagacaaaatttatattagagagtttaaaccaaaaaattttctaaaacttagaaatatgcttcagcaaaaacgcattgacctacatttactgaaattatttaaagttgacgacaaatacaattttctcgttggcgaactttataattcctttgatcaattatttcctaaaaaaatattaagaaaagttctaaaaaccaattatccacaaaaaataaaaaaattatactccgaaaaattaaaaatacacaggcttattagagaataccctgatcatggacaacataaaataaaatacaaaattttaagtaggaatctgaaaagggaattaaaaaatattaatgataagaaagaaagccaacttgttaataaaggcaatttggctatttttaaatacatcggcaacaaatttaattctgacagagaaataagattgcttttcgatgaccaaggcagaatttacactgaggataggcagaaatgtatgctttttggtaaaatatttcaacaaaattttatgcaaagaaattataatacgaattatccaattaaaaataatataaatagcataacagatatcgaattaaatgctgccttggtctggaaggcattaaggaaattacccaacagaaattcaacatccccagacggtttaccttatatattgattaagcaatgcgcagatctattggcacctatcataagtgaactcttccgaatggttttagattatggggaaatcccaaacttatggcgtacttcttttataattccaatttataaaaaaggagacaaatcgaatccaaataattaccgtcccatctctctgacatgtactttatgtagggtttttgagcgactattagtatggaatattgttaaacatcttgaaaaatataagattttaacagatgaacaatttggttttttgaaatccaggtcgaccaccacacagttgttggtctctctggattatttttataaatcaatagaagatggacaaaatattgatataatttttatagattttgaaaaagcatttgattcggtgccaataaatttgttaattgttaaacttcagaacataggtatttctgggaaaatactgaaatttcttcaaaattttctaacgtacagatcatatagagttaaaattggagagtattattccgaaagttttagaacttattccggtgtcccacagggcagtgtcctcgggcctcttctttttttgatttttataaatgaccttactaattatattccgcctgaagtcggaattaaattgtatgccgatgatgttaaaatttacatttcgcatgataatgacgcgaaaagggatttactctctttagcgttggctaacttagccaaatggtctaaagataatggcatagcaatttcgcatgaaaaatgcgcagtattatatttaggaaaaaataatcctaaacatgagtataaaattggcgagaaagtaattttaagcgtagattgtgtccgtgatctgggagttttggttgatcaaaagctctcatttaacaatcatatttcaaaaattttaaaggcggcttatttcaaggcatatcaaattttaaaaatattaaaaacaaggaatatcagtaccttaatcctagcatataaaagctatataagacctcacctcgaatacgcatccgaaatttggaatatctcctcaaaagaacagagtaaaagaatagaaaaggttcaaaaatatttcacatgaatcgtatacaaaaaatgtggcctcaaggcaataccatatgaaaaaagacttgagatttgcaaattggagaaattaagtactcgaaggtcgctcactgatatgaatatgactttcaaaaaaattaggggcttaactcatttagatccaaaaaaatattttgaattttcttcaaggtcgcaacgaaaaacatttaggattcaaaacaaaagatgcagtaataaatctcgaaataatttttttattcgtacaattaatccctggaattgtctacccaaaacggctatggaaatcggaagtttagctaaatttaaaaattttctgagagaattttatttagaaaataagtcctgagtggtaattcatcccttttttattttattttatgtattttactgtattgaccatatcatattttttttttttttaaattgtattcattactttgttttccgctataagtgcaattacatgttgccttgcggtttgctcaaataaataaataaataaataaaaattaattgttattctaacaattttattataaatttaaattgggtttttataaataaattccgatttccctggattctatattctctaaaacatagtaggaaaagcatttacttttgttttcagtttgctaaaaataaaaaaaagattatatttttgaaaatttcaaaaattgtcataaacttaaagaattatgtaacagtattccctgttatcaatgttgattaaagagattaagtcaatggcaactcgtacaaagaatcgtacaataaaaaatttaagcataagctaaagactaaacctaagcctaaagcttagatgcttatggccactgtagtcaaatgtgcgctcgttttagcgctataagcaataccaaacccttaaattttaagggatttttgcgaactttcttcggattttgaaccggtacaaaaggcaattttaatttttggcaaaggatctttttagtcatgtttgggttcatatgagtttgctgggaacaggatttagctgattttattaacaatactttttcctagaatcaatcgagattttcaaattgcaataattttttttttaaatatttttgtgcaggcttttcttacataaaattattaagaataaataattttaaacattcgacaaaataaaattcctttctttctcatataattcccgatccaatatggcttatgcatgtttgcatccatatttatttctattaatctatccttaagtgatttgttatttagtatcacttcgtccactccccaattcagttccgattttctccaaattttgtc

SEQ ID NO: 4284 - DNA, 5250 bp, Heterodera glycines
tccaatgtgagcatttcccattggcatttgctgccatcagtgccaaatgtgtcgctttgaaacaaacaaaaatggcaaaatgtcttccattcttcctcctcttttctgccgttttgtggttgttgttgtcgtcttcgtttcgctctcaccgcactgattgcgctctgtccgcattctgtgcaccaaataatatcagcaaccttcggttgcccatttaattcgactgttttgttggcattgtgcccgtctcggcgaaaatgttgttgccggcggcgggaaagcgcccgcaaaaaacgtcgcttaaatttggggaaatttaaaaaaattctgcgttcgtttttttgaagtttatgagtccgttgtcgtccccaattgagagcagaaccttgaacacattgaaaagtgggacaaaaaggaagcacaattggacaaacgaatggccaagcagttcacggttcagtgccgtaaaattgagagagcctaaaccacgagacaattaaattcaattggcaaaacgtacacaattggagcaacgggattttgaaaaagtcgtgattcaagaaatgttaccaatttttctctgataaaatgagacgggatttgctttttgtaaaaatccgagtagcaaaagcggtcactacaaattgtacatatttgcttaccaattgtcggtttctgcacataaacgggtcgactaccaaacagtcgttcggtgggtctgtaaaatttaagtatttatttgagtttcatctttttttcaaatgtctgatagttttaataagtgaaattggaattttgactttttgctcgaattttgggtcaggggtccggaattggtcgaaataaatgccggattcgtgatcagcgaccctgaaaacccttgaaaatgttttaatcttttggaaaaaaattttttttcgaaaaatggggagggaggttgggataaaccttactactacataaatctgtagccgtttttaaattgccgattttttttttgctatgtgcctgaatcttcgctaccttatcggcccaccctgcgcaagaaacaggcaaaagtggatgaagtcgaccagtcggtgggccgtctgcgccctgctgtaccaaagctttaaagcggatttttcccttttgtggactttttctttattgacaaataaataaataaattttcggaaacctgaattctccgatcgaatggtctcagtttgacaaaaagggcaacaaatgatggcaacaaaaaacagagcacataattgatcaatgctttgaatgttgttggaaaattggtgcgaatttggagcagccgctggccgggactttggcctaaaatttggaagaaaaaaattgaattgaaatcggaaaatttgggttttccggggtcaaagaattaattacacacattcatttcgacccaattcgtatcctgaaccaggatttaaacaaaaattgaaaactcggaaattgtttcaattttcgtgttttgaaattcggcaaatttgggtttcctgggtcgaaggaaactgacaaacacaaaaaaaagaaattcgaaaaattaacaaaattctatggacctgttagaaaatgggataaaaaatagagcggtgcgatgcattcgcgaaagtgttgcttgtatttggagacaatgggcgccaccaatgtccacaatttggtcaatccgcgcttgtatcaatgccaacaaagtgttgtccaacagcgcggcatcaatttgcacagcgcgaagagcgccgaactcattttcgtcgtctttcatcttttcttccattgggaaaatagggaggcttttgaaaaaaaatttttgtttttaattttaacattaaaatcagtttagtcatttatttcaaaattgtttatcaatcaataccaaaattagtgagagtacgtatggtcgcaaacaaaaaaaatatgtatgcagtgaaaaagtgacaaaaattcattcgacacaaaaaatacgcgcaaaaactcatttccatttattcatccaaccatttttttgtttttctgctctcccaaatctcagcctttcttctctctctcacacattgcacgtctgtccatttgttgtccgtccattttgctcctcaaaagaagcgctccacgggcggcggttgcggcgacgcgtagcgatggcgcttcggcggtgtcggcccggcaccaccgcggccaccgcctccgccgtacagcgacgtgttgtagtgaccggcggacgccagtgaagagccgagcggaggcggctgctgttgctgcatcatcccatgaccaccaccaccaccaccgccgtatgacgtgccggcggaagcaccaaaatcgtcgtaaccaccgccgccgctactgcggcgcatatcgtagccaccaccaccgccgccaatgtcacgttccttggacaaagaaaaattgaaaacgaacgaattcaaatatgttttttttacatttatggaggcactgaagatagagtaaaaatgaaaaaaaataaaaccaaagatactgattgtgagtaaattacgtcaaaaaaatttcactcacattttcaaaatcaacgccccaaaatttgcaaatagtaggctatatcagcttggtgaaagctgtgaaacgaatggtaccaagttttttggatttagagtcaacaatgaaaaaggctaaaaattgactgctcctaatcagactgaattggccaaaacggagttggcccccttcttcaaccagtattggtttcgcaattttactatttatttataatgcttaaaaattaccatcccgcgctgctggtggtaacctcctccgccatacttcggctgctgcacctccatgtccatcagttggcgctgactgccacgccacgactccttgcccagcggctgatgttgctgctgctgctgttgttgatgttgcggcataaacggcgacgccatggacatcagcgaggggccgaggacggaatttgcgttgccgccgccaccaccgctacgtgacccaccaccaccactgctgaccatcatgtacgaagattgctgctgctggtgttgctgtggttgttgttgccattggtagtggggcggtgaatggaacggcgcaatgccaccgccgccggcacgaccaccagccataccaggcgtggtgagcacggacgaggcaacctggcgctaaacaatacggggattgggttaaaattgttaatccaatccatacataaaaaaggggggtgggtcggaaaaattttttgcgaaggggggtcggccgcagatgaccttttttgcctttcaaaaaccgtttttttcggcgcgctttttccaaaaaacttttcgggaccaggggggccggcggtgccgttaggcgccgccgggagaaaaatttttgctctttgggtgtgatttgttaacagattttcaccaaaaaatggccaatttttgcgattttgagccaattttttaagaaaaataggaattttggggttcggcggtgccgccaggcgccgccggggaatgttttttggactttttaatgaatttgttaagaaaattttcaaaattgcgaccccccccccaaaaaaaatgtatgtgtgaaacctccggcaggaattattaatttgtctaattaccaattaaccataatttaatgccttttttacagttactcaaaagcacaattatttgaggaaaatggacgggcagcggctgactttggaaaagtcggccagcacgaaaaagcccgcccgcggcttcaagcagcgcacgcccatccgctggagggagcgcagcgttcggtcccttgcctcgcgcatccgccgcaaattttccggcagaaaaaccctttcgacccattctgaaagcagcaggaaatttgaccaaatgaacagaaaaataaaatattttaattatttaatgttgaaatagttgtgtcgtttttccatttcgaaccaaaatttcagattgtaatgatttttggggccttcctcatttatctcccttaccatcttaattccttcttaattgtttcctcagtttcatccttagagaatccgtaattcaactaattattggtcaattagcgaaacaattgttaattaggcatgagtgactgcgtttacaaatttcctctattcttttttgctttacccaccgtggtcatccaaaaattggcgcattataaattgggtggtgcaattcggcaaatggtgcatcataaagcgagtgatcgccgtccgcacgagcggattcggcgagtgaatgaccgccacgcgaaggccgggcaacgaaaaattctgaaaatcgcattttgacattcggcggagttctgaaaatgaaaaggacactgatgaacaacgagattctcgaaagtttcattcagagtctcgacttcttgaatttggcttgtggttggttggctttttgtcctaatgactgttgttagccctttgtcctttttgttggccctttgtccgttttgttggccctttgtccgttttgttggccctttgtccctttttttctcatttttttttctcctccgttcccttttccctttctattttttgcttttgccttgctcagtccccacagccaaatcagcttctgtcggctgcgttcgtcttcgaacagttctaccgcacttcgaaacggacattcgttgtcctcgtcgtaaatggacaaatcgtaaatttcgtccaaaagcacgaacaaattgcgactgtaattgaacgaatggaatgaaaaacaataggcaacaaaacgccaaaatgttcaaaacattgcctcagggcccagtggacgaccggccgaatttcgtccagggaaaagtagccggcctccggattttgcgggttcaccagcataatggccctgacttttccctaaattaaaaaggggcttaacaacgggaaaaaattcatgaattttttatttttaccaaaaataatcaatttgagagatatgttgctctttttagcggttattttggccgctttaaagggtttttttaaatattgccttagaagcttaaaaccaggcataaatgcctttttgccatttccattccatgaggaaaataaaacatgcatttgagtgcatttccatcaccaatttaacaaatttcccattaaaattgggcacttttggctggggagtgggacctgctgttggtgctgcattattaagtggtacacttcttcaaagcgttccgctcgcagttccgtaagggtgccgtcctcggacagtgccggcacacagccaatgt

SEQ ID NO: 4285 - DNA, 1186 bp, Heterodera glycines
aaccctccccccccccccccttttcgctggcccccctttgcggagggagggggggggggggggggggtccaacccccccccccccaaaaaatgtatgatccaatcatagagacggtcatataaaaacacattgaactttgttagaaaatttcatgaaagatttttcagcgattttttttagtaattcatcatcaatgctagaattgttcatgttcccaatgtacaacaaaatcaaaagcccacctgaatgacattgtgaatttgctcaaagacgggcagcacaacaggtgacggctgattacgcttaaatggtagaaaattttacaataccccatccatcgggtgataaattgctctaacgaatcttaccaattcgccaagtgaacgtctgctgggcgcaagcgaaggcggactgctgccaaacaccgtcccgctggacatgggccgggagcgacgctgcgcctgcgaaaactcgcgcactttcttgtcaatgaacgacagcaacggcatttggtgtttctgtaaaattgggagctgcgcgcgataagccaaattcccatttttcgaaaatttttttaattaagacaaaaaatcagcaattttggacgcattttcgaataaccgctttggaattgaattttcggtacttttgcagtttaagggaccgatttcacatacattttcaaatgccaataaatgtattcattttacattgttttttttaagcatggaaactttaaaagaatttaatattcatgatgtatttactctgctgcaaaaaccagacgctgaatttgaagaatggctccgagaatcaaaaaccatggaggacaaagaaacaaaaaaatagtgaaacgggtcagcacaccaatacagttgaaggaggaccttggcagaaattcaaagcggagcacaaaaaaagatatgcaacacacagaagtttattgaattcttatgtggaagagtttttatggcgcaaacgatttcaaggacctgatattttttattatttttggtcgcaagttgctgctatttatgaaatttcgtgaataaatattatgattctgttttattgaggttaaaatacttaaaaaatcaatgtaaaatgaatacatttatttgcatttgaaaatgtatgtgaaatctgtcccttaaactgcaaaagtaccgaattttcaatcccaaa

SEQ ID NO: 4286 - DNA, 2174 bp, Heterodera glycines
  unsure (1)..(2174): unsure at all n locations
attttttgcctggtgaagacctttttttgctcttcgggtcaaacaaatttttcttcagtgttattaaaaattttgaacccctattcattttaagattttcgtttgggggcgggttcccagttcccacccgggcaacaacttttttgcggcgcttttttcaacaaaaaaaaactgagaaaagggggtctggcggtgccgataggcgccaccgggaaaattttggaatttttaatgcgatttgttaacgaattttgtccaaaaacgactaaatttttatatttttggcaaattttcaccaaaaaattaccaattttatgcttttaagccaaattttaaagaaaattatatacgagngggaaaaagttgattttagtcgatcgtaaaaatttggaattttttttaaaaaacggcaaaatttggggatttattacctcctctcctcttacgatcgacaattttcctcacaaattgagtttagtcgatcgtagaaaatttggaatttttaatgaagtttcttaaaaaataaggcaatttttctttataacatttcttttttttcacattaacgatcgacttttcgctgacttttttttctctcactcatttttcttttctctttcttcctcccttcacccctccccccaactttcctcccccgccccccccacctcttacgatcgactaagagaccccccccctccctgtgcacaggtatgcgttatacacatgtaaaacaacaaaatattgaaaaaaaaccccggatttacaggatggacccgggatcaaaaaaatatttatttattttaagatgctttccagggtctgctgcattttttcggaaacattattccaaaaaaaaatttttttcaagatgaagtagttggtacaaatcacaaaaaccccttaaaacaaagggactgtcttcccaatcccttcccaaagtccgtgctattattgtcaaaccctttgctgtgcgtctgcagcttgtgagacggcgcggaatgcctcctccaactccttctgtttctgctgcaccatttccattgttggcagtggatttgccttcaaaaaaatttagtaattttttattgtacaatcccactgtacaaaattaactggccagttcagtcccatcacccagaattagccgaccagttcagtcccatcacccacaactaactggctagttcagtcccatcatcatcccccgaccctcgcccacctcggtggtctcggccaaccaactcttgcgaaactcgtcctccgtgaacttgaagttgctggcaatgtaggtgagcgcggtcagcgaaatggtgccggtcactttcagctccagcacggctttgtccgccgcctttttgctcgccgcttcctcggtggccgccggtggatgttccaccttcacaatttggtcgatctgaaaaggaaacatttttttaaatattaatttcgccactaataatgaacagaatgccacaaaatgtctggcatggccgcgaaaatgcgccgacctcaaaatgatttgcagcgcccgcattcagacggatgaaacagccggtgatcgcctgcgcaaactgtgccctgtcgttcagcgtggccaacttcatcagttgcggacgcgacagagtgcacgggtccaaatccttggcattctgtaaaaagtttaatggataaaaccattgttttgaacaaaaaaaaaaccacaccaaaacagaattaggtatatttttttataaatatgacgcttaaaaaatttatgagcctaactacaaaacattcaatgccattttttggggtttggccttagaaatgagggcattttcgagtctctcaagcatcaataatattgtcacgtgccaatactataaataaaaggtgccatacatacaaaccaagaaaaagtataatacctgtgccggcagtttggcccgtctcgcgcgctcctcttcccgttgccgagcacgttcctgctcctccaggtcgggaacttgttcagcgtcggaaagtgccatctgcagctgtgccgctttgtcacgcacgtgttcaatggttggcaacgtttctttctgcaaaataaaaacaaagaaattatttacacaatttttttgcaacatttaattgcatagctaatactaaattttgcccaaaaaatcattggaagtcttcggtttttc

SEQ ID NO: 4287 - DNA, 2960 bp, Heterodera glycines
agcagtgttttccattaaaggacaatcaaaaacactgaaaagaacgggggaaaatattaaagggaaacggcggggattggctgaaggaaaaaagattgtgttaagagttgctcggaaaagttcaaaagctaaaaaaggtaaaaagttttagaaaaataaaattttaaaaaaaactaaaaatttgtaaaaacagaatacgacaatgatggatcatcatcatcttccaaagattcatcatcgaaagattcctcatcatccaagggatcatcttcgcacaaggattcatcatcaggacattcatcagaatccaaagaatcacattcttccaaagattcatcactgaaaccatgttcaccaaacgaagattcgtcctctgtcaatgaaaagccctcaaattccaaatcatcggacactgtctccacatccgaagcctcaccatcgcatattgaagagtcgtcaacatttgatgatttatcatcagtcacggaagagtcgtcaacatctgaaggtttatcatcagtcacggaagaatcgtcaacatttgatgatttatcatcagtcacggaagagtcgtcaacatctgaagatttatcatcagtcacggaagaatcgtcaacatttgatgatttatcatcagtcacggaagagtcgtcaacatctgaagatttatcatcagtcactgaacagtcgtcaacatttgatgatttatcatcagtcacggaagaatcgtcaacatttgatgatttatcatcagtcacggaagagtcgtcaacatttgatgatttatcatcagtcacggaagaatcgtcaacatttgaagatttatcatcagtcactgaagagtcgtcaacaatttccgagtcttgtgcgtcggtgtgcagtggatttggatggacaaattataatggcaattgttacaaagttatcgaaggactgatgaatcagacgtgagtaaatgggaacttatccaagaaaaaaaaatttccatgagaaaatattagtggaatattttaattactatcctaattatgcttttaattagttcccaataaacgattgtttagtcaagcggtgtccgcttgtactgccgaagacccgcaagcgcaactcgtcagtatttgggatgaggccgaaaatcggcttatttcacaaattattacccggccgcttgcccgttcacttcagacctataatttggcatcaccaattttcaacactttttggtgaattaattatttttaatgggctaatcccacaaattataatgtttttatttttcaggatcggtcttcgccgtgtccttgtcggaaatcgctaccaaagcacatggacaaacggttcggcagcaatatttggcaatgttgtaagtgaaaagctaattaattaataattaaaaaacaaaaacaaacaaatagcccgaaattacaactgctgcgtcaagaaacacatcgccatgggcagcaggacaaccctcgggcaccaacaaatacactgacccaagttgtttgacttattgttacattgaaaaagcttttttaattaataaaaagagaatttttaatagaaaaatcaatttaaatttatttacattttattataattatgtttaattgacttagccggcgcaaaagaggagtgcgtgcacatgctaaatgcagaaggccgatggaacgacgcgcgctgcgaaattcaaatgacaggcgcgatttgcaaaaaagcagctcagtcggttggaagcagcggcacggtcgtgtcgagtgccgtcgttttcccgtcttcggccttcgatttgtgcaatccgagtgtttcgcaatgcaatggttttggatggaccatttccagtggcaaatgctacaaagtgatcgagggactgatgaatgggacgtaagtgacagaaagagaaaagtcaccactccaaagaaaggacaattaacttggccattgaggcgaagattaatccaccacttttggaacgcccatctcgggcccaccttataagcgatggataatcaagccatcggggtaaatcagtcatcactcccatggctagccctcctcctaagccaaccgatgggacggaaatcatacgttaaaaaggaggggggggggggggtcgattgccccaaaaaacttatgagatcaatctacggggttgggacttagccgggccaaatctcgaaacccggcacagcttaactgttgcttgatttggcgtcggcatttccgacggtgaaccctgttccggaacgccatacgatgctgattcaaactttgcctagcggtttccagtttcttctttaaatgcttcccagaactccttctagagaagcatgaaatataattttaaatggaaaaatataaacccaaaagaaaatcaattacatcggttttaagtctcggttttaataaataacttgaattaaatgttatatacaatttttaaaggaaattatgattgggtatgagaactttaatcttttctaatttttttatttttataatttttgatactgtggttttttggcgagaaatatcaaaaccatggacgaaataggggcaaattgccaaatagcagtgaaaattttcgaaaaaccatagcataattaaatatagttcaaaaaaatttattcgcacattgcaactgaaaatgaattaattaatttttcttgaataaatgcaatttttttatcagataaaaaaagttaatttttatctgagaaaacttttgatatttgatagacgatacttacatattaattatgcttttaccattgttattaccttccgatgttttcgacagttgttggttttgacaataatttttataaatgtttactcagatttttagatacggtatttgtcattgaaaatttgaaaaaatacatttgataaataattttttttttctaaatcctggtggagtaaggatacgggtcctaaaaacgaaaatgacccggagt

SEQ ID NO: 4288 - DNA, 3899 bp, Heterodera glycines
agtcaactatttattttttgttttattttttcccccttgaacaaacatcctcgtgagttggaacggattttttttccggaatatatttccccgttttcatctcccatttcaaaacattcgccaaaatcaatatgcacaattttcccgctaagccgatccaacatcaaatttgatgggtgtctaaaagaaactcccccggaccctcccccctcgcccatttcccaaaagttttttggaaaaatgcgccgcaaaaaattcttaaaaatctgattttttgatcccgagtgcactgaaatttacgatttgttaatttcctcaccaaaatttttaaagatgataattggaggcgaaaaatataatatttaatgatttttgattaaattaattgtaaaaataaaagatttgaagcaattttgcaaaatgttctgatttttgaccccaaaatctgattttttgggcccgatgtcctgattttgaaaaattttcgatcgcatccctggctttaagcggtattaaagcattgcatatttcatcagttacattgaccattccgtgatcacatttctccgtgccaacaagcacatttgggacagaagtagcatcaatttggagttgtctattgcaaatgttcagccaatttgggacgcatttgcccgtcaaatttggctcatttttgcggcaaacatttgccatttgaacatttttggtggccatcatttggacaatttgcgtcgtctcatttcatcaacaattctcactgatcttgcttgatcaattgaattcaatcagttccggccacctgtttcccgccgcggtgattgatgatttcgatgatccaaatgcaacttctgctggccaagcgttgtccaaatgggtgcacacgccgacaccaaatggccaaccgaagcgactgttatgccaattatgccgaaatagcgtagaaagaaacgtcgattgggtcaacagtttcaaggaggtgttgtgctgcttacatttttttataaaatatttcaattttcgtttccatttttgtttagaaatttatttgtgccatcacttcttgtgccagctatacaattacgtttgatacttatggtgtgccaaacgtcaattgagccatttgaattggtgaataaacggactaatgagaagctgacactgacaaatgaagacacttgtgggaaattaattggtggattatgcggcgatgcccaattgttggggagacggcggcggtccaacaggggccaatcacaattacgaacgacaaaagataaacgccaaatctgtcgtaatatacgtcgtttgtcgttatctccaatcacaattaaaaaatttgtcgtttgtctcccgaaatttggcgtttgtcgttttgcgttcgtaattgtgattgaaaccaacgacaaacgccaaatttcagacgacaaatgccaaatatttgggggggggggggcgctcaacaccgcccctcaaatttgtcgtctgagaagtgtcccaaaaatccaccaaattattttgattcaaaatttttatttaatattaaaaacatgtttctaagggtaaatgagttcgctgatcatgaatccgatctcagattttcatttctataacttttacctatgatttttcatccatttatttgggtctttcgaatttaggtttatgattagaattagagcaaaataaatgttagattcggaatctacgtacccaaaaacaaacgacaaatttacggtagattttcacacgacagagacaaacggaaaaacggcttcttcaaacgacaaacgacataattttttgtcgtaatgacaaattcggagacaaataccaaatttgtcttttgtcgtccgttttgtcgtttgtcgttcgtaattgtgattggccccagaacatactgtacacattcacaaattctttttctgtgtttcttaatattttatagggtactgtcgaaattaattattgtcgaatcacttgctgtcaaaatcacgcacagacagtgagaaaagtcaaaacagtttactgtcgaaatttttagattgtgtagaatttgggccagggttggaaacggccagaataatgccatattcgtgatcatcgtcctgaaagccccccccccgccacccttagacaaactaatatttcaagggctcccggacaatccgacagtggacaatccgacagtggacaatccgacagttggacaatccgacagtgaggacaatccgacagaagtggacaatccgacagtaaatttctattttaaaaaatattttcaagtcattagaacggattatttcctaaaaatatctcaatcaaatcaatttggttccggcattcgataagcgattgcacgtagataggccaaaaaaggtctgttatgacgatccaagaaaatggcgcgaattgcttgttcgaaatcgaattcaaaacaatggattacaggggaggtcttcaagtttcccacaggaaatgtggaatatgagtgaggtgaaagtggaaatagaattttaagaaacaaaaatttagagttgagcaaaatttaatgaggacaaataacagcattgaggggtgtgaccaaacacggtcacacccaatccaatatgtcacaaaatattggacaagagctacaaaacaatgctctcatttctcaccactttggttttatgggtcactccacatttacttttgcatatttatttatttatggttgtatggatcactatctttaattattttttattttattgtacttttgttaccagcatacgaaactaactttttttaatttggtagcaaatttaagctaaattgatttgattgagatatttttaggaaataatccgttctaatgacttgaaaatatttttttaaatagaaatttactgtcggattgtccactgtcggattgtccacttctgtcggattgtcctcactgtcggattgtccaactgtcggattgtccactgtcgaattgtccactgtcggattgtccagtcacgataaactggacttgagttattattttatgttctcttttatttttctcgcgttgatccgaaaattttttcaattcacttatatgcttttatatacctttattattcttttccaatgattttaaatacctaatttaaatctttagaagtactttataataattttatttattttaaattaattatttattgatcattgaagttataattctaataatctcgtaaaaaataacttaacttataatagcatattaaacttcacttttgttaacattttttaaacatttatttattctaaaatgatcaagatccacgttgttctgcggaagtgggcattttcttattaatttaaaaaatcttcagtgaatgtcatgcgtactgagagtgttgtggattagaaaacagtcaattgaatatatcggaattaataatatgaatcgatataagatttaaaatttgttgtaagaatgtactttatagaaaagataaaattgaaaaatagtgcattattttttaaaaatattaaactttacacaatattacttgttgttattaaagtttgaaaatataattttctttctttgaaaccaggtttgaattttaataacagtttcaattttaaatagttttcatttttttgaaaaaagccattcacatacaaccctgggatgttatatagtcgcacatcattgatcatccgggcagctgattgattatattacaaatatttgaaaaaagaatcaaataattcaatttaaaaataaaatatatcgaaagttaattaattaattaaaaccttaataaatttcatttcttttgaaaataaaactatttttagtccatccttacgcctttgcaccgagagagtgaggaactggtgcaaaataatgaatcaca

SEQ ID NO: 4289 - DNA, 6049 bp, Heterodera glycines
aggtgggggtcggaaacgaacggcacggcacaatcgcaaatccattgaaatttgccccccccccatatcaggaggaatgccaccgccaccgatgggagcttacacactgtaatgttctcatcatactataaaattagcttctaaacatgttacgctttcgaatgttaccaagatttaacatgtttttttcggaaaatgcccaaattggtcaaccgagatttcgaatatgtaagcactgtttttgataatcaaatgcagaattggcgcaattgaatgacattaaattttgaattttagcccagcataatttttcgggtttcccggtttcgctcccggaaaattttggactctcgcgcttccgccaattttctcactaaaagcggaagtaaaaaattcaatgctaattgtaagaatgttggtaaagaaattgacctcagaacgcaaaatttacctatttttatgacaaaattcatttaaaaaaagcccactcaattttctatttccccgccgcgacgccctataaaaggaggcattttccaccgaccgacccacaaatttccctcatttgtcacaagtacatttattgtgcctaattttatttgtgtcgtcggcatttgtacatattacgacagttcgtcgtcgactgctgcatattattatttgttgtcttcaccacacactcgtcaagctgctggttgagcgcaatgtccaagagacggcttcgacaggtgtcactcatttggggatgacgttgtttttcaatttgaaaaagtcattcttggcggcatctcatgaatccaatcaaaatttgcgaatccgatcaaatttttgggtcaacaattaataaacagttccgaattcattggctatgtttttccatatgcaaattttttcggagtttatgcaactgccaaaaacgaaatttttcggaaattgtaattccgagggccaaaaattcgccataaatttgttttttcgagggcccggttcagtaaattgtctgtcactcaatcaatgctaatttcttttttccttttccaggaactccaggacatggtgaagaacccattgcctgagggatgcactgcacggccacttgatcaacggaccatgaccccctggacggttaccatccgaggccgggccggcacaccgtacgaaaacggcaacttccaactgagcatggcatttccgagggactacccgttcaaagcgccgcaagtcacgttcaccacgcgcatcttccacccgaacatcgacacacggggcaaagtgtgtctggacattctgcaaacgcactgggcaccgacgctgaccatcgaaaaaggtggcgtggatttggtggtggatttgatcatgttttaaatggattgatcactttaatgctcgtaacttttttcaggggcattaagatccgctttttttgtgtttgattagcaaattcaaaagatttcattgcgtttcatcagagttagcgaaaaagcgaatttttggaatttatggtcttaatcgggcacgaatttgatggcgttggttttgtgtggtatttgtgcagtttgagtgatcaattttttcacatacaatttttggctgcagaaatcgttaatttgtttctctgtctttacagttgtgatctccatcatcgttctgctgaatgacccgaacccggacaactcgcctatcaatgcgcaagctgccagtttgtaccggactgaccgtgcggagttcaacagacgcgcccgtgagatgacgctcgcctatgcacgatgagatgatcagcacgtctttctgattccactaccaattatgtattactcattcattgtatatattattgtactgtatgttgtaccatatttatttgtgtgccactactgtgtgtctatttttgtgttgtatttgtgtgcattttcaaagccggtaaagaattttgtgctttttctattggcgtatccaaccttcaggaattttttttcgaaaactccttgaaaatgggccctcccgcttgaaattcaccctataaatgagctgatcactgatgaatgtcagtcaactcagattttgtgaaactttcgctaacattaagcattcattacacatgcacaaaattcggtggggattctttcaaaaagatttagcaaattctgcatgagtccaccgctaaaattatgtaattacttaatttcccgtccaattatattcattagtcgcagaaatttgaattgaatgaatgacatgttctcattcattcactgacatataacaatcgattggggtcatctcaaagtgtaaatgtttttgaactatcaaggaggatgtgatgatgatgacgagtgagtgacaattgcaaatgtcacggctcagaaatggccgtgaagcgtggaccaccgacgcctcccccttccccccccttcccccacgcctttcactcaattcaattcaaatcattatccgtccactccctctcattaccgcacaataattggattcaaaaaacattccattttctctcactcaactcatcattccgtgttcgttgagtgaccgttcatttttgtctcatttttgactgggattttccgggaccattttttgtttctgttttgtacttcatattcctgggtttagaattcattttctaacctgttttaacatcatcaccgtataatgaataacaccaccagcagcaggtaaacaccacccgttattttatttaattaaattccttgcatttggtcgggtttcttgaccaacagtaaaatttggttgtatgcaaatatgaatcccgaataggcctaaccaacaacaagtcaaatgccgaaaataaacgttcggtgtcggtctttaaattgattttgaaaattcacaattttctcgttttggcataatgcacgtttaaaaaagcagtttcccaccattctcgaactcattcccatgcataaattgtcccctgctaataccctttggcaaatccataaaaagtgccaaaaaaattattccccaaaatggccccaacgaccaaaaaaatatgtaaacgcctgccaccagagcttttgtatgaaacggttctttacgtatatcccaacccgaatttgtcgaatcttttcaattcttcttggatactcagaaaatttatgagtttccgagtccaaagatgggaggaaatacggaaattattatgttaattcaaatttggaaatgtttaattgtccggcaattttgattaatttttcattaagaaacgagcaattcttgaagcactttatgagtgttgtcgagaacgtaggccatggagaaccttcgaatcgtacacagcagacgaccaaaatgcccaaattttctttgcggcgttgacagaatttttggtgagcacaatttaagaaatgtcatgtttaaatgtttatgtgaatattcagaatccatatgcggaaatcgtgccctgaaactcccccggagcacatttacgacactatttcgtcatctcgtccgccgatgattcccattcgccgcataagaaggtttaaatgggatttttttcaggaaatgcatacttaaatggatatttagttgagcactcccccggggcacatttaccatactgtcatgacgaccacgtccgatggttcgcagctctcttctgtcatttacgacgttcctccgccttcgtcgaccattcctcgcgaatctgttactaccacccctccgccggtgccgcaacacacggttttgttcagggttaatttaggttaaaaatgtgcaatttggctcgcttttctcgaaatttcttcagggggagaactttttggattcaaaattttatttccagcacggaggcgaaaagaatcgaaagaacaacgaaacgccgtcgccggcctcgaaatgctcggacgcgaaaaaaaggtcgtaattttggagatgaactgatttttgaaataaaataaaattgtttttttagcgcaaagagacgccgaagaaggacagcgatggaaagaattgaaggcgttcatccatttaacaactcacaaataacatcatttttttttgttcactttggacgtttaattttttttgttttgttttaatttcggcatttgattcgagtattttgcccttttcatttgcattttatgtttttagttgctgaagataaaaaggctgttttattgtactgatttatgcataccattaaggtttcccaaatgctaaattgctctaaaatctgttacacacggcgagtcaattttggcctcccagtgcaaataagtttattttttatttactaatcataacgccaaaacttttcaaaacttaaaatttattggggattttcccttgtaaaaatggaagagccgatctcgagttaaaaacttaactttcacaaaataaacttggaatcgttagagggggtcaaaatatgggcctatgcaaaattttaagaaaattggtcaataggaaaaaatttttttcaaggataaacatttcaataattttaattcttttttagccaagtccacaatttaaggccaaaccaaataaaatttacaatattctccagaattttcccttcaaaatgagcataaaatggttttatttgctctactattcaccaagttataagctaaaaaaatttcataaaattgtcgatgttgtacgtaaccaacgctttttgaatatgattttttattgccacgaaaacttttattaatgaaaaaataattctgccttcttctgtaaacgaagaaattgaaattaacacacaacataaggaggactcgaacctgagaccccccttttggtgactaacgcacagaccactaagacgaaaaaaccaacttaattgtacttggagcccaaaattgactcgccgtgtatatgaataaacaatcccaatcagcagaaagtaccattttaaataaaatgctaactccaagttctatagagcatagagcgctttgtcaatagacggaccaattcgaaaaataaaaatacacaaataaaatgtaaaaaatctctgattaatctgtccatttccatctctctcccctcatttttcattcatttgtgttgccaaataagcatttgacaatgccacaacggttcgccacggcgatcacttgcaggattgcctccagcgagaaaaagtcgcgcaaccgatacggtaggggtcagtcgcgtctgaccagtagcgtctgagccaagaataaaacataacttttttattgttggtaaaattttataaattttgcatcattcgaaagctctacgtgtttagaagcttttgataagctattgctaagcgattgaacaacatataaaaaagttgcaacatgaacactaccaaaaagtcagaatttttacatattttaatttataacttttttatatgtcggtatgtctttgtgatttttggatagccgatagagcttgttaagagctttcgaatgataccaacattgttggatttggtcaacaaagaaaaaatttatggtgatctaaacttggctcagacgcaactggcccgtttcgcaaccgataggcccgatgaataccccaatcctcattcaaaagttataaaaacattacgccaaaccgcagaaaataaaattttaaaattttgttgccatggaaatgaaaagtcgctaaaacagaatcgcggaaaaattgtttttattttgttttaaaattccatagtcaatcaaataggtaggcggtaaatagacttgacctcttgcaaatgctcttagaagttctctgtatttttcatgaaacgattggacgactcacaaaagtttagtgcatggaaggcaaaccgtaaatattcattgtacgaaaacatgtaaactttcggcacttttggtgtttagggctctcctgaaaacccacaagttttcacgacttgtgacaaaaataaatattcaaaacaaaagccctccaccctttggattttttcggggccctaaacagcataaatgccaaagtttcaaacgatcccgaaatggttggttgcattttgttaacataaaaaaatgttatgaggcaaatttgttcc

SEQ ID NO: 4290 - DNA, 3424 bp, Heterodera glycines
tttttcatcaccttttcagccaccgatccgaactacgggacgcttcagaacttggacgcggaaatttttgtgaagaagtagtgccatcgacaacgggacggatcatcaataagaacgaggaaactatggatatgtcgtcccatgtcacatatgtacaaatattgtattaaagcggaagaatccctcctcatcattgtaataaatgtatgtaacattcgattcgttcagcagttgttcatttacatattggcggtgtgataaataaaaaaacgattctgaaaactttaatttcattttattcgacaaaaactgatgggatttcgaaggtttctgcttatttagatgggtcgaataattaaaatttaaaacatgcttatttttaagattcgtgtttgtgctcacttcttcaatgggggaaaaatttggtacttgttaagtttaggggatagatttcgtatacattttactaggtcgttgcataaaaaagggcgcttttttagaaaaaaaatttatacggaattcgaatgtttattcacgaaatttgataaatagaagcaacttgagtccaaaaataataaaaaatatcaggtccttgaaatcgtttgccaatcaattatgtattatcaactaagttaatccgacttttttctccgttcgttggcaaaaaaaagtctggacgcataaaaatttgattggacgcataatttggtctgtaaaaaaagtcattgcgaagaattttcaaaatttcgacttttttgcaatttcatgttatgaccctccgattgcgagtttggaatacaaaatttttttctagcccgaccggatttgcacgattaatcccaaaacttgcaaaaaaatattgctattttgcggattgggatgccgtaaaatccggcgactgatccggtcccgtgcctatctctacgcacatccattacctatatcacaacccaaaatgaattttacaatggtttatcccaatatcagcaattcattcctcttatttcacattccatattcattttacctgttttgtttgcagatttaatcgacacacaacaatggaattgataaaaatgtctgaactttatttggcattgcagggcgaacaatgttattacacagtgccatccattcataagggattcaacgttaaaaatgtttgttcggtcggggcggggggacaatttcttgcaaaaaagggaattttggacctcgggtcaaaactcggagcaaaaatgaaacttttaaaaaaaactgaaatttttgattttctccaaatagttttggagttcggcattctctgaaatgcatgccattttcctgatccaaaaaactccaatgttttcagattttttgttttaaaaccaacttttatcaccccaaaaatttgccgtttttacgttttaattttaagcttcctttcgagtgtccgtcattttcaattgcacttgaacagcagttgcaacaaattgtggacttctccggctgtgtgaaggcaattgaaacatggaaagcggaacacttgtacaaccgcacggactgcttggactcggtgaagaaggcaatcctggagtcaatcatcgacgcctacaacatttaccagaacgaggctgaccgaatgcgtcgcgaagtttgtgtgaaggccgggaatttgagtaataattgagattttagggattgagttacacacgaaaattcattggcaacctattataagataatgcctcccataaaaaaaatttttttgaaattttttccaaaaatggcggggggggggggggggtaccacttataatataagaaataatcaaccatttttcaattgttttgttgattgttctaggcgttatgccaaattccgggttttcccgggctgatggaaattattgaattggtacgtttccatacctgtcaggttccagaaaactttaaaacttgctcgattaaactaaatcaaatttggtattattgggaagctcaacgagatttgtttaaccatataaaatatcaattttttaaatatgtgctttcgcgctcgaatttcgctcttgaaaactcctcattttttttcgaaaatttatcaatattttaagataaatattttttattcgcatcgcatttttgacactttaaattcaaattgtataccggacactgttcagaatgtgttgcacaagtacagccacagtattgccgatttgtgtgcatttgttcgcacttggcaacaacggctcaaccatttgttgggtttgctgcaaaaatcggacggtctctgtggccttgagatgatgaacgtgttgtttggccagtggacattccagtgctgcatcaacgactggcgttacaggtttcatcaaaatccaaacattttttggtctttgacggtgcggaaagacgccaaaaatttttgattttttttttacgaaattgtcatggaaaagtactacaaattttttcaaaaattggccatcgatcggctttgatattctcccctgaagacaaaaactacaaaatttcaatcttgggggtccgaatttctaataaaaatttaaaaatcggtttccttgggctcgtcgattcgccagcaactccgaaaaaaagaagtttttctagttcctaaaattgccgagtttgccgcttaaaattatgccaatacatattgctcttccgagctaaaaaaatggaaatttggattttcctatactcaagtctccatggctgaaaaatcgtgtcaaaaaacgaaaaatttatttttatttttttaaatttcagaacgattgagactgcgctgcttgccggctccagcgcaatgcaccaactgctggtcagttggctgctcgacgccaaactggcacccgcggcactcacccggtggttcattcggcccaaatttgtgccatcatccgacgacccaaatgagtcccaactgcaacgcccgcgccattcattcaacaactccgtgctgtccgccgcccagctgacaatgaacggcagcgcgaacgcgctcaacatgagcatcgccgccaacaccaccaccaactatcaaaatgaattgtgcctttttgaagcgccgccgccgacggcggatgccgtcatcatggcatcggcaacaacaatgactagaaacagcgcttccttttttggcacaaccaccgctggcagcgatgcggcaagcattggcaccggcacgggcacatttgttgtcgctgctgctggtgctgttgttgaggacagaattggatgggcttcacagcagcagcagcagttgattttgtctgtccagcttgacactgacgtattgccagcaccgttttacggctgcgaggagcttctcaacatggtcagttatttgattttgattatttgcgatccgccattttctgagtgagtcccctcccgtgagaaagtttaaaaaaggtta

SEQ ID NO: 4291 - DNA, 2166 bp, Heterodera glycines
attaatcatctcaccaaaaagttgatttatagtttacacaaaattaggattttcttgaatttttaagtcttataaatcatagctttttggtgagatgattcagcgcttagcttctgcttaatgattacttctaatctcccaataattaagaaaaaattcatccaggtttcattgcctttttatcgaccgaaaattttatttttcggcattttcttctgtaaaactcaaactttgcctcaataagtcaaaaaaatcacgaacaaaagtcgcaaaaactcaaaaaagtcataaaaatccgaaaaagtgtaaaaaaaagtcaaaaaaagtctcaaaaaaatgcatgttagaagtagggatcggatttttagtggcaaaaatcccaaaataattaactaaatagtggcaaaaatagtggcgaaaaagttccaaataattacttttaatagaaaacttttaagctctgatggggttttgaacaagcccaatttcgagaaagaattactcgattgagtaaatttcggcataaatttgaagagaaaaaaaggattttcgatgagagacctattttgattttggcagcaaatgtcgggacgcaaatgtccgaaaatggcccttaagaaatgggccgcaaatgtccgaggcgaaaatgtcgggccgcaaaagacggaccgcaattgtcgtttttggctggtggccgcaaatgtcgtgacacgaaatcaacaacagcaaaaaggaaacagcgaagggggaggagaaggaagagaaaatgggggaaaagagagaaaaagggaggagaaaaaggagcagcaactgaagaagaggaaaaagaaaattgcagctgaacaccagcagaaacaacaacatcagcagaagcaagaacattggaaggaggagagacggaagagaaagagaggaaaatggaggagaaaaaggagcagcaactgaagaagaggaaaaagaaaattgcagctgaacaccatcagaaacaacaacatcagcagaagcaagaacatttagatagcaaaccattttatacacccgatttatttaccgaaattgagagttttttcttcataaaatgcatttgatcacggatgaatatgatcggtcgatcggtcattcttaattaattcatttcttcttcttctgcggctgatcactgtttttgttcttttgtccgtcactcatttgtcagcagaagacggcccttttgtgatgttttgtgccgcttcttctgccggtggcggagacaatggccttaattaagcgcaatttgaattatctaaacactttttttttaattgctcacccaatgcaattattggcgctattataaagccaaatggacacattgttacaactgttgtccaaattttcatttttcttttgctgctgaaccgtcgcggtctccccaataattttgcagcgtttcattatccaacagttgtccaattcattttcatttgctttggccaatgtcagcttttcctttgtccattcgttcaccaattcgaatggcaccatttgtattgacggcacatgaacataaaaatgaatttcgtaactgacggaagaaatggcattggcacgaagaaaatgctaaacaatttgaaaacaaaaaacagtgatttgtcgagattatggccacacctccttgaaattgttgatccaatcaaagtccgtttgttcgttgtaattaccgcaacgcaatcgcttgggttgtccatcttttctcggagagtgcaaccatttggacaatgcttggccagcagaaattgttgaatttggcccatcaaaaccatcatcaatcgcagcgggaaacaaatcaaatgaatggattgaagtcaattggttgagatcgatgagaattgtcggcgaaatttgacgaagcaaatggtccaaatgatcaccatcgtaaaagcgcaagtggcgaatgtttgccgaaaaaattggccaaacaactgtaaatcggtgcctcttttgtcgaaaatttgatgatttgaacgaagaaaagcgatgacggagtgatcaatgtacctaaaaatggaaggaaagcttttattgccataactctgattttaaattactcaatccgaaggtctttaaaacggattttgctgggcaacggacggtcgggcaatggaaatggcacaaatttgtcatcga

SEQ ID NO: 4292 - DNA, 4942 bp, Heterodera glycines
attgactgcgaggatcagaaatggcaatttgagcatttcattaaactggaaaatcattatctggtgaaatcttatattaaataagatcaggtgacaaatctgagttcaggttcgtgatcagcacccttgaaaacccccgtatacaaatttcagctcaaaaaataaatatgggacccccattcttcacgattaccaaaaactgataaatataatgagtttaaaatccgatcaaacattctataagcaattgcgcgcaagtttaccaaaaagaggtaaatttatcgttacattcaacaacctcttccgctttaatcacccttcaactatgctattccgaaaactgagaaacgaagagcgacataaatgaatgtcatatattcgtgatcagtagggaacggatttttaagcgcgaaaaagtccaaaataagtgcttaaataagggcgaaaaaagcgcgaaataagtgcgaaaataagcatgaaaaaattccaaatgtagaggtgaaatttgttaaaattgctgttttctctatgtaaattagttaaaattaagtcaaacaattttatttactgattgcagttagaaatgaagtacatttagaaattttcaggatttaagggtcgattctcaggggcgtatttttccgaaatttttttggccgattcttaggggtgtattttttgaaaatttttaggtcaattctcaggggtgtatttttccgaaattttttgggtcgattcttaggagtgtattttttgaaaatttttaggtcaattctcaggggtgtatttttccgaaatttttttggccgattcttaggggtgtatttatcatttttattgcatttttgctaataaatttccgaaaaatcgcgaaataagaacgaaaataagcataaaacggtaaaataagtacaaaaacttattttaagggcgaacctctaaaataagcatttttaagcacgaaacgccaaaataagcatttctaagttcgaataagtgcgttaaaacacaaaattttcgaacaaaaaatgtgtttttcgtgcatttctcgtcgagttaaagccgcagaaaaaataagcaaaaacttagaaatccgttccctagtcttaatatttgttgactttttaataaaatttttgtcattttacacccctaagttcggaactttttggcacctattttcccatttttagcacctatttttggggttttttagaacctaaaacctacctattttggcagtttttagcacctaaaaatgtaagccctaataataaagagtcaaactaccgtatttctctaattatatgcaagtcaccaataatctacccctttcgaagtaggttgaaaaataatctccccttctctatttatctgcccgggggataaatagaatttatatttttttcgaaaaaataacttcttttctatttttattagagtagagcgggaccgggaattttgggcaaaaccgggaccgggacttgccgggacctgagaagccgggaccgggacctcggtttttgtccgggaccgggaccgcaagaaaaaccgggaaccgggaccaaccgggaaattttaaaaattcaaaaaaattttaaaaatttaaaaaaaaattcaaattttaatttatatcaagtgaaaataatacaaaattatttggttttttataataaattaaattaatgaaaattttcaaacaaattttcttcaattatttcaaacaattaatcatttttggactaaatcatcgaatattaatagaaattcagatttgattttcacatcactttttttcggagcgcttttccaaaaaacttttgggaaagaaggggtccggcggtgccgataggcgccgccgggggaaattttgaaaatttgggtgcaatttgttaacagattttcaacaaaaaaaggttggttgtaaagaatatattaatatatttttaaattttttctttttaactccaattttcttcactaatttttcactcagaccccattcttaccagtgcttgtttttcccggttcccggttgccctaccgggaccgggaccgggacctgagcttttcaaaacccgggaccgggaaccgggacctcggatgaccgggaattcccggcccggtcccggtcccggtcccgtggcactctacttctaacatacattttttgtgactttttttgacttttttacccttttttgggatttttatgacttttttgcgtttttgtgactttttcatgactttttacactttttaaggcaaaatttgactttttgtgatgaaaattccgaaaaataagccaatcttagagacggaactgaaatttcttagtcattaggactcaaatgacgaaactgaaaaataaaaaataaaataaaaatctggcggtgtaacaattttgggtacttgtgtgtgttatctgtgggcagattttcaaaaatttttatgtttttcgctataacttttttctttgtcatccaaatccaagattgttggtatcattcgaaagcttaacatgtttcgaatctaattctatgtatcacttcgcgattagacaattaccaaaaaagttatacatgaaaattgcgaaaaggtcgaaattatgaagttttttcttaataaaattttgtaattacaactcgccttttgtccccttctccccttgctgcttttggtgtttttgttgtccctccaattcaccgattcaatcaaaattgccttttcagtaataacttaaattggaacaaatcctattaatatttgacagtaattataataataatgttacggtaggtacagtaattaaccattgctcatttcccttaactatttgacagtaacatccttcgtctgcactttcacatcaatttgtgccatgacatttttctcaagcttttcttatttttcatgttgtcatcattctccttttcggcatcagcgttcgtctgtagcatcttttacggcattttagcaaaaaagaaaatcaaattcaaaatgtgctgatcaatttgcttcattttccttttttctccatggttggacaatgttaatggtataaagcttaaaaataaagaaaatcgggagaattttatttcctgaaattctcgaaatttgttatttttctgaaaaaattcagacccctgttttgaattttaaaatttagaaatttttcaagaaaaaatttttgaaaattctcaggcgattttttcaaatttaatgacgaattctaagaattttcaaaatatttaaaaaaaaaaaatcgcttaattttttaaaaaattttttaatagaattttcaaagaaaaatttttcgcaggctttttcaagaaaaatttctgtttgaaaatttaaaaaaaaattgtttaaagaatttcaacttggaattaattaattattataaaaatagaaaagaagttatttttattgtttattgtttattcataaaaaataaaaaagtcatcagaagggcgaaaaccacttactctgacgactattccggtaaatgtgtcgtagagtaagtgacaaaatatatggatgatcacaggaattaaaaaaagacaaaaatatgtgaaaataaataataaataaattgaggtcaaagtcaaatgaggtcgaaataccaaatcacttagaaatttgttacattctaactttcccggtcttacagattaccctagtgaactttaagttttattttaaatcccccgggcagataaatagagaaggggagattatttttcaacctacttcgaaaggggtagattattggtgacttgcatataattagagaaatacggtagtttgactttattattagggcttacatttttaggtgctaaaaactgccaaaataggtaggttttaggttctaaaaaaccccaaaaataggtgctaaaaatgggaaaataggtgccaaaaagttccgaacttaggggtgtaaaatgacaaaaattttattaaaaagtcaacaaatattaagacaaattgagaaaaataatttttaaaatcaaaaattctcgtaaataggtaaaaatctaaaaatgtaagccctatttattattacgttggtcagttttcaaatttcaaaaaacaaatgcgcgtctaacatttgcaaatgaaagttggataaaaataatccgtcaaattgattttttattgattgatttgggggtaggggctaaaacgcccggcaaatgtcatcattttgcaaaatatattctcctctgttgcgtgcgttccttccattccaaagcactgccattccctttttctgctcgctttttgtcaatgattttcgtctcccattggcatattgtccaacccctcgggcccatttgcaacaatttaaggcaaacaaaattcaaaagttgtttggataaaatgtgattttcgttagaatttttggttttccgcttttctaattatataaaaataaagtttccaacgcaattaattcttctgttatttgtgtgacatcattcggaactcggccaaattgtgctaattgctgccaaaaatgaaccgacggtaattaaattaaaagtcacaaattcgtcgtttatttgactaaactgttttcccatttcagttggatttgcaacgacgtttggatggacattttcccatcctttgaccgtcctcaactcggcctgaaattggcacttctttcgccacgtttcaatgcgttggtggacaaacatttcgatggcaaaagcgaattggcaatttggagaccaatcgaaattcacaagggcaaaggaccagaaccgaaactatctgtgtggatggatgacgaatctaacaatgttgtgccatttccattgcccgaccgtccgttgcccagcaaaatccgttttaaatgccttcggatttagtaattaaaaatcagagagctatgacaataaaagcattccttccatttcacagttacattgat

SEQ ID NO: 4293 - DNA, 2458 bp, Heterodera glycines
cgacggtaataaatttttaaaagtcaaacaaattagtcatttttttaactaacaataaactgtttcccacaatttcagttggatttgcaacgacgtgtggatggatattttgccctgttttgaccgtccccaactcggcctcaaattggcacttctttcgccacgtttcaatgcgttggtggacaaacatttcgatggcaaaagcgaattgacaatttggagaccaatcgaaattcacaagggcaaaggaccagaaccgaaactatctgtgcggatggatcacaaatttgtggaatttccattgcccgacgaccgtccgttgccctgcaaaatccgctttaagcgccttcagattgagtaattaaaaatcaaagctttatggcaataaaagcattcttttcctttttcagttacattgatcactccgtcatcgcttttcttcgttcaaatcaccaaatttttgagaaaagaggcatcgatttatatttgtggattccttattcacataccacggatggccagcggatttgggatgtttttgttcgtgaattatggccaattttttcgacaaacattcgctgtttgggctttttccgtggtgatcatttggacaatttgcttcgtctcatttcaccgacaattctcaccgatctcaacaaattgaattcaatcaattcctatgatttgttgcccgaggcgattggtgatgattttgatgtgccaaatgcaacaatttctgctggccaagcattgtccaaatggttgcactctccgagaaaagatggccaacccaagcgattgcgttgcgaagattacaacgcacaagcgaacactgattggatcaacaatttcaaggaggtgtggccataatctcgacaaatcactgatttttgttttcaaattgtttagcattttctttgtgccaatgccatttcttccgtcaattacgaaattcgttttactgttcgtgcgccgtcaatacaaatggtgccattcgaattggtgaacgaatggacaatggaaaagctgacattgaccaaagaaaacgaaaatgaatgggacaccatttggataatgaaacgaagcaaaattattggggagacagcggcggtcaattggaaagacggaaattgggacaacaattgtaactgtgtgttcttttggcttgatagtgacactaattgcattgggtgagcaaataaaaaagtcatttaattttgtttaattaattaaaatttcgcttaatttagtccattgtctccgccaccgaaagaagaagacgaagcaggacaaagcagcgaaaaaggggcgtcgtctgctgacaaatgagtgacggacaaaagaacaaaaacagtgatcagccgcagaagtagaaatgaattaattaagaatgatcgatcgaccgatcataattcatccgtgatcaaattattaaaagtaattatttggaacgttttcgccactatttttgccactagttaattattttgggatttttgccactaaaaatccgatccctacttctaacatgcatttttttgagacttttttttacactttttcggatttttatgacttttttgagtttttgcgacttttgttcgtgatttttttgacttattgaggcaaagtttgaattttacagaagaaaatgccgaaaaataaaattttcggtcgataaaaaggcaatgaaacctggatgaattttttcttaattattggaagattagaagtaatcattaagcagaagctaggcgatgaatcatctcaccaaaaagctatgatttataagacttaaaaattcaagaaaatcctaattttttgtaaaattttttaagtagattcttaggggtgtattttttgaaaaaaattttaggtcgtttcttaggggtgtattttttggttttattgcatttttgttgagaaattttccaaaaaatgtcgaaatagtaaaaaaaaaaaatgagtcggggtcgttttggcgccgacgttttggcgcccacgttttggcgccagggtcaggtttttaaattttgtctatgtttgaataaatgaaattatgtattcgtcagttttctgagtcgctaatcacgaatattgtattcattttaacaattgcgaagcccggacttgatttaaatgaatacaatttttgaacatattagatcaggccttctatctgttttgttttatcaaatgttttaatatggtgggtccaaatctgagaaaatgatttaccagattctgatttagggatagtgactattatttattaaatataccgttaaggttatgtttataatcactaactcttttgaaatttcaaccgaaaaaatttaagagtttaaaaatattcaaaatgttttgacattttttgaagcatagcgaagagaaaaaattcttgctaagtcaatttttcatgttgaccaacaaaatgttcacagcaagttgatcatat

SEQ ID NO: 4294 - DNA, 3952 bp, Heterodera glycines
tccaaactgtttttgttcggctcgaatggcttcagctgatcactttcgacctttttcggccatcttctttcaatgagttctttgaccttctttaaaatgtggtcttttgctgtttcactggcaatcgattttgcggtgacaggcagcgagtcgatgttttccacttgtacggctctcacttctgcactgtccaaatcaatttttgctatctccggacatggtagtcgcgatagaccatcggcatttccaaattcttttgttggacaatattcgatgtcaaagtcgaagttcattaaaatgagtgaccaccggtgcagccttctcgccgccaccacgggtatttcactttttggcccaaaaatctttttcaacggttcgtgatccgtctgtaacacgaattttcggccatacaaaaattgtttaaacttttcgactccaaaaataattccgcggccttctttttcaatttgcgaatagtttcgctccgccgcattcaatgtccgtgatgcataggcgatgacgccttcctttccattttgttgacttttatgggaaagaacggcaccaacgccataatcagacgcatccgttgccaagtataatggctggtcgggatcataatgaacgagcacttcggttgatgacaaaatttctttaatcatttgaaatgctttctgctgttcacttccccaatgccacttttcttccattctccgcaattggtttaatggctcggaaacggtagccattgcgggcacgaagttgccataataattaaccatacccaaaaaggattgaagctcctttaaattttggggcggtggcattttgcgaattgcttccagcttttcctctgaagcatggactccgtttttgtccactcggtgtcccaaatattctatgctttcacgcataaattcgcatttgtcccgtttaactctcagtccatttgccttgagccgctgaagcacctgcgtaattcggcaaagatgttctgcctgtgttggtgctgtgatcagtatatcgtcgagatacactgccactcattcaattccttgcaaaatttcgtccatgacctgctggaaaatcgccggtgctgacgctacgccaaaagggagtctcgtaaattggaacaatcctttgtgcgtgcatactgccaaacacttttttgcttcatcatccaacatcagctgcagatatgcgtcgttcaaatccacttttgaaaatttttgaccgccatttagcacactgaataggtcgtccggtcttggtagtggatattggtgcacgtccaaccattggttgacggtcactttgtaatcacagcagagccgaatttttccgttcggttttggtacaatgaccaaaggtgtggcccaatcactgttgttcgtcggctccagcactccctgctgtacccacttatccaaaatcttctccacttcggctttgagctcaaatggtacaggacgagccttacacctttttggttgcactccaggcttgaatttcaatgaaatttgacgggtgcatcggcccaattcgtctcgaaatacttcttgaaatttttcgagaattttgtccacctctttttgatcattattcgtggatccgatttggattgcgttaatgccgaatgctttgttcaaatcaatgcgcagtctgcgaatcacatcacgaccgcacaaatttctcttatttccttttaccacataaatatccgtgttgatttgcatgccattgtattccacatttacatttgccatgccgaagacgcctttgatcggaatgcccccataagccagtagtccttgactttccttcaattcgggctttccaatatggttccaatcttggctaccgatgattgttacatctgcaccactgtccaattcgaattcggcatttcctttatgcactttgagttggatgaagctcggcggaacagtctcagttttagccgactttcgctccaaactcgaaattactggtggcttctcattgcactgcagctgaatttgcttcacgtgtttgctgcttttccatagccgactttccactctggccgggtttttgttgccaccatttgtcctgcatacaatcgcccaatgtccgactcttccgcatttggtgcatttgtcggctttgccgggacagatattagcccaatgtccgcttcttccacaacggtagcatggcttactgtcggcacttttgctattgttggttcctttggcgcgatcatatcctcctcctcttcctgaaattttggccacattgcctttcaatgagtccgatccaatcgcttgagcgtccacatttgattgctccagcacaactgccaattcgacggcatctttgaatttgagatctttgtccccttttttgatcagttcggcacgaattgagtcgtcgacaattccattgacaaataatgcgcttaagcacatgtcgatgctgtccttgccccactccgttttggcaataagtgaacgcaattgaatggaaaagtcgcgaatcgattggccggaatgttgcctggcggtgaacagctcgtgcctccttgccacaattgactttgcttcgccgtaacgctcgcacatcaatgccgtaatttccgcaaaatccatatcacggatgtcgtcaggctgtgccatcattcttaactcatcataaattgggccaatttcggtgaaaagcaatagctttttcatctccgggtcggtgatccccctgagcttgatgaaaaaatcgaatctttccgcccaagaatcccatgacatttccggtgaatatgctcctggtcctttggccgatttgattttgttgtcttgctgttgttgagccatcgctgcgacgttttaaaccgtatatcacggaaccttacacaacacgagtgtttcggtttttcggcgaatctgcgaaattgaaaagtcaacacgagacttattcaatttcccaacgaaaattgttaacacgaaacaattttcgtaaatgttgattgctgtttgtgtcgcttttatgctggctttgttccttttgctgactgcgccaatttactgttgtgtccgagcaacagttaaagggaatattgatttattccaaataaataaagaacagaaaattgggaggtcaaaggacaaataataaatgcagataaattaaatgacaaatgaatggtggaaaaagcaaaggaaggggaaataattccatatttatgggcagtaaaatgggcgggaaatgtgggcatttaaaattcaaaatatccacttaaacactacaacagtaaagcaattgaattcgcaattaattaactattgaaaaaaatttattttttataatatgcatttcttgtgtgctttttcagattgtggtaccttccccggcttttgcaacggttcagtctccaccgcgtcctcctccaatttctctgtggccaccgtcccatccgatttttgcaacggttccttctccgtgtcaaatatggccattggtctcttctttgccagcccggcgccgtccaatttggcctagagtgtgggggaggggtcgaagggtttaaaaatagaaaatttgggtttttggtcggttttcacagaaataattaattttatatttatttcttttttatcctacacaatttttaataccgtatacaaccgtttcacatgtattttattaaaatttaatgaatttgaataatttttggaaaaatttacccttcaattttgatccaatggcaccaaatttacatccaatttccgactgtaagccttgttctacctttttcggtgaggtgccgttgtcgtcagtgccaaggaggcgttttgatgtgcgcggcgcgtaagattttgttgcaggcatttcaggaaccttttgaaaaaatgaatttatataatttgttaatatttttcggtctgataattaactttttttaacccaatgaaatgac

SEQ ID NO: 4295 - DNA, 1333 bp, Heterodera glycines
ctgactgcgccaatttactgttgtgtccgagcaacctctaaagggaatattgatttattccaaataaataaagcacagaaaattgggaggtcaaaggacaaataataattgcagataaattaaatgacaaatgaatggtggaaaaaagcaaaggaaggggaaacaattccatatttatgggcagtaaaatgggcgggaaatgtgggcatttaaaattcaaaatatccacttaaacactacacccctgaattgttttaccttgttccccccattttcgaaaaaaatgaaaattttaaaaagtcgttaaacccagggctcggatcgacaatttttcaaaatcagaacagattttgttttgcgaaactgcctccaaattagttatttttaaaattattcgatcaataatgtattattttttcgcctccgattgtcgaatttaacgatttttggggaggaaataagcaaatcgtaaatttcagtgcattcgggatcaaacaataagatttttaacaatttttgcgggtgcagtttttccataaaacttctggtgaacgggcgaggggagggggtccggcgtcccacggtcaattgtatacggccttctctcgggcaacagacggaaacaatgtccgtgttcatgctcccaaccgggaaattgatgcccaaggccgagccaaagtgctgaatattgtagctataatatgctcaagttacaataattggcttagtccagagcagttgggcacatggtttttggagagatgccaatcccattcccatctgcactatgttgggtgcgaaaatggtgagaagcttggatccgggacatggaccggtcagccctctttagggcctacaggtgaattgccatttagcgctcaacccaataacgtgccaacgcctggactaagggagggaggagggccatgacgtgcaacgttagggcacttccggtttccattgcattatgcgatgtgtcaactccaattattggaggaaaccaagtgcatgtcggctgacgcaaagaccctaacacaaggcctaggtagcgaagctcccaaagcgcgaagcgctttaagcacccaagaaacatgtaagcacacacccgctagtttatatccatataattacactccctagtaatcatcaaaaatagtttggttctcgtaattaatagagtgaatttgttcaaaattttttgtaaatttattaatatatttgtagatagcattttttcctttattcaaaaaattattttcattttttgaaaaaaagttgtttatttgaatttttatatgtaatgaaatgctatcgtacaaatagtttaaattta

SEQ ID NO: 4296 - DNA, 2243 bp, Heterodera glycines
  unsure (1)..(2243): unsure at all n locations
atagtcataaaaatttattctctggggtttttggggtccccgatcacgaatccttcaattattttgatcaattccgatttcctaatctaaatttgaacaaaaaatcataatttgaaaaattcaaaattccgatttttattcgagttcgggttagggattagaaattagtcaaaatacatgtcagattcgtgattagcgacctttaaaaccccggataaaaaattatcatggttttttatcttaaaaaaattttgcaaaacaaaagggtccccccttttgtttcaaaaaggcccacttttagtatagcgccatcattttcatgggagcggggaaaaggcgggaatcgttcccggcatttttgaattcccattttcattgttcaggtgttttttttactaccgggctctagaaatgataatttaaagtagcagaatttatgcttaaatttgattttgttgtacaatacaaagcatttcccgttctttcacaatgaatttttctcttcacataaatatggccaattaatcagccatttatttttttaaataatccgccttttttcgttcttttcctcgacaaaagcaattccacgcgatcggtggccaacaacggaagtgccaaatcgcacgtgagaaattggatgcttctcctgtttatctgaaaataaaatgccaaaattgctggccagaggctgcttccgcttgccctacgttcagaattcggtcccctggctgcaatcgtccacttttatcggccggtccgtcttttaccactgatttcacgtaaatgccgccctgtctctgctgttccctctctccccttgccgtttcgtcggctgtgccatcgcaaaccgaaaaaccgaagcttttcgtgtacgggcaacggcacaattgaatggtgaacacttcgctgtcgaattggtcctcctcctcttcgttcgcctcattctcttcctcctgctcacaatttccatcatcctctgttggtgaagtgatgaacggaactactgaagagcagcgaactcgctgatgctcttcttcatccgcagacggagcgaaagtggacgcattgtgagaaggaatgattggtgggacggttgaggacacttcgccgactttgctgttggagttcagctgtgtcagaagcgccaacgcattggaggcggcccggggggaaggcatcggcgggggcaactcaaccacaaaagtgttgccgttgtgacacatttgttcgcctctaaatcttcgtaaatatggaaaggtaaaacgagtatttggcaatacttttgcttttcccgggaaacgggcgtttgaggccttggcagagttacgcttgcaatgtttctgacactttcaccggcgcggtaatttgtggaggccaaaggcgttttcaggctgttcatccctttgattggaaaattggaaggaaaacgacacgaaagaaagccattttgagtaaagttggcaaagtcgttactgctgagaggaacaaaaatggaattttggcattgtgccaatgtttccgaccatttcttcgcgcctctgttcgtcgtgtaattggacgcttgccccgacagaatgcactcctccaacttgcgcagcatctcctcctctcccactgtttccaatgcgtccaaaatgcggacccagtcctccttgtcctccttttccgtcagtgtcgaccattcgggggaagttgaagccgttgttgggcacgaccgctgctcgtttctgcaaacgcaacatcgttcctccagcgatgttcttgcggcatccgtcgactgacaagtggccgcgttgtgctgctgctgccctctgccgctttgactatcagtcgcagcagccgaactcagtcccgagtcccaaccagcgcagcactgctcggagagacggtcgactgaaggggcggggggagagaatgaaggagggggggcactgccaaataaatgatgccttgctggaagttgtttgaggtggaagggcggagatgggcgagtcgggccgtcccatgtctgagattgttctgtttgttgccgatgggtggagagtcctttcattgagattttcattcgttgcaaaatcaccgagcaaatctcgaggaaacctccattgagtccacggcactgtccacacttttcaggggagtgcccattttgggggtgtcatggtaattctcctcaattccattnnaaaaccncaacttatgagaggaacaccaattagcagctgaatagacaaattagc

SEQ ID NO: 4297 - DNA, 1291 bp, Heterodera glycines
aatttttttttttaattttgctaacttataaattgttcaagaaaaaaatcttagttttttcataaaaaaattctaagaaaaaaaatttttcgagaaatttttatgatgaattactaagatttttcaaaatttttccaaaaatcgctgaaaatttctcggggcgaaccgagctggggggaaatgaagtgcatctgtggaagacgactgcttgaaaaaccggaatttcacatcccggtcccgacctattctacattaaacaaacgaatttataaaaatttctagttttcgatttctaaattagtgcctaccgttccgccaattcccctggcattagtcgagagatgacaattgggtccgaaatgcctccttccgaagcgatcgttaccccaaggggccgtccctttcggcacatttccacggaataaaccaccgaatgggaggtgcccaacagaaggtcctgagaatgtcgcgtggattgttcgcctctcccctcgctttacctgctcctctccgccgcccttcgctatgcaaagcttcacaatcggagccgacctgtgcagcaaacggacggactcctccacggtgcacgcgcccaaagggatgtcgtcgatggaatgaatgcgatcgcccgcttggatggagccgcacctaacgcagagggactcaacaaaacaaatccaaaaacaatcgaaagaattgggttctttttctgctacctgtgtgccacacttcccattcgaatgtccgaaataatcagcggctcgcctttggctgcccctttgtgctcacttcggcacacaatgccaagcgaagagccgcgcttggcgagacgaacaacaaacaaagtgccggggccggggggaagcacagactaaaagaagaagaagaagaagcattgggaaatatccaataaacaagggtacttcaatgacgctgaattcaacgagtaaaatgacagaacgggcggacgaaaaggagcaggcacaaagcaaatgcaaaaaatgaacaaatgaaaatggcgggatgcgaatatccgacttattataaggtaaaacaagcgcaaaagccaaatgtcttggtctataacttgacccagcgttgcttgccgtggcatggttttgtttgacttggcttacctgtgcctcttccaccgttccgtccgccgtgttccattcgttgatggaaatgattctgtcgcccggctgcaacactccgcttctgaagttgatgaagccatgacagattggcattgcattgctcaattaatacttttcagctggcgacccccgct

SEQ ID NO: 4298 - DNA, 5453 bp, Heterodera glycines
tagtgatttttaactattttagtgacgaagtcgccaaaatagtgatttctagtgaccgataatgacatcagaatcgaaaatttttaatgcagaaatgcgttttttgagctcctttcttcaaaacaattgagcaaaaaaaaaagttttttcactaaaagttgcgtccctagtgatcagcatatttgtttaccccaaattcattgaaaagaaaatttttacagaagattaaaaatttttgaaaaaagttaataagctaataagggcactaaagaatacaccaaactacacaacaaaatggcgacaacaacagcagcagaaatccccagaaaatcaccacaacaacggaagcgcgaagaaatggcgcagcttctagagtcacgaaaagtgggctaaatgtgaacgaagctgatggtttacatgatccatgtttaggtggatcaaggtgctaccttcgtcgagccaagaaaaccttcaggaacagccggacaaaaggggaggatgaaactcatcacaaacgtttgtcttttctgtagtgttcaaaagagccaatactgtgattttaggcacacattctcaaactactgggtacgcaagccatctaccactacgaggtgaccatcaacgcagtgagcagtcgttcggaccggaagttttgcgtttcagagccgagcggtccacgggatagggacgagtaagtatgacgttgatgttaggtctaacatcttctgtttagtttcccattactcaaccgtcgtgacaaatgccgtgaggtcttctcggcattctacaggaccatggaacagtcactgaaagataccgggaacttactctactacgatttatcgaaaacaatattcacattgaagaagctacagatcgaggtttatgggctttggatggcattttaataataacacatcgtttagtcggaaggaaaattcatgtttaacatcggcacggtgccaaccgctgaacgcccagacgcggcacggttcaaacattatgaattcatcatcaggccagcgactggcttcgaggttaacgacttgtccttcatcacgaacgacgtgtcgaaaatggaacgatcacttgagcaattccttgacattgcaacggcgcagaaggccaacatggacgggtatggatttaatcgaaaacaataaatatataattttaatatacctaatcatttgaattggactgctgtcagtggatttgggaaattcagagttatagaacaaaaccaaatttcccgacagaaattttgaagtcatgaattcagggccaaattttaaatatttgattcacctaactgttaagaactcaaaagtctattttcaggaagcaatttatcgggtttacttcgtctcgtgtttacttattggcgccaaccgactatggcttcggagccaacgagtgtcctgtcttcgattccaaccactcattcttaggtgtcggagtgaacaagggatgtcgaattgttgaaggtttgttcgttttcgttcaattaactcattagaaaatcaggagatcaaggccctggccaaatgacaccagccatcgtcatccaaacgaaaaaggtttatttttatgggttccatcagtcgtcccataattattttttaccatgttccattcattgtccttagtccgctttccacattccggacatgtgcattttggacaaggcaaaaacgctccttttccgagagaatcagggaaggttcgagacaggtgactttactcaaagtgactacgaggcgctttgcaatggccttgtcggtatgttaatataatgcgtttgaaacgaattgttttatacccattctctaggaatttatgctgaaccgcgctatggaacgtcgggacgatttttccgcatcagtgacattacaaaaccaaacactggaaatggtcttaactcggagaacacatacatcacacaccaagtcagcgggaaaatcagcgtcaaacaatatttcgaggatacctatcagaaaacgcttcagtgagtttatccaattcgattgttttcttaaaagaaacattttagtaattatttctccatttcaggtaccctaaagcaccactcctcgtcaattatcgcagaattggggacccggcgtattatcccatggaggtaaaacggacagcaatttattgtccctttttaaatttaattaaaacacttaggtttgctttgttttggatggtcaacgcgtcaaaagttctcaacaaaatcccgagcaaattcgtgtaggtgtttagcgatttaatttataatcatcattctattccaacattaacaatatgtgtttaggaaatgatcaaagagactgccattccgcccaccgttttgcgagtgcacaacgaaagggtgaaggagtcgcttcagttggtcaacaacgaatacttgacaaaagcgtccgttcactttgacacaacgccactccatgtcgattaccgtgttcttggtccgccagcaactctctatcggaacaaccatcgtgtcactcctgccgcgtcaaactgtgaatggcgtccgggtgacgctttggtgaatgcgcaaattggcaactgggtagcctatgcgtttgggaaccctgcgggtgactcggtgcgacgattaggcttaaccgaaacgatgtggaggtaattagcgctgaaattcctgattggttttaatgtaccaaaaaaatttatagtaatatctgtcaactttaaacaggaatttcgtggacaagtatgcaggtgaaatgcgtaacaagggcattgtttgtgtgcctccggtgcgtgtctctttttgctggtttacgtccgtgaacgaggtcttgaatgttttgcacaaggaagccctgaacggcgttgagttctgtctcattggtcatgcgaaaggctttgagggtgatgacgtgcatggtaccatttattagccgttgtaaaatttaggctcctgattgtgagttatttatttagttacgatcaaggcgtttgaacaacagactgaaattgtcactcaagcaatcacatttgacgttctcaaggatgtgctcgataaaggcagcccattgactgttgcgaattgcattcacaaaacgaacgtgaaaatgggcggtctaaattatgctcttcatatggatgatccatcgtacgtctttttttcctttttccatatagccaatacaattggtttcagtgtggcccaattgttcgacggtcaaacactgtttcttggttttgcaatgaacttcccgggtggattcgctccttccgaatctgctgcccctatcaacggtgcgaacggttctgtgccttcaggaagtaaagctggaccaactctgcagaatggtgctaacggcgtcgccgctactggagcaaacaccattcctctcggctcaaatggaaatgtggttccgagtgcgcccgtgccacgagttggctcctcattgcctcctccttcgtgcattggggtaatacaaaaaggagaagagctcattaatcaattttaaaggtgtaagtcaatttctaaaattccagtgggccgcgacaatcggaaaacgacacaaggacgaatacattggtgactttgtctaccaggctccgcgacgtgaggagaaaattgatgtcattgcaagcgttgtcaggagatgcattgagtccttcaaaaagaacaggaacaaactaccgtaagttttggacaatttgcaatttatttgttcgcaatgattgctcagactacgcgtggtcattttgcgcaacggatgtaccgagggacaattcgaatatgtcatgaagtaatttttcaaattgatgaaattatttgaaaatgaaaatttctattaaaatagtgacactctggctcttcgaaaataaataatgtgccctactttaagatatgaaattccgctggtcaagaaggaactggaggaattgggttgcaccgcaaaacttactgtgattgttccaaaccgacttcaggtgcactttcccacacatcaaaacggcaccgcctcatgtaatttaacgtttttatttatttcaggatgtacgctttctgcgtcaagatgccaagccggaggacaagagcaatgagcaaaacatccccccagggactgttgtcgacactggtgaatattttactaatttattgccctaacgagttacaattttcagtcgttgttcaccccaaacgctccgagttcttccttaacagtcacgtggcgatcaagggcactgcttgtacgccacattacactgttctgcgggacgagaacgatatgtcgatggacacacttcaaacaatggtccattacctctgctttgggcatcaaattgtcacaaagccgacctcattgccctcgccggtgtacatcgccgatgaatatgtgagccaattcaaataacaataagaaaacatagacagagaatcgaaatcatttaggcgaaacgcggtcgaaacatctactcacactacgccaagaacggtattgacaacagcaaaaatttgcagctcttcgcaaagaacaaaggggtggaatggccgctgcgcacttatgcggacatgaccaaagtcctttctttcctcaacaccacctacctgagggagctgcgcatcaacgcctgataagttagtgatggatggattttgattgattgtttttgttttccatttgattgtttttctttttgtttagttttcgtttttttcttcggtttgcttagcattgatacttttctcttctaatattttgctcaatttgattgtttaactcccctcacctttgcctcttcaattcgtgcatttgttttcgtttcttttggtctttcttcgtgcattctcttttctttttttgaatgattttttccttctccgttttattgtaccaatccttttgttgtttattatattctgagctttaataaattgaaaattggattttttggttttaaaagaaaggtggtaactcctcttaaaattgtcaattaaggatcggaattatagataataagttgaccgaattcgcggcattgattttataaatgcgatttatctttccatggcgaaaaccattatgtttattgggtaatactggagaatctgggctccacccaaaaaaattatttttctgctaggaaaagtccaaccctggggtttacggggcttctgatcacgaatatgatatcagagctgcaaaaatcattgattttatcatgattttgaaaatcttagatttttcgaaattttgatcaaatgaagcgaaaaataatgaaaggcaaaaggtttagccactagaccacacttgaacttgaaaaaaattctgtaaaaaataaataatttaattttttttctcaaaatttcttctccaccagtttccttctcttttctcacccagaccccctttcttaccagtgcttacttagtcccgccgggaccggtactggcaaaaccggga

SEQ ID NO: 4299 - DNA, 2098 bp, Heterodera glycines
  unsure (1)..(2098): unsure at all n locations
aaatcaacaactgatgaagaaaaacgtcaaattattcaaaaattcattgaaatggcaaatgaatataaacaaaaaagaaanatattcacgaaaagaatggaaacaaaatcataaagaaatttgcaagaaaattggagtaagcaaagggacaattatcaaatggaagaaacaatttggcataagcagtaaaagaataacgaaaaaagaaaaaatggaaaaaatgaaaatttattgggaaataaaacgagcaaatccaaaaatgagtcacaaagaaattggaaaaattgtgaacacttctcaacagaatatttccaattggaaaaaacaatttggagatgatgaataaataatcattcaatttttttagaagtgcgtaaaaacaaaattttattgaaaatcaagaaaaattatttgttgataaattttattttaattatataaatcattttggttttgttgtattttaaaatgccgtaaacatgacatgcagaattattaaatattcaaatcataaataattttccgaaagatttctaagaggttttttgaaaaaattagagtagtacgggaccgggaatttttgccaaaaccgggacttgccgtgacctgagaagccgggacctcgatttttgtccgagaccaaccgggaaattttccaagaaaaaaaaaaattaaatttttagtttatttaaagtgaaaatattaaataattaattttttgtttggttttttatttctaaaacccaaaagttaacgcacaattaattataatataatttaatcaatatttcaaaccaatttgtttcaattatttcaaacaataatcatttggactaaatgatcgaatattattagtaattcagatttgcttttcacatcactttttttcggcgcgctttttccaaaaaacttagcggaagaaagggggaccggcggtgccggtaggcgccgccgggggaaaatttgaaaatttgagtgtagtttgttaacagattttcaacaaaaaaggctggttttgagattattaggctcaatttgtacggaaacccatgggtatacaaaaataaaattcaaaataatttaatttctgtagagggattgaacaagtggaaagaagaaagggatgccggcgaagggccattgtccgcgggacagaccagatcccaaaatcagccaaagcagcccgagcaaaaagcccatctaaagaatttgtggacagcagcaattcatccgccgattccgattaattatttttgccttttatttatttacactttgataattaatttgtgaatttatttaacccggaaaaggatgacaaataaactttcgggtttcactctctcttccccctccccgcgcactgtctttttcattttaagcggggtaacccatgggttacttttgactccctcacattatattccccgtcgatttgttctcagaattcttagggactgtctttaacgttgcgctttgggtggcagatgcaaattaaacatccgcttttggcggtgttcggcagcgctcaatggccccgctgggatcagcttttggcatttcttttcagtggccaataatttttggtgggtctgactgaagatattgttgttcagaagaacgtacgttggactatacgtcacaaaagggcaattgcactttgttaaagccaaattctaaatttggcgctgattcgaagggcaaaagccgtgccgacgcgagccgatgccgcaaaatgaatggaacaaattggtggcggagggacaagtaaacgaaaagagactgaaggaaggcaataaatttgggacaatttgggttgagggcgcattgtttgtccgattgagtgtggcacggcgaacgatttttcggtgggtcactgaaaaaaggcacggcaaacgccaaagaaaggaatggaaatggacggagggagggaattccatcccaaagcaaacaaaccaaactgaaaaggacgcagaatacaaaagcccccccccctcccgccgcccgaagggatggccttaattaagccaatggcactcactcccaattcgcatcaattttaggtaattcaaaagcgaccgacggacaacaaccactg

SEQ ID NO: 4300 - DNA, 1637 bp, Heterodera glycines
atgctatactttttttatttgtcagttagctttagccaatctggcatcatttgaaagctctgtgtgtgctctatatttacatgtaaaaatagaaatgaatgattcaaaaataaaaaaagttatgccacgcggcgccgaaaaagccaagaaaaagttaatttttgaggttttttggccataacttttttgtaaactgacgaaattttttgaaattttacaggctaatagagaatctgaagagctatcgaatgataacaaaaatttttaatttggttgatcaggaaaaaagttgttagcaacggcgcccgaaaaggccggcgccgaaagtgggcggttcccatttatagccctagttatttgatggaaagaaaataaactgttttatttattaaatatgaaaaaataactgattttttgtattgttcattttgatcagccataactcgcttcattccccactaaactgaacaattttgatatgcttcaaaagatattgaaaaggagaaactttataagcaaaagctaagcattttgaaaaaatatctgggtgaactgtagtgaaagccccttgaaaaaagggtcaaatgatataccaatcggttcgtctcaaggagctaagcatggaaaaatatgtctcagttgcggaaatacaaaaaaaactggtttttaaacctgttcaaaactcgaaaaattgtgagatttcgcacactaactttttttaaacgatcgaatccccacaaatttgggggaccagagcgtttgggcccccgtttttgggcccccgcgtttgggcccccgtttttgggccccggggtcgtttgggcccccgtttttgggccccggggtcgtttgggccccaacccaaaaatcgaaaaatgtgcttttttaaaaattaagattctaaaaacagcctgagggatccctcgccacttggcataagctaggtttaattaacattcgctcatttttcacaattttacttattccaaatcctattattttttaatagttaaccaatttgatgtacattctgatttggacatttttcagaatggctaacccaattgcaaccaaaaaacaaaaagtaaaattgtcttacaaaggccacctttaacccttcgctaaaatgagttctgatgggatgacaaaattttggagatgagttcaaaaacagcactgacaaatgcaacggccgttcggaaatttggcggttttccaaccgctgattgactggtgtgtgaactttttttttaaatttaaaccccactgaaattacaggctattaatcaattttactgtggtcggacagttgaccatgcattttagttagttttaccattcgctatcgagaatatatatgtattatataggtatattttgataattctacatctagaagttttttttatcttgtatctcatgtgtgtaaattgaaatttgatagtataagataactcaaactacaaccgaaaagaaaaacaatatttttgattgaaaacaccttaaaattaggtaatttttataaattatttatttttgctgcgacgctatgtaccggcccggcgactttttgaggtgtaccatataatacctaaaaatatccaaatttttattacttgccaacggtgggtcccttt

SEQ ID NO: 4301 - DNA, 6854 bp, Heterodera glycines
tcgctgacccacaaaatgtccagcccacgaaatgtccaagtctcgaatttgagttttttattattcagatgggcctaaggttaggcaaggggtaatataaagggtatattcgtattcagcgaccccgaaaaccctaaaaatcctaaattagactcattttgtttttataaattttgaaaaattttggacatttcgtgggtttttactcttttggacatttcgtggcttggacactttgtgggggtgccccctaaatttgaagctttttagcaattatgttcccatatttagaacctattttggggtttttagaacctgaaaactaattattttggcagtttagcaactaaaatataagccctaataatgaaaatgcttcaaaacgatcacaatttatgaatttttgtccatcaaacatcaatcaaatccacaccatcgtttccgcaatgttgttatatcattggcaacaacaaacagcataaagtatttttttaagggcaaaaggtgtacagatttttacaattgataatgatgatgatatgatggaaaaaacagagaagacaggcccatgtcaattaggtagttttaatgaggcgtttgagattgtttgcacttaaccatccgagaaacaaatcatttcaagagtctcgaacgccaaccaacaaaatttggataggaattagaaatgttgaacacccagcccagaaggaataaagaatacaacgatttaaaacaattttgacaacggttgatggatggatggcctgcattttttggccaaaaattttgtatcggtaaatcaaatttatggagaacaattgaggcccaaaatttgttcgtgacaggttatagtgcgggattaatctcgaaatgccggggttttgcatcccgtaaaatcctcaaattataattccgtcgtcaaaatttaaaaaaatcgaacgggaaattttgaattgacattgaggaaaacagcctggtaaaatactttctgtaaacaacgaaggcacttctatacaacggaggggtcaatgatataaaaaaaaacttgcaaaaaagcgactcgaaccatcgaaacccgaaaaattaaaaaaacaaactgaaaattttcgataaaattttcccactagcccatagagaattgatgtttgtttgcatgttcttcttggtcctattacaccagtcaggagttcaaatttttgtaaaataagacaattaacaaaactttggactccgcctaaatcgtagaagtgccggaaaaaagaaataattaaatttctgttggtgatttgttaggaaattgtgaaacaaatggatggaaatgaatggacagagagaacgaaagagtagaagttaaagggaagtcaaccaattatcggtcatcatcatcatttgttcatttaaatgtgtatccagtccaaatttcccgccaaacaatgcgccaatgacaacaccaagaaaaaaagaaacactcgtccgtccgtcagtcaaaatgccaaacacacacatataatcacactgtgatcagaagcccaacttcacgtatcggatgatctgagatggattggggagatttagagggattatggaaatggaaatgatttttcaaaatggatttttgtgggtttattgcacttttacgcgtccaatctgctgaccagcctcaattttttaggccataacttttttcttatttgaacaatgtccatattcttggtatcaaatgaaagctttaagcctcggaagtttaaaaacttacataagaaaaaatacagtggagaaaaaaataaattcagttttttcggcgattaaattcaagcatttttttatttgtttaaaccatttgttttagcttagaatttatcatatagattttaagctttcgtttgatgccaagaatacagacattgattaattttatggcataagaaactgggcctggtcattgattgggcgcctaaagtgccatagcgccgggttttctataaaagggctaatgaaatttgaattttccaaaattgcaaaagatccttttttcgcaattttttccaaaatgattcaaataacctcaaacactgctgagccacaaacgacgaacacctgcaaaaaaatcgacagttagaaatgataaaaaaattagacaatttacaccttttgagagcttttaggtgcccatttaagctctcactgtcttatttttggttcattttttcccaaaatttgccctccaataaagcacaaagtctgttttggcaagaaaacccggaaaaaactgacgaaaatgccgatcagccatggcgcggccgggtactgattttccttgggcttcaatgacttggccacctgaccgcgggccaccacatttttgctgaagtgttggttggccacactcatcctttgtttgggcgccatttctttcaattcttacgtgggggttatttaatgggttggattaaataaaccgatatttacctgaaaaggataaaggaaaaatgggaatgaaaagataattaaaaaataaattcggtttgaatttcaacaacaaaagaaacaatgagaaaacggaattaataaagtcttatttgccctaatgagaaaaaaacaatgaagagcaaagcaaggaaagtggaagaaaatttaaaaaaggtcaatttcggatggatgaaaattttatgaatttttgaaaaattcaatttttaggtctgttacagtttatgagtccaaatgcaattttttgcaaaatgtcattggactaatctttggtcattaatgtttcaaagagcaaaagcacccaaaataattttgcaaaattcggaaaaaattttcaaaccgaaatccgccggtgataaaacaataggcaaagcatgaactacacttattaacacggactcgaaaaatagaaaaaaaattgctatttggaatgtctgatcacagctgctgttgctgctggttatgaacgttctgcaacagatgcaaagtgccaaaagtgagctgcgaattgatgaacggaatgtagaaggcacgatggatgggatgtgattgggcgggaagcaaaatttgtctctgatcaatcgatcggaacattgccttaaggggaaatgggaaacattaaatattggttgagataatttgcacataaaatactaagtgtaagagcatttaaattgaatgattgggcgtgattaatattaaaaaaaacagaaataatcacacctattgactattaattacctaattagtcaaagggggcaattatgaggggataaatttaaataaagatgaaaaagagcgggggaagcaaatccataaaaccattgaatgaatgaatgtgtgtattttaatatatggatgaatgaatgcatatgaaatagagaactctgactgaaagaaaaaagccacaaaaatttgcgacgtggaataaatgggaaagggggagggaagataatgtcgcagtaattgaatgtttaggggctggaaagcaattagttattttattaatgatggctggcgattgctgggtgtgtgactgattttctctttatctctcttctctctctacatatttgtgcagcaccgcacgacaagcagcaaaaattaaaaaaacaacgactaattaagccccagtcagtcagtaattagctaattagtgatcaattagaagcaataagtgatcaaagaaggcaaacgggaaaccttcactctttaatgcttgtaacaccctcttctgctgttgtgtgtacacagcaacaaataaaacaccaaagttccaacacagcagtgcgacgacagcagacaattcaaaattgtcgttagcaaaatgtttcttggcgaaatgcttttgaatttaaaattcttgaagttttcaaattgaaaatttcttttcctctagatttcattctcaattaaagttttcttatgtcaaattgttaaaacactaaaaacttttttgtattcagttcaaattaaaagttcctttttttatgtataaattttgaaaaataagccactttccataaaaagggaattaaatggttttacatacctagattagagtgttcgaacccgtacgttcaaacacgaaaattaaaccaacgagacattttcagccctgcctgatagattaaaaattattcttcactccatttgtaaaagtgctaaaaaagaaattaccacacaatttatacattttcaagcaccactgttttttaaagataaatttcaaatttaagtgttgtccccgaacaaatgttgaatcccattccgtcaatgaccaacagagccgaatatttgttccgcttttttgaaagtatgccagaaaaagagcttcgcgaagaattgcgcaaggctccattataccaagggtattgaagcaaaaaacaaaaaaaaaaattttttttaattcagtggcacaaggaagcaaatgctcaaacggctgagggatcatcaccgaaaagagctgatagagcacaggaagaaaaaccaccgcaattttctcactgaaaatctctacgactatctgattgtaggtaaaataggaagatttttcgattcaaaattggcaaaaaaaatttttttttgaaaatttcagaaaaatgcaaaaagtcaccgaaacccaatttttaggtgatcgactttgagtgcacttgcgaggcgggcaaatacgaatatgacaatgagatcatcgaattcccagctgtgcttgtcagtgttaagggcaggaaaattgtaaatttgaaaaaaaaaatttttcaaaaaataaaaaattttagattgacacttttcatgcggtgatccgtccaaagatgaacccaaaattgactgaatattgcaccaaacttacaggttataatgttatttttttatatgatttccgtttcttgactaaagagtcggccaggccaaaaaatcgcaaaaaaaaaaaaaaaaattgaattttcagggtttgtaaatttttttcatttcctcacaggtataacccaacaaatggtggacgaagcgtgcacctttcccgaggtgcttgacatgttccgggattggatggccaaacacgggctggacgggctccacagagtggggggaagttgccgccgcttttgctacatcacggacgggttggtaaacaaaaaccagggtcgggttcagggacgcatcacggggggaggggaaatagtattttgtgctgaaaatttttttattggtaccccctccaagacctcaattcacccaattttctaaaataaaaaaaaatccacaaattaccaatcttttagtgaaaatcttaaaaaaaattttttttttcccgcggtgccaaacccctccttttcttctaaaattaaaaaaggctcgccgtaaaaacaaaaaatgttatttaatagccaaaaaatgtgaaaatgtttcaagtttaaattgtaataggggggggggggtgacaaattatgtaaaaaaaaattttcttgtatttgatagtgtgttttccaggccttgggacattggcaagtttttgcagtcggactgcctgcgctgggccatgccgttgccgcacgacttccgcagctttgtgaacctgcgccgtgcgttcgtcaacttttattgccacgcgcggcccggccagccgaagccggcacgtctgcccagcgcggagttgagcgaaatgctcaagcggttggacatgcaatttgtgggccgtgagcactgtggcatggacgacacggtaatatcataataggatgtacgggacaaccattggcaccaaaaaatcggattgggttgaaaaaatgttcttaaaaattcaaatccggggccctaaatttagcctaaatgtgggaaaactgaaattcaagggaagaaaatggaaaaaaattaaattgataccaaaacaacaattttcagattaacattgcccgaattgtgatccaaatgctgaatgaccatgccgaattgagggtatattaaaaaaagtatttgttacattattttttttaatttttttaggtgaatgagaagttggtgaacggtgctctacttttgccatgggtagaattttaacaaataaattttaaaaaaatttatgaatgcatttgttggcatatcccccccccccttaataaaaatttcgttagtttctctcacggcactcaagttttggtggtaaaatacatttggaaaagattttcggtgccaaggaacaaccaagaaatagtgtgccaaaaaactcatttttctgttttagaaattaacaaaattaaatttttagtcacccttaaaaatgtatggcatttcactttcaccaacaacaacaaaaaaaaaatttgtaccatattttccctcaaattttcagcatcagaaacagttgattttcacggaccaaatgtgggaaaagcggcagaaaaacggcaccaccaccaataataaccaaagcaaagcggcgccttcgcccccactggccgcgttggaagcgtcgcacgcggcgaccatgtcctttctggactcattcggctcgtccacctccgcctcgtcgtcagcggaggacatcatttgcgcgggcatggcacggatgggctttcgggatgtggacgatgacggatatgaggaggaggaagcagcggcggtgaatggtggcggtggcaccagcccgatgaatggtggtggcaacaacaaattggcgacagcgacgacgacggcaaaactcttccaaaatggcatcaccaccaacaccaatggcaaaaagggcggcgacgacgacgacgatgggcaggaggaggaggcgaatgacggcgacaccaccatcaccgcgcatggaaatggtgggtgtgtggaacagcaaaggggttgggtgcgcaattacggcgggggccagc

SEQ ID NO: 4302 - DNA, 1977 bp, Heterodera glycines
tcatctgggctgatcgggcttttataattattaattttgagagttacaaaccggtcccaaatcgttcaatttttgttttgtttttctcgccaaacatgctttaatatactcacattgctctctcctccatcattttcttccaaaagacatttatttattcgcccgtttcttcatatgactcttttttgattgctagaaaattttgtttttcaatttatttattctctcttgacttccgtcgggtccatatttcttgctcacaacaacagctctagagcccggaaaagcgggatttgtgttcggtactgacaatgaatgagtcgagattttcgacttacctatttctaagaattctcatataaaattttgaaaaatatctcacttagtctgtccgggctctactcacaatcacaaaaaaccaattctgactgactacacttatacttatttttcttccaagtttttggtgcaattcacttttacgattctcttcattggacagctttataaagcaaacaacaattcacattacacaacatacacacactattatagccactcaaaatgttaaacggtgcaaatttatttgttataccggcaaattgttgatgaataaaatttatttatttacttaattttaataaaaatatgaattttgggtgggtttaataaatttaaaaataaaaaaacactgggaatttggggatcacttaccatttttgcgtagttcggctccagctcggtctcctgtccgtcctccagatggaccaagaaatcgcaactttcaaccggcacatatctgaattatgtataattaattatatggtaaattgttgaaattgaaatccgccgggcgtacccaattctcccgggtgtaaatccctaaaaataaaatttccaattaccggtccatttcttcccgattcgcgtcattcatccgtcccagcggtgcgtgtgccgtgctgtgccgaagtgtggacgacgtgccgtcgtcagcgctacccgcaaaatgggcgggcaaaatgccgcggaattcgctgcgcacaaattccatttcgactgctgggcgctggcgtggtttgccaccactcgtgccactgttatttgtgccgttgtcgtcgatgataatggcggcactttcaggcagaaaaaaggaggacggaaatcggtgccattctttgccaacgcacagtcgaattgggtcctcaatttttttttaatttttaaaaaaattttttttttcttacccgcatttcggcataatctagcaattgttgccgctgcagaatctgctcattaaaggccctgaaaaggggaaaacattgtgtgacatttatatttcgggcatttatgcaagggatatggggtgacgtcctcaaaaaattacggcattcgaaatggaaattctgatggctcaaaaaatttcggaaaccggtatctcgatggctgaagtttcggcaaccgaaattatgaaatttccactccggacctgtacgtgtccatcagtccggcatagttgcgccgaactgccgcaatgcgtgacacactgaacagcacgaagagcgcggcgaccagcgcacacagtgcggttccaatgccaaactgctgttgttgttgttgaccacgacggatggtggcaccaccggcggggcggcgaacagaggaggacgaagacgaggacggcacagcagcggcagcaatgccatcgtcccgattggaaaagctggcttggcacagtcgtcgtagcaggtcaaagcctagagcggccagcacacaaatgtgcgggtagacggggaacagaaagcgttcctggcacggcacaaaagaggaggtgttgaggattttcattaatttttttggaatttttattgaaaattttaatttcaaggataaattgacaactttcatttaatttatttggattttttgtcgaaaatataaacagtgtttcgaaatttttttaattattaaaaatat

SEQ ID NO: 4303 - DNA, 1758 bp, Heterodera glycines
  unsure (1)..(1758): unsure at all n locations
attcaataattattnntttttggaagaatgaaaaatctcctctaccagagaattttttagattaaacataagacgaaataacttttttaaatttatttattttaaatgagttcatttacagnttngaagaaaaatcaaatgatttactatttgcaagaggaaactttaaattattatttatttgtttaatttattttattttattgtttttattttaaaatttctatcagaaatttttcagttaaaacataaaaaccaaaataatattattttaaaatttatattattttgtatgggttcaattattattttaatggaaaattttacttattcgtaagaggaaaactttaaaatatttatttgttaaattattatttaattgattttgttttttaattatttctttaagaaattgttcgcccccttctcggtaatttccggtgaggagctgaacttggctgccaataagctgatgcaacagaatattggcactttgatggtccatcttcaacccatgcaaatacgcacttttcgtcttcaaattgaggcaaaagcagcagcgcaataaatgccgaaaaatattttggcaaaaatctcattttatgcaaaataatgaaaataaattgtaaaatgaattttaaaaaaggaaaataaatatgcgacacgagacacgagaaaaattttctttaatttagaaacaaaaattaaaacaaaatctatcttaaaatttaaaaaatcaacaattaattgaaaccaatttattttcaaataaattaaaaaaaagaaaaaccaatttatttaaattttaaagttttcaggattccttattttgttttttagcagagttattgttttttgaatatgacccccaaatggatataaatgagcgcattttgtttcagaaaaattggtcgatttttaagaaattgcttgttaaatatgagtgccaatgtgggggaaatggcattttacgcacattttttggtccacgttacaatttgtcaaaaatggcacttcaagaattgggctggtgaagttttaatatatccgccgatatggcacccagtgactattacttgtttgagtcctcatcaaatgcccttgcaggcaaaaaactcgaaaatgccaaggcattcaaaaattggcttgattaaattcacacatttattgacaggtttttacaatttttggcaattaataatatataaagcaaacgtaacgataatgacttggattttgttttaaagactttaatttagtcgtaaaattatttacaatattataattttaaatactttattattgcatcattagaataaaaaatagcaaatcacaaaatacaattttctgtttagataaaagtttttttccggagagctcagatgaatattttttaatattttgtagtttgttttatatagaaaaaggcagttttttcatgtataaataaatgaataaataatggccatcaacaatcaaaaaaagaattttatatttttttaaaataattttaagaatattttggaaaatgaatatgttattaatattctattttattttaattgcaattttcctatttaatccatgtgaatcgaaaaataaaaaattattcggctgttaaaagtaagacccggggcggggaacgggatcccgcacgggattttgcgggatcccagtccgcaatcccgcattttctggaaaatgcgggatttgcgtgagtagtcccgcgggatcccgtcccgcaatactatcccgcag

SEQ ID NO: 4304 - DNA, 6897 bp, Heterodera glycines
aataaaaataaattttgaaattcaaaaccataaggggacaaaaaagagaactgaaatcattagcatattaatctagattttttttttgtttttttttgtcatcacaacaatgggagggattacgaaaatttttaaaattaaaagttgtcaaaaaaactcaaattaattaatttttgtttcggcttagaaacaaaatggatacaaaaagaacaaataaatttgttaactcaaatatcaaacaaaaagcatcgctttcgtcctcacacaaatcgatcttttaaatttccataatattcggctgttaaaagtccgggttaatttcaaaattgtttgtcccgttaagcaatgaaaatcaaaactaattttattagccgtttctttggtttaccgtgcttactaattagtaccccccggggcttctatttttcaacccccctcgagaggggtattctaatttagagggggggggggggtactaattcagtaaatacggtatattgattatgaacatttcaccgcaacatgtagaaaccgtaattttgaaaaatacggactcggaccaggacctgaatatccgagttcgctggcaccggcctggcttagaacaaagcccggcgggcatatttcaacttcgagaaacaaattccgacaaagtcaattgaaaatggaatgaattttcaaacttgttctgattttcacatttgtcctgagaaaatgaataaaatgacgattttttttgttattataattaatgtaaaatatttctgttttggatgaaaaatttgttaataaatgtcctgattttttatgtttgtactgacttttttataatcgatccaagcaataaattctcatttcttcatttaataaagataaaatttcctttttttttgaattgtaaattattactaatatttattgccaattgaaaatgaaattctgtattttattatttttatttttgattgccctaattattccaattgaatcagaaaagaaaaaacttcagcagaaatcatttgatgaaatatttggagaaaaatgggaagaaaaagaagataaaagggaaataattgaaaaatattataaaataaaagagaaaattaagcaaaaagggagaaaatattcaacaaatgaatggagaaaaattgaaggaaaaatagcgaaaaaattggggacaaatcgccaatatatttataaatggattaaagaatttggtcttcaaaaatgcaaatcttacaaatcaaaaactgatgaaggaaaaatagaaattgtactaaaattcattgaaatgacaaaagaatataagcaaaaaagtaaatattcacaaaaggaatggaaccaaaattatgccgaaatttgtaagaaaattggagttagcaaaactacaataataaaatggaagaaacaatttggcattagcaagaaaataataacgaaggaagaaaaaatagaaaaaatgaaaatatattgggaaataaaaaaagaaaatccgaaaatgagtgataatgaaattgctaaaattgtgaacacttcaaatgcgaatatttgtaattggaagaaacaatttggagaagaaaattttgaaagattgaattgatgcttctaaaaattcgataaatttgaccaaaaattttaaattgaacaaactaagacaaataatctttcgcttaattatttaattttattcgtaaatgatttttatttaaattctgtcataaactgttgctttatttcaaagaaaaaaaactgttgaaattttaaaaattgtaatttacaagaaattataaattttttaattttttgaaacaaatcaagtagcaaagataggccagatttaaggccatattgtcatattcggattcttctggtcttgttcagaagaacaatttgagaagtcgcttttgttgtatcagttttcatttttgacgattaaaattttgagaaaattagtggccaattaccaattttggcatggtcgtaaaaaaattgaaaatggttttcgcgggacaaaaaatatgttacaacctaagtatttttagcagaataattctgtgttcatggttttaaacaaaaaaagtaggatttgaaggattggaccaacaaattttcgaacaaaaaaacaacaaaaataataattcaattcaaaaaccaaatttcgcagaattcgtttctcagtcttggagcaattcagtcaactggtcaaataagcgacagtctttgagcaatttcaacagcttttttgtaaacttgctttttattgaagtctcagtctttgagcaaccttcaaaacgtcggcggcttatttgcttcaagcgataacagtgagcatcccaagagccaggagcgccatgtaatataaaatcagctttatattgatgaaccctaacttaatccttaacaactttacactttaattcaaataaaaacaaagcgcaataaaagtagtccgaaacaacaaaaataataattatagcagacaaacacacaaaaagataatgacgaactcacaacaaatgaatgaatgcatgagggaaggggataagtcagtcccaaatcaataagacaaaagtagagaaaaatagacatacacacaaacaaaatgccaactaataataattataaattaaatcatataataacacatccacgcccactgtcaagaggtgatgttgtctggaattcagcacactgccattgttttgaaatccgcgttacaatggtcggccaccagcacaatcaactaaaattacttacaaaattataaattttaaactttattattatgataattttattaaaaaatagcaaaacacaaaatacaatttctgttcagataaaatgttttttccggagagctcagatgaatattttttaatattttgtagtttgatttatatagaaaatagcagttttttcatgtataaataaatggccatcagtaaagaatttgtattttttaaaaataattttgagaatttttggaaaatgaaaatattattaatattctattttatttttatttccatttttctatttaatccaagtgaatcggaaaataaaaaattgtaacaacaaaagtcgttttacgaaatatttggagaaaaatgggaagaaaaagaagaaaaacaacgaaatgagcagaacaaaagagaaataattcaaaaattctataaaataaaagagaaaataaaggaaaagggaagaaaatattcaaaaaaagaatggaataaaataaattaaaaaatagcgaaaaagttggggacaaatagtaattatatttataaatggatcaaagaatttggtcttcaaaaatgcaaatcttacaaatcaaaaactgatgaacaaaagttagaaattgtgcaaaaatttattgaaatgacaaatgaatataagcaaaaaagaaaatattcgccaaaagaatggcaccaaaattatgccgaaatttgcaagaaaattggagttaatctttcaataattgaaaaatggaagaaacaatttggaattagcaagaaaagaatagcggagtaagaaaaaattgaaaaaaattaaaatttattggcaaattaaaagtgaaaatccaaaaatgagtgacaaagaaattgctaaaatattgaaaatccaccaaaataccattataagatggaagaagcaatttgtagaagaaaattttggaggattgaattgatgcttctaaaaattggataaatttaaccaaacattttaaattctttaaatagagactaataatctttcgcttaactatttagttttattcgtaagtgatttccattttaagttcagtcataaactgttgctttatttcaaagaaaaaaattgttggaattttaaaaattgtaatttacaaactgaacaattataaattttattattttttgaaacaaatcaagtagcaaagataagccagatttaaggccatattcggattctactgctctaaacttttcagaagaataatttagaagtcggttttgttttatcaggtttcattaatcaataaaatacaatcctgtcgatacataagaatattaaataccacacattctccatcgcttttttctctttctttgttattctctctttctctcggtctcttttcttccctttcgcacgctcccttcctcaactataatcccggatgtctacagtaattcaagaaattgattttattaagaataatttaacaaaaaattggaaaatagccgggaatatacttaaacgatcaaataatcttgaaatctttgcaaataaactttttaaaggtgtgaaaactttctacataacaacatttagtgcacctggaatcgaaaacttatatttttcattcttagaaatgctcaaaaaaattcaaaaattacccggtcttattatgggtgaatataggaaacaggccttagctatgcggaaactagaaattggcatcaaagaaacagatatatttaaatgtcaagaagcagagaatatatcggacctttgtttttcaaagataaatgaattcgaaaaacaagtgcaaaattatcggtttaacatgagaatgttatacaataaaattagaataacagcagtaaagcatttgtttaaacccgaaaaagaaatattttttagtccttttagaatagaaagaaatagagaaatattttattctatatctaaatatatttaataaaaattcaatcttacaaaatcaaataattgcgactaattaaattatagctcgcatagttttgtgtaatatttgagcgctactcgtgcaaaaaaaaaggggttaagcgcgctgcgaagggcacaacactctcccacaatggggagggagggggcgaccgccggcgcgcgctgcgaagggcacaatgtgagggtaaaatttaccaccacatttggtgcctgatactactaaccagaattattgtacagtttggagattattttgcttcagttcgaattagactagattttgctatcacatttgctcataagaacatgaaaaatggtgttaggtatttacaaattcaagtcaatctttgcatttacgataccgtcaaaaattacaaaatgaaaaaatgccacattgggaaaatatgaccaaatattgttgtataatcttataataaatctcataaaattatgtaccgaacatataccgccggacatattgcctcaaaaaaccaaaattaataaaaacaatttcttgttggatttatatgggaaaacaaatttgatcggaatttttatttctttatcgcgttaaatagcctggatcattcttttttcgacgaagtttcttctcaaaactgttttttccatcttataatgctattttcaaatttttttcaaaaaattttctcttgggaaaattcccggttggtcccggtcccggcttatttgttctccaaattgtttcttccaattgaaaatgctctttagatgaatttcaatatttttgcaattttattatcacttatttttggattttcactttttatttgccaataaattttcattttttctattttttgttcctccgttattcttttacagcgaattccaaattgtttcttccatttgttaattatgtctcggccgactccaattttcttacaaatttcgacataattttgtttccattcttttcaacatttttcggcgctaaaatttcatttttggccattttacaccaattttctgatataatgaaatttcataaaatctctttaatttttctaaaatctctttacattgtgaatttattttatttttattgaaaatatgtttattattttcgaatgagctccagtagaaagtaataaaattttattaatcattaatttaccaattggcaattattttgtcattaagataaaattattattattatttctttgaaattaaacaggatttccttattttattaagtaaaataatgatttattcagttttttaatcagaaaaaaatcatttaaatgcctcaaaaaatgaattgccatttaattgaagaaaaataaaacaaaattatttcgagacgacaaaaatgaaattatttccgttactattattaattattttatttttaattgtcaaaattggatcagaaaagaaaaaattgcaacaaaagtcatttggcgaaatatttggagaaaaatggcatgaaaaagaagaagaaaaacgaaatgaactcaaaaaaagagaaataattgcaaaattcaacaaaataaaagagaaaataaagcaaaaaggaagaaaatactcaacaaaagaatgggataaaattaactcaaaaatagcgaagaaattggggacaaatcgaaacaaaatttatgaatggattaaagaatttggtcttcaaaaatgcaaatcttacaaatcaaaaactgatgaagaaaaatttaaaattgtgcaggaatttattgaaatgacagaagaatataagcaaaaaagtaaatattcactaaaagaatggcacgaaaattatgccgaaatttgtaagaaaattggagttagccatggaacaatttacaaatggaagaaacattttggcattcgcagtaaaataacggagaaagaaaaaatgggaaaaattaaaaagtattgggaaataaaaaaagaaaacccaaaaatgagtgacaaggaaattgcaaaaatgatgaaaattaatagaacgaacatttcaaaatggaagaaactgtttggataaaagaatcgttgaagattgataggatgattataagaaaaattggataaatttgccgaaaaaattatcagaaaaactatgacaatttctagtttttttttcaaattttttgtatttgtattaaaaaaattattttaaataccctaaattttgaaatttttctaagtgcaaataagtgaaaacagtcaatt

SEQ ID NO: 4305 - DNA, 5253 bp, Heterodera glycines
gatattttgaactttttcgcattttttgtacatattttgcaatttttgaggattttttaaggaaaatttttttagatgccccaaaaaaaaaatcataaattttgcaatttttcgtgcacattttcatttttttcatatttgagaatttataggaattttttatgaaatttagaaatttttttttgaaaaaaacagatacccaaaaattaatatttaaggtactaaaatgtgatcttaagcctatttttgtcaaactttgttcaaacttgaagaagtttttttttgaaattttgtaggatattagaaaacatttaggactattgtatcaaagaaattaaaatttagttgctctgagcaaaattatatgcagtttttgttagaaatttgtttttgttgattttttaaaacgtcccttttttggctttttaaaacgctttttttgcaccctttttcaattttaccttttgccatgaccttccgcagttgtaagaatacaatacaacgaaagcatattggcccatcgtttgttggatgggaaacgcggcattgaaattggcgcttccatgcacaacccattcgggctggacacgctgaacattgattacaacgatgacccattggcacatttccaagtgcatcaaataaacatttcgggtaagtaaaattattaaattaataaaaatatttagtaaaatataattgtgccaaaaatagtgtcggtattttggtttggatttttcaatcaaaaataaataaatcgaaaaatttttcaccacataattcggatgaatttgtttattttaacaaagtgcaaattaaaccttttctgaaatagaaggcattttttaaatgatttcaggaagtgcagcaaaagtgcatataattgctcccggagacaaactcccattcgcaaataactccgtcgattttgtgatcaattcgcacgtgttcgaacatttttatgacccaatcagaaccattgaggaatggcttagggttgtgaagccaggtcattcaaatatacaatgtttttttaatatttttaaattgaaaaatgaaatttttaataaatataaacattaatttccagtgataattttttttatgtaaatacatgtttttttcctggattctctatagcctaattagtagaaaacactttcttttttgtgtttgcgaacaaaagttgggacttttatttacatattttcggaattttctacatattacatatgtacatatttttatacatattttggactttttagtacatatttcgcaattttttcgtacatattttgggaatttttgagaatttataaaaaaaattatttgaaaatgtgcccctaaaaaatcggtttttttccaaaaatcagatgtcattaattttttaaatacttaaaagtgattctaagcctattttggtccttttaacggcattttatgattagttcactttttacgaggaatttttttttccaaaaaaagcattaaaaaattttttatttacattttttagtacataatttggaggttttaattagagaccggaaatttcaaatttgcggatgccgctgcgggattggtactgaaaatttttgcgggacgggatcccgcaggtttaaatcccgcatttcccaaaaaatgcgggattgggattgggaaaccgcaaaatcccgcgcgggatcccgtcccgcgccggtctttagttttaatacatattttagcattttttatacataatttatttacatatttcgcgatttttcttacataaaaaatgatccctattaattactataataaatacaaaatattttttgtttgcaggaggattcgtgtacatggacattccacataaagaacgggtggtttatatatttataattaattatgggtattgacataatagagaaatggacagctgttttaaataattggtgattaaattctggaaaacctcgggtttttactttttcaaaaatttggttcgaagtgaaaaaatgatagcatttattttaataaaaatgaaaattcccccggcggctcctatcgaatcgtccaatcttcaagtttttctctcggatcaagtgaattaaaaagaattagagaactttttaaaaatttttctgaagttcgtttgccagtttgttccctgaaatcataaaagatgaactaaaaacctttctaaatctgctttcactaaacgttttttgcacagatttttgaccggaaacggaatcgaacaacattggccgaactgctcgatcggcacgaaaaccctgtgccaggcgatgacattcagaaccaccaccaatctgtgtggatcacagaggatttgttagaattgtgccggcatttcaattggacggtggcagaatggcgcgactcggatgacaagcttggcatcggtttcaccattgtgatcaaaaagacatgattagatgaaatactgacaaaattttgtacaacatagcgaaaatattccaattaaccgtgaaagctaaattaaatatttagtcaaaatgtaatttaaaaatttaacattttacttaaatgcgtaagattcatcaaattctaaaataaagacggcacaagcaaaaaatatgattttagcctaagaaataaggacattttgaatttttacgatttcaaattttgaacaaaaaatggcagttttatgaaatagtagatctcgtattttgaaaaaaaaaaacttggacctgggttccattttattttttggcgtgacttttacaaaaataaaaaagtatggatgtgggaataatgggataatggctagggatgtcaaaaatatgtacaaaaagtggtcaagatatgtacataaatatgtaaaaaaaaatcccgaaatatgtaagaaaaacccaaaatatgtaccaaatatgtaaataaaaaattttggattttttttttgagaatttccaaaatttctgtaaaaaatccacaaaatatgtaaaaaatgtatgaaaaagtccgaaaaagtccaaaatatgtaccaaatatgtataaaaccccgaaatatgtaaaaatatgtaaataaaagtgcaaacttttgtttgcaaacacaaaaaagaaagtgtttttcctactatttagagcatggagaatccaggaaaaaatatgtatttacataaaattgccatccctaataatggcatagaatgggttatttcagtcccaaaaagcgatttaaataaataaaattatcattttaaaaacaaaaatatttaaaaactatctttagaatgattttataatttatgtgattttaactaacagcaaattttttactatttcaacaaacctcctttaactaaatgccgaaaactgattcggtcttaactcatgcccggcgcagctcatctggcccgactcatccaaggtcactcgctcaaaagccaaaacgctagcctccgttctgaccatttcgatttgtgcctttctgagtggctctgctccagccaacaccacatgcaagccgaaacgtggaaaatgcccgtcgtcccacgcacagagaggtcaggcgccttcgggcgttcaactcctgctgtcctccagaaaatggtctctgcgcgattgatgatcaagtgcccacaagttccacatggttgctggtgtgccaagccggacaagcgcagaacaactcgtaacatgtgaccgacaaattcttcgactcaacggattttgttgaacactgctcatttgtgatccaatggattgtgccctctgacacgaatacaccgacgaaagcgactatgcatgatctcaattcaggaagctcaagaagcacagagaaatatgccggaggatgacagaactgatactgccgcggggagtgtcggcaaagcggtgccgacgaaagataatttgtattaaaataatttataatttattagtcattcaatgtgatctttgaaaattgtgattttattccctcctttgaaacattttgtccatttagcattagtcactagagaccggcgcgggacgggatcccgagcgggattttgcgggatcccagtccgcaatcccgcattttttggaaaatgcgggatttgcgggattaatcccgcgggatcctgtcccgcaaagaattttgagttccaatcccgcagcgggatccgcaaatttgattttttgtgcgggattatgcgggattttattgattttttgaaaatttttctaagacagaatgccaaatatttttaaataaattaaataataaattttattaaagttaactcatttttcatcgcaaatttcattcaaaatttgtgaaattttcccggcggcgcctatcggcaccgccggataggcttttacttaataatcctgtagaaattgagtcaaaaactgcgtcatttggtcaattttagacaaaatctgttaacaaatcgcattaaatttcataaaacttctcgcagatgtcgataggcaccaggtatggcacggaaagacttccgatttccgacatatcttctttttttcactttaaatctcaggtcccggtcccggtagggcaaccgagaaccgggaaaagcaagcactagtaagaattggggtcggagtgtaaaattagtgatgaaaattggaattaaaggaaaaattaaaaaatataattaatatatactttaaaagtaacgcacacaaaaatcgcgctgtaaaaaacgtgtaaatagtcactccttttcccaaaaatgttctaaaataatgaaaaatgacaaaaaaaaattttaataaaataattgaataattttttcaagcgaatatacaaaaaacatttgtgaaataccttttacttggataagaattaaaaaatttagcctattaaaatatttagaaatttttttattatattgtatattttttgaaaactttccgatttcttgcaccgcaaaaaagtggttttgaagaaaaaaatagtcaaatttatgaaccgttaataatttgatttccgatcaactttttaccgtcggatccaatcgaaaaatcttagtcgacccatcagccccttttaatccatcccgccagcccctaaaaatttatttttcagcattttttgatttttggaaattttttgaattaaattgaaattttttcgaattttccaaaattccgcaatcccgcacgggatcccgcaaattttaaatgagggatttgcgggattaatcccgcgggatcccgatccgcaaaaaattttgagttccagtcccgcagcgggatccgcaaatt

SEQ ID NO: 4306 - DNA, 1693 bp, Heterodera glycines
ttgaaaaatgccaaaatatgggacataaaatatggaccaatctactgaaatatggaaatatggacataaatcgcgaaatatggaaaaatatggatatagaaatccttcctagaagcttcaaaccaagctaaaaacatgtttttcgtgcgtttcaggcctcccacagtccaggaaaaaaatatggatttccatataattggactccctagtcatgacgagagaagcccaaaaatagcatttttacaaactatttttgatttagagagacttataaaaacaaaaaaaaacatatttaggaatttgaaaaaatcttaaaaaattgaaaaatacaccctaataatcaatttttgcaatattgattacgaaattccctgctggaacttattcaactgtacatagccgggaccccttcacaaatcattcccaaaattttacgtcacaaattataatttatttgcatttcgccaccgccaaacaggacaatctttttaattttgttttaaaataaacttctaaaagggtgagaccattgaaattaatgaaaaaattttgagaattttcgaccacagctctgaatctgccatttttgccactatttttgctatttttctcccggtttcggcccattttttcgcctcaaaaaatcatgcaaagttttattataaggatgtttctttattaataaagttttaacaataattttcattttttactgatataaatgcaatgcttcagatgccagaagtttaaatgttaattaagtgctttttaaatgttacttttttctcgtgatactaccagaaataaggcaggcgcttcgcgccctcaaaaagggattccttgtttatattttgtcaaaattttcactattcttacattagacacttagaataattaatggctccctgatgtttcgtcactgaacctttcgtcactgaacctttcgtcattaaaataaaattttaaaaaattaaacactatgccatatatttataaaatttttgaactaaaaaacattaaatttgtgctaatggtatgcaatttcatttaacacacatcacgaaaatgagctcttgttaaggtatttggcaaacaaattgaaaatcttggtatcattcgaaagctcttgatgagaacaagctttttctaaggaaatgctaaccgatttaatgattaatgagttagaaaaaagatatgggcgttagaaaatttgttttttgaataaattttcaaccaaaggttgtttgaatccagcaaagagttgttacaaattgttgcgttgcagataactttctattatggccttttcccctaatcccgttgacagtacattatggtaatcggcaacaatgcgccagtgttcaaattccttaaccattcgcttaacaaatgctcttaacactgggttaggtctcaagaagctctccctaattattttgccatccctcaaaatttctcgtcactcacaataacacacttccagtaatcaacttagctaaatatcagaaatgacccacaaataacggcaaaaccccggggggaggttattcccatgatcggaggttcgaatggcaaaaaaatggacaaataataaagtttgtttgtaaaaatatatttcattaaaatatttattttattctcatgaaaaaattttagatttttttggatttttcaggacctggactcggtttaa
